United States Patent Application Publication US 2014/0259212 A1 - sequence listing, part 21

SEQ ID NO: 65956 - DNA, 1917 bp, Oryza sativa subsp
  CDS (1)..(1917)
atgcgatcttcatgggctgactcagctgcgaacgccgaggaatcggcgcccgcggctgctgctaaccacggcaactcgcgcctcccgcgcagctcatacgttcccccgcacctccgcggccaagcggctcctgcagcgccggcgcaagctggcgcgctgccctcggccgccgccgccgcgcagccttctgttggccagcctggtgtggttggtggccctcgctgggcgggcattgtgaatggtggtggtggtggtggtggtgggagcgtaggtggttctcgccagggctttggtgctggtggccgcggtggaggaggtggtggtggcggtggtgcatggaactcccgccctgggggttgggaccgaagagaccgtgaaccggatccttttgccaatagtgaggctgcggaagttgactttgagggcgagaacactggcatcaattttgaagcctatgaagacatccctgttgagacaagtggccatgatgtgcccccaccagccaatacatttgcggagattgatttgggtgacgcgctgaatgagaatatcagaaggtgcaaatatgtgaagccgacaccagtgcagcgttatgccatcccaatctccattgcaggacgggatctcatggcctgtgcacaaacaggatctggaaagacagcagccttttgtttccctatcatcagtggaatcatgaggtcaaggccaccccccaggtcacggggttccaggaccgcatatcctcttgcactaatcctatctcccactcgtgagctttcggtccaaatccatgaagaagcaaggaagtttgcataccagactggtgttaaagtggtcgttgcatacggaggagcgccaattactcagcagctgagggagttagaaagaggtgttgaaatccttgtggcaactcctggccgcttaatggatttgttggagagggctagagtctcactgcagatgataaagtatttagctcttgatgaagctgatcgaatgcttgatatgggatttgagccccagatacgtaaaatagttgagcagatggacatgcctccacgtggagagaggcagacgatgttgtttagtgctacatttccaaaggagatacagagaatggcttcagatttcctcgccgattacatatttcttgctgtcgggagagttggttcaagtactgatttaattgtccagagggttgagtttgtccttgatgctgacaaaagaagctacctcatggaccttcttcatgcacaaagggcaaatggtacacatgggaagcaagctcttaccttggtctttgtggagacaaagaggggagctgatgccctggagaactggctttataacaatgggttcccagcaactagcattcatggagacagaacacaacaggaaagagagtatgccctgagatccttcaagagtggagcaactcccatcctcgtggcaactgatgttgctgctcgtggactggatatacctcatgttgcccacgtcattaattttgacctcccaaatgatatagacgactatgtccatcggataggaaggacagggcgtgcagggaaatctggtctggcaactgcatttttcaacgagagcaacaccccactggcaaggccgctgagtgagctcatgcaggaggctaaccaggaggttcctcaatggcttgagaggtatgctgcccgttcatcgtttggaggcggcggcgggagaaaccgcaggtcaggtggtggtgctaggtttggtggccgggacttccgacgagacagaggcagtggtggtggagggtatggtggtggaggtggaggttatggaggtggcggatatggtggtggtggcggtggaggcggctatggtggcggtagcagctacggaggtggcgggcaaggtttttctagtgcttgggactga

SEQ ID NO: 65957 - protein, 638 aa, Oryza sativa subsp
MRSSWADSAANAEESAPAAAANHGNSRLPRSSYVPPHLRGQAAPAAPAQAGALPSAAAAAQPSVGQPGVVGGPRWAGIVNGGGGGGGGSVGGSRQGFGAGGRGGGGGGGGGAWNSRPGGWDRRDREPDPFANSEAAEVDFEGENTGINFEAYEDIPVETSGHDVPPPANTFAEIDLGDALNENIRRCKYVKPTPVQRYAIPISIAGRDLMACAQTGSGKTAAFCFPIISGIMRSRPPPRSRGSRTAYPLALILSPTRELSVQIHEEARKFAYQTGVKVVVAYGGAPITQQLRELERGVEILVATPGRLMDLLERARVSLQMIKYLALDEADRMLDMGFEPQIRKIVEQMDMPPRGERQTMLFSATFPKEIQRMASDFLADYIFLAVGRVGSSTDLIVQRVEFVLDADKRSYLMDLLHAQRANGTHGKQALTLVFVETKRGADALENWLYNNGFPATSIHGDRTQQEREYALRSFKSGATPILVATDVAARGLDIPHVAHVINFDLPNDIDDYVHRIGRTGRAGKSGLATAFFNESNTPLARPLSELMQEANQEVPQWLERYAARSSFGGGGGRNRRSGGGARFGGRDFRRDRGSGGGGYGGGGGGYGGGGYGGGGGGGGYGGGSSYGGGGQGFSSAWD

SEQ ID NO: 65958 - DNA, 1941 bp, Arabidopsis thaliana
  CDS (1)..(1941)
atgagttcaaattcatgggctgatgtttctgaatcagagagggcaccatctggtggtggttggggttattctcgtccgtctcgaaccaactatgttcctccacatcttaggagccgtacaccatcttcggagtttgttgctccttcacctggtaataatgatcgtgggggatatggtggtgcaaatagtggttatggtggtcgaggccaaggttatggtggtcgaggttcgggctatggtggtagaggaggtcctgtgggcggttggaatgccagaagtggaggttgggaccgtcgggatactgaaactaacccgtttggtaatgatggaaatgcagacccggctgttaacgagcaggaaaacactgtcattaactttgaggcctatgaagatattcccatcgagacaagtggggataatgtgccacctcctgttaatacatttgcagagatagacctcggagaagctctcaatctaaatatccagaggtgcaaatacgtgaagccgacccctgtgcagcgtaatgcaattcccatattggctgcaggaagggatttgatggcttgtgctcagacaggctctgggaagacagctgccttttgttttccgattattagtgggattatgaaggatcagcatatagagagaccacgtggagttcggggagtctatcctcttgctgtcattctctcaccaacaagggaattggcttgccagatacatgatgaagccagaaagttctcctatcaaactggagtgaaagttgtggttgcttacggaggaacaccagtcaaccaacagattagggagcttgaaagaggagttgatattcttgttgcaactcctgggagattaaatgatttgcttgagagaggtagagtctcattacagatggtaagattcttggcacttgatgaggcggacagaatgctggacatgggttttgaaccacaaatcaggaagatcgttcagcagatggacatgcctcctcctggtgtccggcagacaatgttgttcagtgctacatttcctagggagatacagagacttgcatctgattttctttcaaattacatatttctggctgttggaagagtgggttcaagtacggatttaattgtccaaagagtagagtttgttcatgattctgacaaaagaagccatctaatggaccttcttcatgcccagagggagaatggtaaccaaggaaagcaagctttgactctagtttttgtggagacaaagaagggagctgactctttggagaattggttgtgcatcaatggtttcccagcaacgaccattcatggtgataggtcacaacaggaaagagaagtggcactgagatcattcaagactgggcggacacctattttggttgcaaccgatgtggcagcacgtggtcttgacattccgcacgtggctcatgtagtgaactttgatctaccaaacgacattgatgactatgtccaccgtatcggacgaacaggacgtgcaggaaattcaggactagcaactgctttcttcaatgacaacaacacaacaatggccaagccactggctgagctaatgcaagaagctaaccaggaggtccctgactggctgactcgatacgcatctcgtgcttcatttggaggtggtaagaaccggcggtctggtggacggtttggtggtcgtgacttcaggagagaatcttttagtcgaggcggtggtggtgctgactactatggtggaggtggtggatatggaggcgttcctggtggtggctatggagcaatgcctggtgggtacggacccgtaccaggtggtggatatggaaatgttccgggtggtggttatgcaccttatggtagaggtggtggtgcttactatggtcctggaggatatggaaccgttcctaaccaagggtatggtcctggagtggctagtgcgtgggactaa

SEQ ID NO: 65959 - protein, 646 aa, Arabidopsis thaliana
MSSNSWADVSESERAPSGGGWGYSRPSRTNYVPPHLRSRTPSSEFVAPSPGNNDRGGYGGANSGYGGRGQGYGGRGSGYGGRGGPVGGWNARSGGWDRRDTETNPFGNDGNADPAVNEQENTVINFEAYEDIPIETSGDNVPPPVNTFAEIDLGEALNLNIQRCKYVKPTPVQRNAIPILAAGRDLMACAQTGSGKTAAFCFPIISGIMKDQHIERPRGVRGVYPLAVILSPTRELACQIHDEARKFSYQTGVKVVVAYGGTPVNQQIRELERGVDILVATPGRLNDLLERGRVSLQMVRFLALDEADRMLDMGFEPQIRKIVQQMDMPPPGVRQTMLFSATFPREIQRLASDFLSNYIFLAVGRVGSSTDLIVQRVEFVHDSDKRSHLMDLLHAQRENGNQGKQALTLVFVETKKGADSLENWLCINGFPATTIHGDRSQQEREVALRSFKTGRTPILVATDVAARGLDIPHVAHVVNFDLPNDIDDYVHRIGRTGRAGNSGLATAFFNDNNTTMAKPLAELMQEANQEVPDWLTRYASRASFGGGKNRRSGGRFGGRDFRRESFSRGGGGADYYGGGGGYGGVPGGGYGAMPGGYGPVPGGGYGNVPGGGYAPYGRGGGAYYGPGGYGTVPNQGYGPGVASAWD

SEQ ID NO: 65960 - DNA, 1851 bp, Arabidopsis thaliana
  CDS (1)..(1851)
atgatcactacagtgctacgacgatctctccttgatgcgtcgaagaggaatctctccgcttcgttgacctcaatcaatactgttctgtttcacaacctggccccagccgccactagagtctccgacctagccttaattggatcttccgatgtcaaagctgggtttccgtttggtgttgaagcgaaaggaattcattttcaatctgggccgttggattttagagcttcgatggtttctcaagctggatttgcgatctctgagagtagcgagagaagggttggtgattcggagagtgttggtggtgatgggcttgcgatatctgagcttgggatatctccggagattgttaaagctttgagtagtaagggtattgagaaactctttcctattcagaaagctgtgctggagccagcgatggagggtcgagatatgattggtcgtgctaggactggaacgggaaagacacttgcttttgggattcctatcattgacaaaatcatcaaatacaacgctaaacatggacgagggaggaatccgctttgtttggttttggcaccgacaagagagcttgctcgccaggttgagaaggagtttagggagtctgctccgagcttggatactatttgtctttatggaggtacaccgattggacagcaaatgaggcagcttgactatggtgttgatgtggcggttggaactccaggtcgtgtcattgatctgatgaagagaggagctttgaatctatcggaagttcagtttgtggttctggatgaagctgatcagatgcttcaagttggatttgctgaggatgttgaaataatattggaaaagttgcctgagaaacgtcagagtatgatgttttctgcaacaatgccgagttggatcagatctctcactaagaagtacctgaataatcctttgacagttgatcttgttggagattctgatcagaaactagcagatggaattacgacatattctatcatagcagattcttatggaagagcatccattattggtcctcttgtaacggagcatgccaaaggaggaaaatgcattgtttttacacaaacaaaacgagatgctgatcgcctttcatatgcattggctagaagcttcaaatgtgaagctttacacggtgatatatcccagagtcagagggaaagaacgcttgctggtttccgagatgggcatttcaatattcttgttgcgactgatgttgctgcccgtggacttgatgtacctaatgtcgatttgatcattcactatgagcttcctaataacacggagacatttgtccatcgaaccgggcgaacgggtcgggctggaaagaaaggaagtgctattctgatctacagtcaagatcaatccagggctgtaaaaataattgagagagaagttgggagccgattcactgagctccctagcattgctgtggaacgtggaagcgcaagcatgtttgaaggaataggttctcgatccggtggttcctttggaggaggcatgagggatcgtggttcaagctttggtggtcgttcaggcggtggtggttatggtggcagcagtggtggttatggtggtgggcgttcaggcggatcaagcaaccgttattctggtgattctgaccgttctggttttgggagcttcggtatgcgttctcctgagggatatggttcggatcgttcatctcagtcaggtggaaggagcagctttggtggtggtcgttcaggcggatcatcaaacaatcgttcctctggtttcggggactttggctctgaccgttcttctcagtcaggcggaaggagcagctttggtgggtttggatcaaatgatgggaaaagatcttactga

SEQ ID NO: 65961 - protein, 616 aa, Arabidopsis thaliana [sequence omitted]

SEQ ID NO: 65962 - DNA, 1284 bp, Arabidopsis thaliana
  CDS (1)..(1284)
atgggagacgctagagacaacgaagcctacgaggaggagctcttggactatgaagaagaagacgagaaggtcccagattctggaaacaaagttaacggtgaagccgtgaaaaaagggtacgtgggaatacacagttctggattcagagacttccttttaaaaccggagcttctcagagctattgttgactctggatttgaacatccatctgaagtgcaacatgaatgtatccctcaagctatcttgggcatggatgtcatctgccaagcaaagtctggtatggggaagactgctgtgtttgtcctgtctactctacaacagattgaaccatctcctggccaggtttctgcacttgtcttgtgccatacaagagagctagcttaccagatctgcaatgagtttgtgcgattcagtacctatctgcctgatacaaaggtttcggtgttctatggtggagtcaacattaaaattcacaaagacttgctgaagaatgaatgtcctcacattgttgttggtacccctggtcgggtgcttgcacttgccagggagaaagatctctctttgaagaatgtgaggcattttattcttgatgaatgtgataaaatgctcgagtcacttgacatgcgaagggatgtgcaggagattttcaagatgactcctcatgacaaacaagtaatgatgttctcagcaacgctcagcaaagagatacgcccagtctgcaaaaaatttatgcaagatccaatggaaatatatgtcgatgatgaagccaagttgactcttcatgggcttgtccagcactatatcaaactgagcgagatggagaaaaaccggaagttgaatgaccttcttgatgcgttggacttcaatcaagttgtcatttttgtgaagagcgtgagcagggctgctgagctgaacaagttactggtggaatgcaatttcccctcaatatgcatccactctggaatgtctcaagaagagaggttgactcgatacaaaagtttcaaggaagggcacaaaaggatccttgtggcgactgacttggtaggaagagggattgacattgagcgtgtcaacattgtcatcaactatgacatgccagattctgctgatacctatcttcacagggttggcagagctggtagatttggaaccaagggtcttgcaatcacatttgttgcatctgcttcagattcagaggttcttaaccaggtacaagagaggtttgaggttgatataaaggaacttccggagcagattgatacttcaacctacatgccttcttaa

SEQ ID NO: 65963 - protein, 427 aa, Arabidopsis thaliana
MGDARDNEAYEEELLDYEEEDEKVPDSGNKVNGEAVKKGYVGIHSSGFRDFLLKPELLRAIVDSGFEHPSEVQHECIPQAILGMDVICQAKSGMGKTAVFVLSTLQQIEPSPGQVSALVLCHTRELAYQICNEFVRFSTYLPDTKVSVFYGGVNIKIHKDLLKNECPHIVVGTPGRVLALAREKDLSLKNVRHFILDECDKMLESLDMRRDVQEIFKMTPHDKQVMMFSATLSKEIRPVCKKFMQDPMEIYVDDEAKLTLHGLVQHYIKLSEMEKNRKLNDLLDALDFNQVVIFVKSVSRAAELNKLLVECNFPSICIHSGMSQEERLTRYKSFKEGHKRILVATDLVGRGIDIERVNIVINYDMPDSADTYLHRVGRAGRFGTKGLAITFVASASDSEVLNQVQERFEVDIKELPEQIDTSTYMPS

SEQ ID NO: 65964 - DNA, 1619 bp, Arabidopsis thaliana
  CDS (22)..(1440)
cggaggtgctcaaactcaaaaatggcgtcgcagcttcttaatgttcctcatctcgctttcttccctaaaatctcatatgcttccgtcttctcaacactaaagcccagtttcttccactctacttccactagaagagctctcaaatcatcccccagttcccggattatcaacctccaagccgtcgccgaaactagctctgaaatcgaaagcaatagtgtcactgaaacaactgtgccattgactctacgtcaaatctgccaaggttttgtgcccgagcatatcttgcacagaatggaggagattggatttgtcttccccacggatattcaaagagaagctcttcctactttgtttacaggccgtgattgcatcctccatgctcaaacaggttcaggaaagacattgacttacctcttactcatattctctcttataaaccctcaacgatcttctgtgcaagctgttattgttgttcccactcgagagctcggtatgcaagttacaaaagttgctcgaatgttggctgcaaaatcggagattgatgtgaaaggatgtactgtgatggctctcttagatggagggacgctaagaaggcacaaaagctggctaaaggctgagccaccagcaattttggttgctacggtagcaagtttgtgtcacatgctagaaaagcacatatttagaattgactcggtgagagttcttgttgtagatgaggttgatttcttattctactcatcaaagcaagttggttctgtgcggaagcttttgacatcattttcttcatgcgataaacgtcagacagtttttgcaagtgcttctattccccagcataaacattttgtgcatgactgtatacaacaaaagtggacaaagagggatgttgtccatgttcatgttagcgcaatcatgcccatgccgttgtgccttcttcacagatttgttatgtgtgagaagacaaacaagcatcaagtactacttgccttgttagagtctgatgcacctgaatcagctatcatttttgtcggcgagcagtctgagaagtcaaaaaaggctggaaatgatccatctacaactctactaatggaattcctaaaaacttcatataaaggctcgctggagatcctcctactagagggggatatgaatttcaattcacgagcagcttcactaacagaaatcaggcaaggaggagggtttcttcttgtttctactgatattgcagcaagagggattgatctaccagaaacaactcatatttttaactttgatctcccacaaacggttacagattatctgcaccgagctggaagagctggtcgaaaacccttttctgacaggaagtgcattgtcgctaatctgatcacctcggaggaaagatttgtcttgcaaagatacgaaaatgaacttatgttcagctgcgaggaaatgatgttgtaggtacagtcttaactatctcagtataaaaattttgcattattgcctttgttttctccttttttttttccgtgactaccattactggtgagtccagacaccacagcctaatgtaactagttaagtacatgggaagagtatatgtgaagtgtcatcactatcaaataaatttctttgtaatt

SEQ ID NO: 65965 - protein, 472 aa, Arabidopsis thaliana
MASQLLNVPHLAFFPKISYASVFSTLKPSFFHSTSTRRALKSSPSSRIINLQAVAETSSEIESNSVTETTVPLTLRQICQGFVPEHILHRMEEIGFVFPTDIQREALPTLFTGRDCILHAQTGSGKTLTYLLLIFSLINPQRSSVQAVIVVPTRELGMQVTKVARMLAAKSEIDVKGCTVMALLDGGTLRRHKSWLKAEPPAILVATVASLCHMLEKHIFRIDSVRVLVVDEVDFLFYSSKQVGSVRKLLTSFSSCDKRQTVFASASIPQHKHFVHDCIQQKWTKRDVVHVHVSAIMPMPLCLLHRFVMCEKTNKHQVLLALLESDAPESAIIFVGEQSEKSKKAGNDPSTTLLMEFLKTSYKGSLEILLLEGDMNFNSRAASLTEIRQGGGFLLVSTDIAARGIDLPETTHIFNFDLPQTVTDYLHRAGRAGRKPFSDRKCIVANLITSEERFVLQRYENELMFSCEEMML

SEQ ID NO: 65966 - DNA, 1614 bp, Arabidopsis thaliana
  CDS (1)..(1614)
atggctggacaaaagcaagagcttcccgtctccggcgaacctttagccgtcgagagtccgatgaccaacaagaagaagaagaaaagcaagaagaacaaacatacagaggaaaatcatgaagtcgaagaagtgcctcaagaggtcactaatggtgtagaggaagagttgagtaataaagagaagaagaagaaacgtaagagagaggagaaagagtctgagaagaataagaagaaggatgtcccggagaagaagcttgaagctgaggatttaggagaaggagagagtgaacaacagaaggttgttgtgactgggaaaggtgtggaagaagcaaagtacgcagctttgaagacttttgctgaatcgaatttgccggagaatgttttagattgttgtaagactttcgagaagccgtctccgattcagtcacatacgtggccgtttttgttagatgggcgtgatcttatcgggattgcgaaaactgggtcaggtaagacattggcttttgggattcctgcgattatgcatgtgttgaagaaaaataagaagattggtggaggatcaaagaaggttaatcctacttgtttagttctttctcctacacgagaattggctgttcagatttctgatgttttgcgtgaagctggagaaccgtgtggtttgaaatcgatttgtgtgtatggtggaagctctaaagggcctcaaataagtgcaattcgatctggagttgatattgtcattggtacgcctggtcgtttgagagacttgattgagtctaatgtgcttcgtctctcggatgtttcctttgtcgtattggatgaagcagatcgaatgcttgatatgggtttcgaggaacctgtccggtttatattgagtaacacaaataaagttcgtcaaatggttatgttcagtgcaacttggcctttggatgttcacaaattggcccaggaattcatggatccaaatccaatcaaggtgatcataggttctgtagacttagctgccaaccacgacgttatgcaaatcattgaggtcttggatgaacgtgcgcgtgatcagcgtctcattgcattactagaaaaataccataaatctcaaaagaacagggttttggtatttgctttatacaaggtggaagctgaacgtctcgagcgttttcttcagcaaagaggttggaaagctgtatctatacacggaaacaaagcacagagcgaacgtaccaggtctttatcattgttcaaagaaggatcctgcccgttactggtggctactgatgttgcagcaagagggcttgatatcccggacgtggaagttgtgataaactacactttccctttaacaacagaggattatgtacacagaatcgggaggacaggaagagcgggtaaaaagggcgttgcacacaccttcttcacgccactgaacaagggtcttgcaggagaacttgtgaatgttcttagggaagcaggacaagtagtgccagctgatcttttgaagtttggcactcatgtaaagaaaaaggaatcaaaattgtatggagctcatttcaaagaaatagctgctgatgctcctaaagctacgaagatcacattcgataattctgatgacgaagactag

SEQ ID NO: 65967 - protein, 537 aa, Arabidopsis thaliana
MAGQKQELPVSGEPLAVESPMTNKKKKKSKKNKHTEENHEVEEVPQEVTNGVEEELSNKEKKKKRKREEKESEKNKKKDVPEKKLEAEDLGEGESEQQKVVVTGKGVEEAKYAALKTFAESNLPENVLDCCKTFEKPSPIQSHTWPFLLDGRDLIGIAKTGSGKTLAFGIPAIMHVLKKNKKIGGGSKKVNPTCLVLSPTRELAVQISDVLREAGEPCGLKSICVYGGSSKGPQISAIRSGVDIVIGTPGRLRDLIESNVLRLSDVSFVVLDEADRMLDMGFEEPVRFILSNTNKVRQMVMFSATWPLDVHKLAQEFMDPNPIKVIIGSVDLAANHDVMQIIEVLDERARDQRLIALLEKYHKSQKNRVLVFALYKVEAERLERFLQQRGWKAVSIHGNKAQSERTRSLSLFKEGSCPLLVATDVAARGLDIPDVEVVINYTFPLTTEDYVHRIGRTGRAGKKGVAHTFFTPLNKGLAGELVNVLREAGQVVPADLLKFGTHVKKKESKLYGAHFKEIAADAPKATKITFDNSDDED

SEQ ID NO: 65968 - DNA, 1587 bp, Arabidopsis thaliana
  CDS (1)..(1587)
atgaataataataataataatagaggaagatttccaccggggattggtgcggcgggtcctggtccggatcctaattttcagtcacggaatccgaatccacctcagcctcaacagtaccttcagtcacggactccgtttccacagcaacctcagcctcagcctcctcagtatctccagtctcaatctgatgctcagcagtacgttcagcgaggttatccccagcagattcaacagcaacagcaactgcagcagcaacaacaacaacaacagcagcagcaagaacaacaatggtctcgacgggctcagcttcctggtgatccaagttacatagatgaggtcgaaaaaacggttcaatctgaagctattagcgattctaataatgaagactggaaagcaaccttaaagctgccaccacgagataatcgttaccagacagaggatgtgactgccactaaaggaaatgaatttgaagattactttttgaagagggatctgcttaggggaatatatgagaagggttttgaaaaaccatctcctattcaggaagaaagcattcccattgctttgactggtagtgatattcttgctagagccaaaaatggtactgggaagactggtgccttctgcattcctacccttgagaaaattgatccagagaacaatgtcattcaagccgtaattctagttccaacccgagagctcgcccttcagacatcccaggtttgcaaggagctttccaaatatttgaaaattgaggttatggtcaccactggcggtaccagtctgagggatgatatcatgcgattgtatcaacctgtccatttactggttggaactcctggaagaatattagatcttgccaaaaagggtgtgtgtgttttgaaagattgtgccatgcttgtaatggatgaggccgacaagcttttgtctgtagaatttcaaccttctatagaggagttgatacagttcttgccagagagccggcagattttgatgttttcagctacatttcctgtcactgtgaagtctttcaaggatcggtatctcaagaagccttacattatcaatctcatggatcagctcacacttatgggtgttacccaatattatgcttttgttgaagagagacagaaggtgcactgccttaacacgctattctctaagctccaaataaaccaatccattatcttttgcaactctgttaatcgtgttgagctgttggccaagaaaattacagaacttggttactcatgcttctatatccatgcaaagatggttcaagaccatcggaacagggttttccatgatttccgcaatggtgcatgcagaaatcttgtttgcactgatttgtttacacgtgggattgacattcaagctgtgaatgtggtgataaatttcgattttcctaggacttctgagtcgtatctacatagggtaggcagatcaggacgatttggacaccttgggttggctgtgaatttggtaacttatgaggaccgcttcaaaatgtatcagacagagcaagaacttggaactgaaatcaagcccataccttcacttatcgacaaggcaatctactgtcagtaa

SEQ ID NO: 65969 - protein, 528 aa, Arabidopsis thaliana
MNNNNNNRGRFPPGIGAAGPGPDPNFQSRNPNPPQPQQYLQSRTPFPQQPQPQPPQYLQSQSDAQQYVQRGYPQQIQQQQQLQQQQQQQQQQQEQQWSRRAQLPGDPSYIDEVEKTVQSEAISDSNNEDWKATLKLPPRDNRYQTEDVTATKGNEFEDYFLKRDLLRGIYEKGFEKPSPIQEESIPIALTGSDILARAKNGTGKTGAFCIPTLEKIDPENNVIQAVILVPTRELALQTSQVCKELSKYLKIEVMVTTGGTSLRDDIMRLYQPVHLLVGTPGRILDLAKKGVCVLKDCAMLVMDEADKLLSVEFQPSIEELIQFLPESRQILMFSATFPVTVKSFKDRYLKKPYIINLMDQLTLMGVTQYYAFVEERQKVHCLNTLFSKLQINQSIIFCNSVNRVELLAKKITELGYSCFYIHAKMVQDHRNRVFHDFRNGACRNLVCTDLFTRGIDIQAVNVVINFDFPRTSESYLHRVGRSGRFGHLGLAVNLVTYEDRFKMYQTEQELGTEIKPIPSLIDKAIYCQ

SEQ ID NO: 65970 - DNA, 2058 bp, Spinacia oleracea
  CDS (1)..(2058)
atgccttcaatctccatgatgtccgatgctatcacaccagaaaccctaaaaaaggagaagaagatgaagtctgaaaccctagattccgacgacaccgtcgtcaagaaggaaaagagcagcagcaagaagaaggagaagagtagtagtagcggtaaaaaggataaagaagagaaggaaaagaagaagaagcgtaaagctgttgatttggatgattcttctgataagagtgataacagctctgaattggttcaggctgatgatttgaagccgaaaaaggctaaagttatggaagaggctgttgttgaagctgaggaccctaattcgctttcgaattttcggatttcgaagccgttgaaggatgttttgatttcgaaagggattaaggcgttgtttcctattcaagctatgacgtttgataatgttattgatggttgtgatttggttggccgtgctcgtactggtcagggaaaaacacttgcttttgtgttaccaatagtagagtctctagttaatgggcgcaccaaagatttaaggagaagtggccatggaaggttaccgagtgtcctggttcttctgcccaccagggaattggcaactcaggtgttggctgatttccaagtttatggaggtgcagtaggacttactgcttgtagtgtttacgggggagcgcccttccattctcagataagtagcttaaccagaggtgttgatattgttgttggaacacctggcagagtgaaggatctcttagagaagggtgttcttaaactcggttcacttctattccgagtccttgacgaggctgatgagatgttgaaaatgggttttgttgatgatgttgaattgatcctaggaaaagttgaccatgttagcaaagtccagactcttctcttcagtgctaccttgccctcctgggtcaagcagatatctacaaggtttctcaagtctgcgaagaaaaccgtagatcttgtaagtgatcagaaaatgaaggccagtataagtgttaggcacattgtcataccatgttctgcctctgcaaggcctgatctcattccagatatcattcgttgttatggcagtggaggccgttcaattatttttaccgagactaaagaatctgcctctcaacttgctgggctattgactggagcgcggcctttgcatggagatattcaacaaacacaacgagaggtaaccctcaaaggatttagaactggaaaatttatgaccttggttgcaacaaatgtagcagcaagaggtctggatattaatgatgtgcagctaatcatccaatgcgaacctccccgcgatgttgaagactacatccatcgttcaggacgaacgggcagggctggaaacacgggagttgctgttatgctttatgatccaaagaggtctagtgtcactaaaatagaaagagaatctggtgtgaagtttgagcatttatctgccccccaacccgttgatgttgccaaagctgttggtattgaagcagcagctgccatcctccaaatttctgatagtgtgattcccgctttcaaggatgctgctgaagagcttttgagtacatctggtctatcagccgtggatatactctcaaaagcccttgccaaggccgctggttactcggatataaaggaaagatcacttctaaccggcatggagggttatgtaactctactccttgatgcaggaagaccattttatggacaatcttttgcctacactgtattgaagaggttcttgcccgcaacaaaagctgattcaatcatgggggttgcactaaccgctgacaagagtggtgccgttttcgacgttccagttgacgatttggaaactttccttgttggcgcagaaaatgctgcaggggtgaacttggatgtagttaaagccttgcctccattagaagagaaagtacaaataagcagaagatttggcggtggtggaagaggcggccgtggtggcggatatggaggacgtggtggtggatatggtggtggaggatatggtggtggaggaggatatggaggacgtggtggtggatatggtcgtcgttaa

SEQ ID NO: 65971 - protein, 685 aa, Spinacia oleracea
MPSISMMSDAITPETLKKEKKMKSETLDSDDTVVKKEKSSSKKKEKSSSSGKKDKEEKEKKKKRKAVDLDDSSDKSDNSSELVQADDLKPKKAKVMEEAVVEAEDPNSLSNFRISKPLKDVLISKGIKALFPIQAMTFDNVIDGCDLVGRARTGQGKTLAFVLPIVESLVNGRTKDLRRSGHGRLPSVLVLLPTRELATQVLADFQVYGGAVGLTACSVYGGAPFHSQISSLTRGVDIVVGTPGRVKDLLEKGVLKLGSLLFRVLDEADEMLKMGFVDDVELILGKVDHVSKVQTLLFSATLPSWVKQISTRFLKSAKKTVDLVSDQKMKASISVRHIVIPCSASARPDLIPDIIRCYGSGGRSIIFTETKESASQLAGLLTGARPLHGDIQQTQREVTLKGFRTGKFMTLVATNVAARGLDINDVQLIIQCEPPRDVEDYIHRSGRTGRAGNTGVAVMLYDPKRSSVTKIERESGVKFEHLSAPQPVDVAKAVGIEAAAAILQISDSVIPAFKDAAEELLSTSGLSAVDILSKALAKAAGYSDIKERSLLTGMEGYVTLLLDAGRPFYGQSFAYTVLKRFLPATKADSIMGVALTADKSGAVFDVPVDDLETFLVGAENAAGVNLDVVKALPPLEEKVQISRRFGGGGRGGRGGGYGGRGGGYGGGGYGGGGGYGGRGGGYGRR

SEQ ID NO: 65972 - DNA, 1518 bp, Arabidopsis thaliana
  CDS (1)..(1518)
atgaacaatcgaggaaggtaccctcctggaattggcgctggccgtggagcctttaaccctaaccctaattaccaatcacggtcgggttatcaacaacatccgccgccccaatacgttcaacgcggtaattacgctcagaatcaccaacaacagtttcaacaagcgccgtctcagccgcatcaataccaacagcaacagcagcaacaacaacaatggcttcgaagaggtcagatccccggcggtaacagtaacggtgacgctgttgtagaagttgagaaaactgttcaatccgaagttatcgacccaaactcggaagattggaaagcaaggctaaaactacctgcacctgatactcgatacagaacagaggatgtgacagccaccaaagggaacgagtttgaagattactttttgaaacgggagcttctcatgggaatatatgagaagggttttgaaagaccttctcctattcaggaagagagtattccaattgccttaactggtagagatatccttgccagagcaaagaacgggactggaaagaccgccgccttttgtattcctgtcttggaaaaaattgaccaagataacaacgttattcaagctgttataattgttccgactcgagagttagcccttcagacatcacaggtctgtaaagagctgggtaagcatttgaagattcaagtcatggtgaccactggtggcaccagtctgaaagacgatatcatgcgtttgtatcagcctgttcatttactggtaggaactcctgggagaattctggatcttaccaagaaaggtgtttgtgttttaaaagattgttcggtgcttgttatggatgaggctgacaagcttttgtctcaagagttccaaccttcagtggaacatttgattagctttcttccagaaagtcgtcagattttgatgttctcagccaccttccctgtcactgtcaaggattttaaggataggtttctgacgaatccttacgtcatcaatctcatggatgaacttacgctcaagggtattacccaattctatgctttcgttgaagaaagacagaaaattcattgcttgaatacactattctccaagctgcaaattaaccaatcaatcatattctgcaattctgtaaatcgtgtggagctcttagccaagaaaatcacagaacttgggtattcatgcttttacatccatgcaaagatgcttcaagaccaccgaaacagagtgttccatgacttccggaatggtgcatgccgtaatctcgtgtgtactgacttgttcacacgtggtattgacattcaagccgtcaatgtggtgataaactttgatttcccaaagaatgctgaaacttatctccatagggttggacgatcaggaaggtttggccatcttggtctagctgtgaatcttatcacctatgaagatcgatttaacctttaccggattgagcaagagcttggaacggagatcaagcaaattcctccacatatcgatcaggcaatttattgccaataa

SEQ ID NO: 65973 - protein, 505 aa, Arabidopsis thaliana
MNNRGRYPPGIGAGRGAFNPNPNYQSRSGYQQHPPPQYVQRGNYAQNHQQQFQQAPSQPHQYQQQQQQQQQWLRRGQIPGGNSNGDAVVEVEKTVQSEVIDPNSEDWKARLKLPAPDTRYRTEDVTATKGNEFEDYFLKRELLMGIYEKGFERPSPIQEESIPIALTGRDILARAKNGTGKTAAFCIPVLEKIDQDNNVIQAVIIVPTRELALQTSQVCKELGKHLKIQVMVTTGGTSLKDDIMRLYQPVHLLVGTPGRILDLTKKGVCVLKDCSVLVMDEADKLLSQEFQPSVEHLISFLPESRQILMFSATFPVTVKDFKDRFLTNPYVINLMDELTLKGITQFYAFVEERQKIHCLNTLFSKLQINQSIIFCNSVNRVELLAKKITELGYSCFYIHAKMLQDHRNRVFHDFRNGACRNLVCTDLFTRGIDIQAVNVVINFDFPKNAETYLHRVGRSGRFGHLGLAVNLITYEDRFNLYRIEQELGTEIKQIPPHIDQAIYCQ

SEQ ID NO: 65974 - DNA, 1833 bp, Arabidopsis thaliana
  CDS (1)..(1833)
atgattagcacagtacttcgccgatctatccttggtacgtcaaggcgtactctcgccgcttcggtgacctccattaacgcagctctatttcataaccttgctccagccgccgccacagtctccgatctagcaaatggagctactaatgtcaagtctctcccttcgaattcgagcccttttggtgttaaagtgagagactttcatgttaaatctgtaccgtcggagtttagatcgtcgattgtttcttctgcgggattcgcggctcaagagtatgctccttcttatgagaacgatggagggattggagattcggagagtgttggtagcagcggtggtggtgatgggcttgcgatagctgatcttggtatatctccggagattgttaaagctttgaagggtaggggtattgagaaactctttcctattcagaaagctgtgttggagccagcgatggagggtcgtgatatgattggccgtgcaaggactggaacgggaaagacacttgcttttgggattcctattattgacaaaatcatcaaattcaacgctaaacatggtcgtgggaagaatcctcagtgcttggttttggcaccgacgagggagcttgctcgtcaggttgagaaagagttcagggaatctgctccaagtttggatactatttgtctctatggaggtacaccaatcgggcaacaaatgagggagctgaactatggtattgatgtggcggttggaactcctggtcgtatcattgatctgatgaaaaggggagctttgaatctatcagaggttcagtttgtggttcttgatgaagctgatcagatgcttcaagttggatttgcggaagatgttgaaataatattgcagaagttgccagcgaagcgtcagagtatgatgttttctgcaacaatgccaagttggatcagatctctcaccaagaagtacctgaacaatcctttgacaattgatcttgttggagattcagatcagaaacttgcagatgggattactatgtattctatcgctgcagattcttatggaagagcatccatcattggtcctcttgtaaaggaacatggcaaaggaggaaaatgcattgtctttacccaaacaaaacgtgatgcagatcgccttgcatttggattggcaaaaagctataaatgtgaagctttacacggtgacatatctcaagctcagagagaaagaacacttgctggtttcagggatgggaatttcagtattcttgttgcaactgatgttgctgcccgtggacttgatgtacctaatgtcgatttagtaattcattatgagcttcctaataacacggagacgtttgttcaccgaacggggcgaactggtcgtgctggaaagaaaggaagcgcgattctcatccacggtcaagatcaaaccagggctgttaaaatgattgagaaagaagtcggaagcagattcaatgagctgcctagcattgctgtggaaagaggaagcgcaagcatgtttgaaggagtaggtgctagatctggtgggtcgttcggaggaggtcgatcaggcggtggtgggtatggtagttacggtagcagcagtggccgttcaggtggtggtagttatggaggttatggtggcagcagtggccgttcaggtggtggtggtggtagttatggaggttcagggggatcaagcagccgttactctggtggttcagaccgctcatctggtttcggaagctttggttcaggcggttcttcaggaggatttggttcagaccgttcttctcagtcaagtggaaggagcagctttggtgggtttggatcaaacgatggtaaaagatcttactga

SEQ ID NO: 65975 - protein, 610 aa, Arabidopsis thaliana
MISTVLRRSILGTSRRTLAASVTSINAALFHNLAPAAATVSDLANGATNVKSLPSNSSPFGVKVRDFHVKSVPSEFRSSIVSSAGFAAQEYAPSYENDGGIGDSESVGSSGGGDGLAIADLGISPEIVKALKGRGIEKLFPIQKAVLEPAMEGRDMIGRARTGTGKTLAFGIPIIDKIIKFNAKHGRGKNPQCLVLAPTRELARQVEKEFRESAPSLDTICLYGGTPIGQQMRELNYGIDVAVGTPGRIIDLMKRGALNLSEVQFVVLDEADQMLQVGFAEDVEIILQKLPAKRQSMMFSATMPSWIRSLTKKYLNNPLTIDLVGDSDQKLADGITMYSIAADSYGRASIIGPLVKEHGKGGKCIVFTQTKRDADRLAFGLAKSYKCEALHGDISQAQRERTLAGFRDGNFSILVATDVAARGLDVPNVDLVIHYELPNNTETFVHRTGRTGRAGKKGSAILIHGQDQTRAVKMIEKEVGSRFNELPSIAVERGSASMFEGVGARSGGSFGGGRSGGGGYGSYGSSSGRSGGGSYGGYGGSSGRSGGGGGSYGGSGGSSSRYSGGSDRSSGFGSFGSGGSSGGFGSDRSSQSSGRSSFGGFGSNDGKRSY

SEQ ID NO: 65976 - DNA, 1293 bp, Erwinia carotovora subsp
  CDS (1)..(1293): transl_table=11
atgagcaaaacacacttaactgaacagaagttttccgacttcgccctgcacccgcaggttatagaagctcttgaaagtaaagggtttcattactgcacgcctattcaggcgttagctctgccattaactttgtcagggcgtgatgttgcgggtcaggcgcaaaccggtaccggcaagacgctggcttttctcgcgtctactttccattatctgctttcacaccctgcaaacgcagagcgtcaaaccaatcaaccgcgtgccttaattatggcaccaacccgtgaactggctgtccagattcactctgatgcagaagcgctgtctcacctgactgggttaaaactgggtttagcctacggtggcgatggctacgacaaacagcttaaagtgctggaaaacggcgttgatattttggtcggcaccaccggccgcctgatcgactatgccaaacaaaaccacatcaatctgggcgcgattcaggtcgtcgtactggacgaagcggatcgcatgtacgatctcggcttcatcaaagatatccgctggctgttccgccgcatgccggcaacgtcacagcgtctgaatatgctcttttccgctacgctctcctaccgagtgcgtgaactcgcgtttgaacagatgaataacgcagagtacgtggaagtcgaaccggaacagaaaaccggccaccgcattacagaagaactgttttatccgtccaacgaagagaaaatgcgtctgctccagaccttgttggaagaagagtggccggatcgctgcattattttcgccaataccaagcatcgctgcgaagacgtctggggtcatctggctgccgatggccatcgcgttgggctgctgacgggcgatgtagcacagaaaaaacgcctgcgtattctggaagagtttacccagggtagtattgatattctggtagcaacggacgttgcagcacgcggtttacacattccttctgtaactcacgttttcaactacgatctgccggatgactgcgaagactacgttcaccgtattggtcgtactggccgtgcgggacaaagcggattttctatcagtctggcctgtgaagagtacgcgctgaatctcccagctatcgaaacctatatcggtcacggtatcccactcagcaaatacaacagcgacgcgctgatgaatgatttacctgcgccgaagcgtttaacgcgcccaccgcgttccaataatggcccgcgccgacacaatagtgcgccacgccgcagcggagcgccccgtaataaccgtaaacgagcggactaa

SEQ ID NO: 65977 - protein, 430 aa, Erwinia carotovora subsp
MSKTHLTEQKFSDFALHPQVIEALESKGFHYCTPIQALALPLTLSGRDVAGQAQTGTGKTLAFLASTFHYLLSHPANAERQTNQPRALIMAPTRELAVQIHSDAEALSHLTGLKLGLAYGGDGYDKQLKVLENGVDILVGTTGRLIDYAKQNHINLGAIQVVVLDEADRMYDLGFIKDIRWLFRRMPATSQRLNMLFSATLSYRVRELAFEQMNNAEYVEVEPEQKTGHRITEELFYPSNEEKMRLLQTLLEEEWPDRCIIFANTKHRCEDVWGHLAADGHRVGLLTGDVAQKKRLRILEEFTQGSIDILVATDVAARGLHIPSVTHVFNYDLPDDCEDYVHRIGRTGRAGQSGFSISLACEEYALNLPAIETYIGHGIPLSKYNSDALMNDLPAPKRLTRPPRSNNGPRRHNSAPRRSGAPRNNRKRAD

SEQ ID NO: 65978 - DNA, 1197 bp, Pseudomonas putida
  CDS (1)..(1197): transl_table=11
gtggtcgagccgcaggaaggcaaaacccgcttccacgacttcaagctgtccaacgagctgatgcacgccatccacgacctgggcttcccgtactgcacgccgatccaggcgcaggtcctgggttacaccctgcgtggccaggacgccatcggccgggcccagacgggcaccggcaagacggccgccttcctgatctcgatcatttcccagttgcagcagacgccaccgcctaaagagcgctacatgggcgagccgcgggcgctgatcatcgcccccacccgcgagctggtggtgcagatcgccaaggacgccgctgccctgaccaagtacaccggcctgaacgtgatgagcttcgtcggtggcatggacttcgacaagcagctcaaagccctggaagcgcgccactgcgatattctggtggctacgccgggccgcctgctggacttcaaccagcgtggtgaagtgcacctggacatggtcgaggtgatggtgcttgacgaagccgaccgtatgctcgacatgggcttcatcccccaggtccgccaaatcattcgtcagacaccgcctaaaagcgagcgccagaccctgctgttctccgccaccttcaccgacgatgtgatgaacctggccaagcagtggaccaccaacccggccatcgtcgagatcgagccggagaacgtggccagcgaaacggtggagcagcacgtgtatgcggtggccggcagcgacaagtacaaactgttgtacaacctggtgacccagaacaagtgggaacgggtgatggtgttcgccaaccgcaaggacgaagtgcggcgcatcgaggaaaagctggtacgcgacggtatcaatgcggcccagctgtcgggcgacgtgccgcagcacaaacgcatccgaaccctggagagcttccgcgaagggcgcatcaccgtgttggtcgccaccgacgtggccgggcgtgggatccatatcgatggcatcagccacgtgatcaacttcaccctgccggaagaccctgacgactacgtgcaccgcattggccgtaccggccgtgccggcaccagtggtgtatcgatcagctttgccggtgaggatgactcgtatcagctgccggcgatcgaagcgctgctggggcgcaagatcaagtgcgagatgccgccggatgaactgctcaagccggtgccgcgcaagcatcactga

SEQ ID NO: 65979 - protein, 398 aa, Pseudomonas putida
MVEPQEGKTRFHDFKLSNELMHAIHDLGFPYCTPIQAQVLGYTLRGQDAIGRAQTGTGKTAAFLISIISQLQQTPPPKERYMGEPRALIIAPTRELVVQIAKDAAALTKYTGLNVMSFVGGMDFDKQLKALEARHCDILVATPGRLLDFNQRGEVHLDMVEVMVLDEADRMLDMGFIPQVRQIIRQTPPKSERQTLLFSATFTDDVMNLAKQWTTNPAIVEIEPENVASETVEQHVYAVAGSDKYKLLYNLVTQNKWERVMVFANRKDEVRRIEEKLVRDGINAAQLSGDVPQHKRIRTLESFREGRITVLVATDVAGRGIHIDGISHVINFTLPEDPDDYVHRIGRTGRAGTSGVSISFAGEDDSYQLPAIEALLGRKIKCEMPPDELLKPVPRKHH

SEQ ID NO: 65980 - DNA, 1365 bp, Escherichia coli
  CDS (1)..(1365): transl_table=11
atgtctttcgattctttgggtttaagccctgatatcctgcgcgccgttgccgagcagggttaccgtgaacccacccctattcagcagcaggcgatccctgcggtgctggaaggccgcgacctgatggctagcgcccagaccggcaccggcaaaacagcgggctttacgctgccgctgttgcaacacctgatcactcgccagccgcacgccaaagggcgtcgtccggtacgtgcgctcattcttaccccgacccgtgaactggcggcgcagattggcgaaaacgtccgtgattacagcaaatacctgaacattcgttcgctggtggtgtttggtggtgtgagtattaacccgcagatgatgaaactgcgtggcggcgttgatgtgctggtggcaaccccgggacgtttgctggacctggaacatcagaatgcagtgaagctggatcaggttgaaatcctcgtcctcgatgaagctgaccgcatgctcgacatgggctttatccacgatatccgtcgcgtgttaacaaaactacctgcgaagcgccagaacctgttattctccgcgaccttctctgacgatattaaagccctggcggaaaaactgttgcacaacccgctggaaatcgaagtggcacgccgcaataccgcgtctgatcaggtgacccagcacgttcactttgtcgataagaaacgcaaacgcgaattgctgtcgcacatgattgggaaagggaactggcagcaggtgctggtgtttacccgtaccaaacacggcgctaaccatctggctgaacagctcaataaagatggcatccgtagtgcggcgatccacggcaataaatcgcaaggtgcgcgtactcgtgcgctggctgattttaaatcgggcgatattcgtgtactggtggcaactgacatcgctgcgcgcggcctggatattgaagagctgccgcacgtcgtcaactatgaactgccaaacgtacctgaagattatgtccaccgtatcgggcgtaccggtcgtgcggctgctaccggtgaagcgttgtcgctggtgtgtgttgatgaacacaaactgctgcgtgatatcgaaaaactgctgaaaaaagagatcccgcgcattgcgattccgggctatgagccggacccgtcaatcaaagccgaaccgatccagaacggtcgccagcaacgtggcggcggcggtcgtgggcaaggtggtggtcgcggtcaacagcaaccacgccgtggggaaggtggcgcaaaatctgcaagcgcgaaacctgcagaaaaaccgtctcgccgcctcggcgatgccaaaccggcaggcgaacaacaacgtcgccgccgtccgcgtaaacctgccgctgcgcagtaa

SEQ ID NO: 65981 - protein, 454 aa, Escherichia coli
MSFDSLGLSPDILRAVAEQGYREPTPIQQQAIPAVLEGRDLMASAQTGTGKTAGFTLPLLQHLITRQPHAKGRRPVRALILTPTRELAAQIGENVRDYSKYLNIRSLVVFGGVSINPQMMKLRGGVDVLVATPGRLLDLEHQNAVKLDQVEILVLDEADRMLDMGFIHDIRRVLTKLPAKRQNLLFSATFSDDIKALAEKLLHNPLEIEVARRNTASDQVTQHVHFVDKKRKRELLSHMIGKGNWQQVLVFTRTKHGANHLAEQLNKDGIRSAAIHGNKSQGARTRALADFKSGDIRVLVATDIAARGLDIEELPHVVNYELPNVPEDYVHRIGRTGRAAATGEALSLVCVDEHKLLRDIEKLLKKEIPRIAIPGYEPDPSIKAEPIQNGRQQRGGGGRGQGGGRGQQQPRRGEGGAKSASAKPAEKPSRRLGDAKPAGEQQRRRRPRKPAAAQ

SEQ ID NO: 65982 - DNA, 1760 bp, Pichia stipitis
  CDS (34)..(1710)
ccataaacacatagttcttcttcattctcagtgatggatatcttccgcatcctttcccgtggagcttcactcaagaaaagcaaagacgtcacaacagactatgcgctcccttcagctaagcagcagcagtatgaacagcataaggaagataccttacaacaccaagtagacaaagaaattgacttcttccacacgaaaaaacacaactcgagtaagagctttgactcaacagattcaaaacacacaaaggaagaaaagaaagaaaagaaagaagatgaagaagctccacctttagagatccaaactgtagaagactccataaagctcaggaaagccaaccattctaaagtcacaggtgaagacattccgctccctattggctcattccaagatatgattggacgattccgtctcgacagcaagctcttgtcgaatttgctcgaagcagaatttgtagaacctacagccatccaatgtgaatcgcttcccatctcattatctggcagagacttgatcgcatgtgcccctactggttccggtaaaacccttgcatttttaatcccacttatccagagcttacttgtcagctccaaggggcgtcccaaaaattatggtatcacaggattggtgatatctcctacaaatgaattggctattcagatctttcaggaattgcagattttgaccagaggaaagaaattgaatgtagccatcttgtcaaaacagttggctaacaagctcaacaatgatatcgtcaaggcatctaaatacgacatcattgtatctacaccattgagactcattgatatagtcaaaaatgagaaagttgatttgtccaaagtagagcaacttgttattgatgaagcagataagttgttcgaccaaggatttgtagaacaaactgatgatatcttatcccattgcacatacaccaaaataagaaagtcaatgttttcagccacaattccttctggagtagaagaaatggcccactccatcatgagagatcctatcagagtcatcattggacgtaaagaagctgccagtaacacaattgaccaaaagttggtattcaccggtagtgaagaagggaagttgctcgctatcagacaaatgattcaggagggagaatttaagccccccatcatcatcttcttgcaatcgatccacagagcaaaggcattgttccatgagttattgtatgataagttgaacgtagacgtgatccatgctgaaagaacaccaaagcaaagagaagaagtaattaaacggttcaagaatggagacatctgggtgttgattactactgatgtacttgccagaggtgtagatttcaagggagtgaatatggtcatcaactacgacgttccacagactgcacaagcttatgtgcatagaattggtagaacgggtagaggtggtaaagcaggtagggctgtgacatttttcaccaaggaagatgaccaggctgtcaagcccataatcaatgtcatgaagcaatcaggctgtgaagcaggtttcagtggatggatggagaatatgacaaagatgtctaagaacgaaaagaagaaagtgaagcacaaggaaattgacagaaaggacatcagtacagttcccaaattggtgaaacataagagaaaacagagagaacagatgatagaggcttcgaagaagagaaaacaagaagagacaagaaatgcattacaatagtaccatagacaatttacatagtatacgattaataatacaaaagaatttct

SEQ ID NO: 65983 - protein, 558 aa, Pichia stipitis
MDIFRILSRGASLKKSKDVTTDYALPSAKQQQYEQHKEDTLQHQVDKEIDFFHTKKHNSSKSFDSTDSKHTKEEKKEKKEDEEAPPLEIQTVEDSIKLRKANHSKVTGEDIPLPIGSFQDMIGRFRLDSKLLSNLLEAEFVEPTAIQCESLPISLSGRDLIACAPTGSGKTLAFLIPLIQSLLVSSKGRPKNYGITGLVISPTNELAIQIFQELQILTRGKKLNVAILSKQLANKLNNDIVKASKYDIIVSTPLRLIDIVKNEKVDLSKVEQLVIDEADKLFDQGFVEQTDDILSHCTYTKIRKSMFSATIPSGVEEMAHSIMRDPIRVIIGRKEAASNTIDQKLVFTGSEEGKLLAIRQMIQEGEFKPPIIIFLQSIHRAKALFHELLYDKLNVDVIHAERTPKQREEVIKRFKNGDIWVLITTDVLARGVDFKGVNMVINYDVPQTAQAYVHRIGRTGRGGKAGRAVTFFTKEDDQAVKPIINVMKQSGCEAGFSGWMENMTKMSKNEKKKVKHKEIDRKDISTVPKLVKHKRKQREQMIEASKKRKQEETRNALQ

SEQ ID NO: 65984 - DNA, 1446 bp, Schizosaccharomyces pombe
  CDS (1)..(1446)
atggatgcgttgaaacttttgacaactaatgtcaaatttaagaataaagtacctcaaccttctataaaagaaaaagaagcaaaaaaattacaaggtattactaagggaaaagctaaagttactggtaataatcctgttgatccaattgaagagtttccggaaggaatactttgtgaaaacttaaaaaaacaaaacataacagaatgtaccacaattcaaagatatgccattccaacgataggttctaaacgagacctattggcatgtgcaccaactggttctggaaaaactattgcatatctattcccaattttgcaaaaacttcagttacatgttccgggtggatatagagcgattatcgtagcgccgactagagaactgtgcgagcaaatatatagacaggcagaaaagctgtcttttggaacttcattgaagataattgaattaagtaaatctaatgaaaaaattcaagaaaaagcgcccaagctccgggaaaagtatgacatgtgcataggcaccccgatgagattagtacaagcaatacaaaccggattgtcctttgaaaaagtagaattctttgttatggatgaagctgatagactttttgagcctggctttattgaacaaactgatcatattctaagtgcatgcaccagctctaatatttgtaaaagccttttttccgctactattccatcacgcgtcgaagagttagctaaagtcgtaacggttgatccgattcgaatcatcgttggtttgaaagatgcagccacggatagcatcgatcagagactcttgtttgttggttcggatacttccaaaattgtgattttgcgtcaaatgatttcaaatggagagttaaagcctcgagtcgtaatatttgttcaagatatagaaagagcgaaagcattgtacacagaactcttatttgatgaaattcacgttggtgtcattcatggagaattaccacaagccaagcgcgaagaagcacttgcgaaatttcggaagggtgaaatttgggttttaatagcaacagatcttcttgctcgtggtatcgattttcatggtgtaaagatggtcatcaactttgactttcctcaaagtgttcatagttatattcatcgtatcggtcgaactgggcgtgcaggaaatacaggacaggccgttactttttttacaaaggaagatggtgaatatatcaagcttattgctggtgtaatgcgttcatcaggttgcgaggttccaaactgggttatggcacttcctaaacctagtaaagaaatgaaaaagaagttgaagaagagtcctcctaaaagaaagaggattactactagagcttcttacgacagacaaaaggaacagcgtaagaaggagtatattaagaaggtaaaaaaagaagcctctatcaaaaagcataatgaagctactggagacagtggacaatag

SEQ ID NO: 65985 - protein, 481 aa, Schizosaccharomyces pombe
MDALKLLTTNVKFKNKVPQPSIKEKEAKKLQGITKGKAKVTGNNPVDPIEEFPEGILCENLKKQNITECTTIQRYAIPTIGSKRDLLACAPTGSGKTIAYLFPILQKLQLHVPGGYRAIIVAPTRELCEQIYRQAEKLSFGTSLKIIELSKSNEKIQEKAPKLREKYDMCIGTPMRLVQAIQTGLSFEKVEFFVMDEADRLFEPGFIEQTDHILSACTSSNICKSLFSATIPSRVEELAKVVTVDPIRIIVGLKDAATDSIDQRLLFVGSDTSKIVILRQMISNGELKPRVVIFVQDIERAKALYTELLFDEIHVGVIHGELPQAKREEALAKFRKGEIWVLIATDLLARGIDFHGVKMVINFDFPQSVHSYIHRIGRTGRAGNTGQAVTFFTKEDGEYIKLIAGVMRSSGCEVPNWVMALPKPSKEMKKKLKKSPPKRKRITTRASYDRQKEQRKKEYIKKVKKEASIKKHNEATGDSGQ

SEQ ID NO: 65986 - DNA, 1644 bp, Yarrowia lipolytica
  CDS (1)..(1644)
atggatatcttcaaagtactatctcgaggagccacgatccagcgaaacggtaaacacaggaaggacctgactctgctcaaccacgctgctcccaaagacacccaggacaatgtcgacattgaagttgcccgagaaaccgactttttcaagaccaagacagacacttactccaagaagcgagtagctgaggaggctgagctggacaatgaagaggaggaagaggctcccccgcccattatcagtactcccgaggaggctgtggttttccgaaacaagcacaagatcaacatcaccggagaagactcccctctgcccattgggtcgtttgaagacctcatcactcgattcaacttgcatccctatcttctggccaacctcaagaagaacaagtacacagaccctaccccgatccagtgcgagagtatccctacaatgctgaacggccgagatctgattgcctgtgctccaactggttccggtaagactatggcctacagcatccccatggtggagatgctgggtaagaagaagggctccaaggacgctaagaagggaatcaaggcactggtggttgcccccaccaaggagctggcgtctcagatcttcaacgctgtgttctcgctctgcgtgggtgttggaaaaaagaaggacgagctgaaaccctgcttgctggacaagagcacggccgacaagctgcgaaacggaaaagtcagctcccagaaatacgacatttgcattaccacccccctgagactggtctccgccctcaacgacggcagcctggaccttggatccctggatctggtcatcttcgatgaggccgacaagctgtttgagaagggctttgccacccaggtcgatgacattctggcagcatgcccctcgggtattcagaagactctgttctccgcaaccattcctgcctctgtcgagcagctggcaaacagtatcatgagcaccgaccctctacgtatcattatcggtaacaagcaggctgctgcccagaccgttgagcagaagctggtgtatgctggaaacgaggaaggtaagcttgtggctatccgacaaatggcccgagagggtcagcttgtggcccctgtcatcatcttcctgcagtccatcgaccgagccaaggcactgttcaaggagctggttttcgacggaatcaacgtcgaccagatccatggagacatgactgcggccaagcgagcttccgtcatcgaccgtttccgaaacggagaagtctgggtgctaatctgtaccgacgttctggcccgaggtatcgatttccgaggcatcaacctggtcatcaactacgatgtaccccagtctgcacagtcttacgtgcatcgaatcggacgaaccggtcgagctggccgactcggcaaggccgtcaccttcttcaccaaggaggacgctaccaatgtcaaggtggtagtcaatgtcatgaagcagtctggacaggaggtacccgactggctcaacaacctcgctcccctgactcagaaggagcgagacaacatcaaaaacagacccatcaaacgaaagaagatctctactcaacatgctctggctaacaacaagaagaagcgggccaaacagcagatgaagggtctcaagaagatgaagaaggacgacgaataa

SEQ ID NO: 65987 - protein, 547 aa, Yarrowia lipolytica
MDIFKVLSRGATIQRNGKHRKDLTLLNHAAPKDTQDNVDIEVARETDFFKTKTDTYSKKRVAEEAELDNEEEEEAPPPIISTPEEAVVFRNKHKINITGEDSPLPIGSFEDLITRFNLHPYLLANLKKNKYTDPTPIQCESIPTMLNGRDLIACAPTGSGKTMAYSIPMVEMLGKKKGSKDAKKGIKALVVAPTKELASQIFNAVFSLCVGVGKKKDELKPCLLDKSTADKLRNGKVSSQKYDICITTPLRLVSALNDGSLDLGSLDLVIFDEADKLFEKGFATQVDDILAACPSGIQKTLFSATIPASVEQLANSIMSTDPLRIIIGNKQAAAQTVEQKLVYAGNEEGKLVAIRQMAREGQLVAPVIIFLQSIDRAKALFKELVFDGINVDQIHGDMTAAKRASVIDRFRNGEVWVLICTDVLARGIDFRGINLVINYDVPQSAQSYVHRIGRTGRAGRLGKAVTFFTKEDATNVKVVVNVMKQSGQEVPDWLNNLAPLTQKERDNIKNRPIKRKKISTQHALANNKKKRAKQQMKGLKKMKKDDE

SEQ ID NO: 65988 - DNA, 1695 bp, Saccharomyces cerevisiae
  CDS (1)..(1695)
atggatatttttagagtattaactagaggagcttccgtgaagaaagagtcaggcccaaaggctaaggcagcagattacagcgttataaatggaaatgatgagaatcataaggaagataataatgaaagccagatcgtgaaagaacttgatttctttcgaaacaagagaatcattagcaaggtagaggatgatagagagaagacaaccgaaaacgattctccaaacaaagaggagaagagcggcaatgatgatggtctgataaaaccagtgattaccaataccgttgaggcatccgcgttgagaaaatcatataagggaaacgtgtcgggtatagatataccacttccaataggttcgtttgaagatttaatttcaaggttttcattcgataagcgtttactgaataacttgattgaaaacgggtttactgagcctaccccaattcaatgtgaatgtattcctgttgctttgaataatagagacgttttggcatgtggtcccacagggtctggtaagacgttagcattcttaattccgctggttcagcagattattgatgacaagcaaactgcagggttgaaagggttaatcatttcgcctacaaaggaattagcgaaccaaatttttattgaatgttttaagctatcttacaagatatttttggagaaaaaaaggcctctgcaagttgcactcttatctaaatctttaggcgctaaattgaaaaacaaggtagttagtgataagaaatatgatataatcatttctaccccattaagactaatcgatgttgtgaaaaacgaagctctcgatctctccaaagttaagcatttgatatttgatgaagctgataaattgtttgacaaaacattcgttgaacagagtgacgatattttgagcgcctgtagagagccatcgttgcgtaaagcgatgttttctgcgaccattccatccaatgtagaagagattgcacaaagtataatgatggatcctgttagagttattattggccacaaggaagcagcaaatacaaatattgaacaaaaattaatattttgtggtaatgaagagggtaaactaattgctattagacaactcgttcaagagggtgagttcaagccaccgatcataatatttttagagtctattacaagagcaaaagcgttatatcatgaattgatgtacgataggattaacgtagatgtgattcatgcagaaagaacagccttacaaagagacaggattattgaacgatttaaaactggtgaattatggtgtttgatctgtaccgacgttttagctcgtggtattgacttcaaaggtgtcaatctggtcatcaattatgacgttccaggatcgtctcaggcttatgttcacagaattggtagaacaggtagaggtgggcggtcaggtaaagctatcacattctatactaaacaagactcagtagctattaaaccaataataaatgtcatgaaacaaagtggttgtgaagtatctgagtggatggataaaatggctaaaatgaccagaaaggagaaagaaagtataaaaaacggtaaagcgcataaagaaagaaagcagattactactgtgcctaagatggataaggccaaaagaagacgtcaacaagaaatgattgcagcatccaaaagaagaaaaaatgaagaactttcaaaaaaacatttctcgaaataa

SEQ ID NO: 65989 - protein, 564 aa, Saccharomyces cerevisiae
MDIFRVLTRGASVKKESGPKAKAADYSVINGNDENHKEDNNESQIVKELDFFRNKRIISKVEDDREKTTENDSPNKEEKSGNDDGLIKPVITNTVEASALRKSYKGNVSGIDIPLPIGSFEDLISRFSFDKRLLNNLIENGFTEPTPIQCECIPVALNNRDVLACGPTGSGKTLAFLIPLVQQIIDDKQTAGLKGLIISPTKELANQIFIECFKLSYKIFLEKKRPLQVALLSKSLGAKLKNKVVSDKKYDIIISTPLRLIDVVKNEALDLSKVKHLIFDEADKLFDKTFVEQSDDILSACREPSLRKAMFSATIPSNVEEIAQSIMMDPVRVIIGHKEAANTNIEQKLIFCGNEEGKLIAIRQLVQEGEFKPPIIIFLESITRAKALYHELMYDRINVDVIHAERTALQRDRIIERFKTGELWCLICTDVLARGIDFKGVNLVINYDVPGSSQAYVHRIGRTGRGGRSGKAITFYTKQDSVAIKPIINVMKQSGCEVSEWMDKMAKMTRKEKESIKNGKAHKERKQITTVPKMDKAKRRRQQEMIAASKRRKNEELSKKHFSK

SEQ ID NO: 65990 - DNA, 1404 bp, Aspergillus niger
  CDS (1)..(1404)
atgcctggagtcaagaagcgcaaggtcgcccgtgaggcacctgcgcctgcgcccgcacaagagagcgatgtcgaatcttccaccccagagcaaacgcaagaaccagaagcacaagagcaagaacaagaagagggacagtccaagacattcaaggaactaggaatcatcgaacagctatgcgaggcttgcgagaccatgggctacaaagcacctacacctattcagcgggagtcgattcctctggctcttaaaggccgtgatttgatcggtcttgcagagaccggaagtggaaagacggcagcgtttgctcttcccatcctccaagccttgatggaaaagccccaacccttcttcggcctcgtcctcgccccaacccgagaactcgcctaccagatctccaaatctttcgagtccctaggcgccagcatgggtgtgcgaagctgcgtcatcgtcggtggcatggacatggtctctcagtcaatttccctcggcaaaaagccccatatcatcgtggccacccctggtcgtcttctggaccacctcgagaacaccaagggcttctccctccgcaacctgaagtacctggtgatggacgaagcggatcgacttcttgacatggacttcggacccctcctcgacaagatcctgaaagtcctgccccgtgagcgccgcacattcctcttctctgcgacgatgagctcaaaggtcgaatccctccaacgtgcctccctctccaatccgctccgtgtctctgtctccacaagcaaataccagaccgtctcgactctcctccaatcttacctcttcattccccagaagcacaaggacctgtaccttgtctacctgttgaacgaattcgccggccagagtactatcatcttcacgaggacggtgaacgagacgcagagacttgcgttcttgcttcgtgcgcttggcttcggcgctatcccgctgcatggacagctttcacagtctgctcgtctcggtgcgctgggcaagttccgtgctcgtagtcggaatattcttgtcgcgacggatgtggctgctcgtggtttggatattccgtccgttgatgttgtgcttaactttgatttgccgggtgattctcccagctatgtccaccgtgtcggacgtactgcccgtgctggaaagagtggtcttgctatcagctttgtcgcccagtacgatgttgaggtttggctgaggatcgaaggtgctttgggcaagaagctcaaggaatacgactgccctaaggatgaggtcatggtgcttggtgagaatgtcgcggaggcgcaacggcaggcgattatggatatgaaggattacaatgagaagaagggaagcaggggcaagaagttcggtgggaagcgttcccgggatgagatggatcaagaggagggttag

SEQ ID NO: 65991 - protein, 467 aa, Aspergillus niger
MPGVKKRKVAREAPAPAPAQESDVESSTPEQTQEPEAQEQEQEEGQSKTFKELGIIEQLCEACETMGYKAPTPIQRESIPLALKGRDLIGLAETGSGKTAAFALPILQALMEKPQPFFGLVLAPTRELAYQISKSFESLGASMGVRSCVIVGGMDMVSQSISLGKKPHIIVATPGRLLDHLENTKGFSLRNLKYLVMDEADRLLDMDFGPLLDKILKVLPRERRTFLFSATMSSKVESLQRASLSNPLRVSVSTSKYQTVSTLLQSYLFIPQKHKDLYLVYLLNEFAGQSTIIFTRTVNETQRLAFLLRALGFGAIPLHGQLSQSARLGALGKFRARSRNILVATDVAARGLDIPSVDVVLNFDLPGDSPSYVHRVGRTARAGKSGLAISFVAQYDVEVWLRIEGALGKKLKEYDCPKDEVMVLGENVAEAQRQAIMDMKDYNEKKGSRGKKFGGKRSRDEMDQEEG

SEQ ID NO: 65992 - DNA, 1419 bp, Aspergillus oryzae
  CDS (1)..(1419)
atgccggcgattaagaagcgcaagatcgcccgtgaggcacctcaacaagaagaccacagcgatagcgaggcccacagctctgcctctgaggatgccgcccccaatactactgagcaagaacaagaaccatctgaagcgcctaagcaggctccaaagtcttttaaggaactaggcctcattgagcaattatgcgaggcttgcgactctatgggatacaaggctcccaccgcgattcaagcggaagccattcctctcgctcttcaaggccgcgatttgatcggtttggctgaaaccggtagcggtaaaaccgcagcctttgcactgcccattctccaagccctgatggacaagccttcttcctttttcggtctcgtcctcgcgcccacccgtgaactggcgtaccagatctcccaagccttcgagggtctaggaagtacaatctcagtaagaagcacagttctggttggaggcatggacatggtatctcaatcgatcgcactcggaaagaagcctcacattattgtagccacccccggacgtctactagaccacctcgaaaacacgaaaggcttctccctccgcaacctcaaatacctcgtcatggacgaagccgaccgtctcctagacatggacttcggccccatcctcgacaagatcctgaaagtgctcccccgcgagcgccgcacctacctcttctccgccaccatgagctcaaaggtcgagtctctgcagcgtgcatcgcttcaaaacccgctccgtgtcgctgtctcctcatccaagttccaaaccgtctccaccctccaacaatcctacatcttcatcccccacaaacacaaagacctgtacctggtctatctgctcaacgagtttgtcggccaatcgtgcatcatcttctgtcgcaccgtgcatgagacccagcgtctcagcttctttttgagattgcttggctttggcgccatcccactgcatggtcagctttcgcagtctgctcgtttgggtgcactcgggaagttccgttcgaggagtagagatatccttgttgcgacggatgtcgctgctcgtggtcttgatattccctctgttgatgtggttttgaactttgatttgcctggtgattcgaaaaccttcatccacagaatcggtcgtacagcccgtgctggtaagtcgggtgtagctatcagctttgctacacaatatgatgtcgaggcatggcttcgcatagagggcgcgttaggaaagaaactccctgaataccccgctgaaaaggacgaggtgatggtcctggcagagcgtgtatccgaagcgcaacgcagtgctattctggaaatgaagaactacgacgagaagaagggaagtaggggcaagaagtttgccaaaggaaagcgctctcgagaggatatggatcaggaagagggctag

SEQ ID NO: 65993 - protein, 472 aa, Aspergillus oryzae
MPAIKKRKIAREAPQQEDHSDSEAHSSASEDAAPNTTEQEQEPSEAPKQAPKSFKELGLIEQLCEACDSMGYKAPTAIQAEAIPLALQGRDLIGLAETGSGKTAAFALPILQALMDKPSSFFGLVLAPTRELAYQISQAFEGLGSTISVRSTVLVGGMDMVSQSIALGKKPHIIVATPGRLLDHLENTKGFSLRNLKYLVMDEADRLLDMDFGPILDKILKVLPRERRTYLFSATMSSKVESLQRASLQNPLRVAVSSSKFQTVSTLQQSYIFIPHKHKDLYLVYLLNEFVGQSCIIFCRTVHETQRLSFFLRLLGFGAIPLHGQLSQSARLGALGKFRSRSRDILVATDVAARGLDIPSVDVVLNFDLPGDSKTFIHRIGRTARAGKSGVAISFATQYDVEAWLRIEGALGKKLPEYPAEKDEVMVLAERVSEAQRSAILEMKNYDEKKGSRGKKFAKGKRSREDMDQEEG

SEQ ID NO: 65994 - DNA, 1200 bp, Candida albicans
  CDS (1)..(1200): transl_table=12
atgaaattcactaaaccaacaccaattcaatcagaagccattcctcatgcattagaaggtaaagatattattggattagcacaaactggttcaggtaaaacagcagcatttgctatccctattttacaatcattatggcatgctcaacaaccttattttgcattagttttggccccaactagagaattagcttttcaaattaaagatacttttgatgccttgggaagttcaatgggattacgttcaagttgtatagttggtggtatggatatgatggatcaagcaagagatttaatgagaaaacctcatgttatagtggctacaccaggaagaattatggatcatttagaacataccaaaggattttctttaaaaaatttgaaatatttagttatggatgaagctgatagattattagatatggattttggtcccgcattagataaaattttaaaagtaataccaattaaacgtacaacttatttattttctgctactatgactaataaaattgaaaaattacaacgagcttcattacataatccagtaagagttgctgtttcatcaaaatatcaaactgccgataatttagttcaatcaatgatgctagtgaatgatggttataaaaacaccattttaattcatttattaaatgaattcatggggaaatcaatcattgtattcacaagaacagtagctcatgctcaaagaacagcattattggcaagaattttgggatttaatgccgttccattacatggtcaattatcacaatctcaaagattaggctcactaaataaatttaaatctaatcaagcaaatattttggtagctactgatgttgctgcaagaggtttagatattccttctgttgatgtagtaataaattatgatatccctactgattcaaaagcttatattcatcgtgttggtagaactgctcgtgctggtagatcggggaagtcgatttctttaatcactcaatatgatttggaaatgtatttacgtattgaaagtgttttaggtaaaaaattgcctaaagaggataaaccaccaaaagaagtattggatgcattacatgttcatgttgataaggcaacagctgaagcaattagacaaactaaagaaattcatgataaaagaaatggtggtggtggtagaagaagaaatagagatgatgccgatagagaagaaagataa

SEQ ID NO: 65995 - protein, 399 aa, Candida albicans
MKFTKPTPIQSEAIPHALEGKDIIGLAQTGSGKTAAFAIPILQSLWHAQQPYFALVLAPTRELAFQIKDTFDALGSSMGLRSSCIVGGMDMMDQARDLMRKPHVIVATPGRIMDHLEHTKGFSLKNLKYLVMDEADRLLDMDFGPALDKILKVIPIKRTTYLFSATMTNKIEKLQRASLHNPVRVAVSSKYQTADNLVQSMMLVNDGYKNTILIHLLNEFMGKSIIVFTRTVAHAQRTALLARILGFNAVPLHGQLSQSQRLGSLNKFKSNQANILVATDVAARGLDIPSVDVVINYDIPTDSKAYIHRVGRTARAGRSGKSISLITQYDLEMYLRIESVLGKKLPKEDKPPKEVLDALHVHVDKATAEAIRQTKEIHDKRNGGGGRRRNRDDADREER

SEQ ID NO: 65996 - DNA, 1455 bp, Cryptococcus neoformans
  CDS (1)..(1455)
atgcccagcccgtctccggaggcatcctcctcaatgtctcaacctggacctccatcccgctccccttctcccgcgtcctccaaccccgacgctcctgaagcatcgcacaacaagacgttcgcagacctcggtatcagtccggagctatgccgagcatgtgcttcgatgggctttaagaaaccttcagatattcaggctgaagcaattcctcatgctttagaaggcaaggatatcattggtcttgctcagaccggttccggtaaaacggcagcatttagtttgccgattctgcagacattatgggagaatcctcaaccatttttcgctcttgtgttggcgcccactcgtgaactggcgtatcaaatctctcaacaagtaacctctcttggatctggcatcggcgttcgcacggctgtcttagtcggcggtatggatatgatgtctcaatctatcgccctctctaagcgacctcacattattgtggccacccctggtcgattaatggaccatttggaaaacaccaagggcttctctcttaaatccttaaaatatctggtaatggacgaagccgatcgtcttctcgatctcgatttcggacctatcatcgacaaaatccttaaagttatcccaaaggagcgtaacacataccttttctctgctactatgacgaccaaagttgccaagcttcaacgtgcttctttgaataagcctgtccgcgtcgaagtctcttctaagtactcgactgtctctaccctcctacaacactatctcctccttcctcttaagaacaaggacgcttatcttctttaccttgccaacgagctttcttcatcttccatgatgatttttacccgtaccgtcgccgactctcagcgattatccattatccttcgtcgtctcggtttcccagccatcccattgcatggccaaatgacccaaagcctccgactggcaagtttgaacaagtttaaatccggtggaagaagcattttggtggccaccgacgttgcttctcgtggtcttgacattcctctcgtcgatctcgtcatcaactacgacatgcctacaaattctaaagactacgtccaccgtgtcggtcgtactgcccgtgcaggtcgttccggtaaatccatcactctcgtcacgcaatacgacgttgagattcttcaacgtatcgaatcccatattggcaagaaaatgacttcttttgatgtcgacaaggaggcagttgcactcctgaccgacactgttgcgaaagcaaacagggaagcggcgttggagatgagggagagtggtactggtggtggaggtggcaagcgaggaagggataaggggaagcgaaagacctttggcgatggagatgacagggatagggacgatgatgttgtggaagctggtgtgccgagaaagaagaacaagttcacaccggggggcaaaaaaaaggcaagaaagtaa

SEQ ID NO: 65997 - protein, 484 aa, Cryptococcus neoformans
MPSPSPEASSSMSQPGPPSRSPSPASSNPDAPEASHNKTFADLGISPELCRACASMGFKKPSDIQAEAIPHALEGKDIIGLAQTGSGKTAAFSLPILQTLWENPQPFFALVLAPTRELAYQISQQVTSLGSGIGVRTAVLVGGMDMMSQSIALSKRPHIIVATPGRLMDHLENTKGFSLKSLKYLVMDEADRLLDLDFGPIIDKILKVIPKERNTYLFSATMTTKVAKLQRASLNKPVRVEVSSKYSTVSTLLQHYLLLPLKNKDAYLLYLANELSSSSMMIFTRTVADSQRLSIILRRLGFPAIPLHGQMTQSLRLASLNKFKSGGRSILVATDVASRGLDIPLVDLVINYDMPTNSKDYVHRVGRTARAGRSGKSITLVTQYDVEILQRIESHIGKKMTSFDVDKEAVALLTDTVAKANREAALEMRESGTGGGGGKRGRDKGKRKTFGDGDDRDRDDDVVEAGVPRKKNKFTPGGKKKARK

SEQ ID NO: 65998 - DNA, 1203 bp, Encephalitozoon cuniculi
  CDS (1)..(1203)
atggaatttggtgatctaagaattgatgagtccttgataaagacatgccaggaaaaggggattacacggcctactgaggtccaaagacaggtgattccagcagtgcttggaggaggtgatgttatagcggtttcgcagactgggtcaggaaaaacccttgcgtttgtccttccgatagtttcccatctgttgcagaaaaacagatcattctattgcctagtcgttgcacccacaagagagctatcctcacaaatagctgagtgctttaacatgttccaggccacggggctgagggtctgtctgctggtcggaggagccaacttcaatgttcaggccaaccagctttctaagcgtccccacgtggttgttggaacgcccggaagaatagcggaacatgtcttgaaaacaaaatcgttcagaacagaaagagttcggaagtttgttctcgatgaagcggacaggttttttgagcaagactttgtagaagatctggagactattattccgagtctgagggagaaaaggcagactcttctctttacggcaacgatgtccgacgaaatatctaagctgtccagttccatcttaaaaagaccgaaaaccatccgcacggcagagaagtatgagacggttcctgccctgaaagagtactacctctttgtggccatgaaatggaagaactctgcattggttgaattgctggaaatgagccaaggaatgtctgttattgtgtttgtatcgatgtgtgtgactgccagagtaatgtccttagcattggccagacttgggttctgctcggaggcgctacatggggagctgagccaggaaaaaagagaagaggccatgagaagttttaaggaaagcaggtttaatgttcttgtttgcactgaccttggaagtagaggtcttgatataagccatgtagatctggtgattaattttgatgtcccgaagagcggaaaggattatatccatcgggtcgggaggactgcaagggctggaagatctggaactgctatcacgcttgtaacccagtacgatgttgaacagatccaaaagatagaatttacactagaaaaaaagctggaggaattcaagatgatgaagaagaacttcgggacaatttgtgcaagaatcgaagaagccatccaagaagctcaagagactcttaaggaggagagaaaaagaaacagaaggccatga

SEQ ID NO: 65999 - protein, 400 aa, Encephalitozoon cuniculi
MEFGDLRIDESLIKTCQEKGITRPTEVQRQVIPAVLGGGDVIAVSQTGSGKTLAFVLPIVSHLLQKNRSFYCLVVAPTRELSSQIAECFNMFQATGLRVCLLVGGANFNVQANQLSKRPHVVVGTPGRIAEHVLKTKSFRTERVRKFVLDEADRFFEQDFVEDLETIIPSLREKRQTLLFTATMSDEISKLSSSILKRPKTIRTAEKYETVPALKEYYLFVAMKWKNSALVELLEMSQGMSVIVFVSMCVTARVMSLALARLGFCSEALHGELSQEKREEAMRSFKESRFNVLVCTDLGSRGLDISHVDLVINFDVPKSGKDYIHRVGRTARAGRSGTAITLVTQYDVEQIQKIEFTLEKKLEEFKMMKKNFGTICARIEEAIQEAQETLKEERKRNRRP

SEQ ID NO: 66000 - DNA, 1464 bp, Kluyveromyces lactis
  CDS (1)..(1464)
atggctaaaatcgaaaagaagcaagcagttaaaaacaatcaggtcctttcattagctgagaagatcaagagaaaggcattggagaagcagcagcaagcacatgctaacgaaccttccccatccgacgaagattcagcacaaagtaacagtaaagattctaattccaatgaacaaccagaagaatcagaagaaatcttcgaatcgttcacagagctagatcttgtgcctgagcttattgaagcttgtaaaaaccttaactacaacaagccaacgccaatccaatcaaaggctattcctcccgctttgaaaggtagtgatatcattgggttagcccaaacaggttccggtaaaacagcggcatttgcaattcctatcttgaaccaactatggcacgatcaacaaccttattatgcgtgtattttggctcctactagagaattagcgcaacagattaaggagacgtttgattctttaggatctcttatgggtgttagatcaacttgtattgttggtggtatgagtatgatggaccaagctcgtgatttaatgcggaagccacacatcataattgccacacctggtagattaatggaccatctggaaaatactaaaggtttcaatttacgtaaattgaagtaccttgttatggatgaagctgatagattattagacatggaattcggacctgtgctagaccgtatcttgaatatcattcctacacaaggtagaactacatatttgttctctgcaacaatgacttcgaagattgataaacttcaaagagcatcacttacgaatccagttaaatgtgcagtatccaacaaataccaaacagtggacactttagtccaaactttgatggtggtccctggagggttgaagaacacttttttgatatatcttttgaatgaatttattgggaagtcaaccatcgtgtttactagaactaaggcaaacgctgagagaatatctaacctctgcaatctattggaatttagtgcgacggcattacatggggacttgaatcaaaatcagagaacaggagcattagatttattcaaagctggaaaaaggtcgattctagtagcaacagatgttgctgcaagaggtttagatattccgtctgtggatatcgtcataaattacgacatcccggttgactctaaatcttatatacatcgtgttggtagaactgcgagagctggacgttctggtaaatccatatctttggtctcccaatatgatctagagctaatcttaagaattgaagatgtgttgggtaaaaagttgccgaaggagaatgttgacaaggatgcgattcttgcactcagagattctgttgataaagcaaacggtgaagttgtgatggaattgaatagaagaaacaaagagaaacaagccagaggtaagggaagacgaggcagaatggcaacaagagacaatatggatagagaagaaagatag

SEQ ID NO: 66001 - protein, 487 aa, Kluyveromyces lactis
MAKIEKKQAVKNNQVLSLAEKIKRKALEKQQQAHANEPSPSDEDSAQSNSKDSNSNEQPEESEEIFESFTELDLVPELIEACKNLNYNKPTPIQSKAIPPALKGSDIIGLAQTGSGKTAAFAIPILNQLWHDQQPYYACILAPTRELAQQIKETFDSLGSLMGVRSTCIVGGMSMMDQARDLMRKPHIIIATPGRLMDHLENTKGFNLRKLKYLVMDEADRLLDMEFGPVLDRILNIIPTQGRTTYLFSATMTSKIDKLQRASLTNPVKCAVSNKYQTVDTLVQTLMVVPGGLKNTFLIYLLNEFIGKSTIVFTRTKANAERISNLCNLLEFSATALHGDLNQNQRTGALDLFKAGKRSILVATDVAARGLDIPSVDIVINYDIPVDSKSYIHRVGRTARAGRSGKSISLVSQYDLELILRIEDVLGKKLPKENVDKDAILALRDSVDKANGEVVMELNRRNKEKQARGKGRRGRMATRDNMDREER

SEQ ID NO: 66002 - DNA, 1398 bp, Schizosaccharomyces pombe
  CDS (1)..(1398)
atggcaccttctgagaaaaaacttactgaggataaaaaaaattcctcattgaataaaaagattgaaacatctaattcaagctctgaaaaatcttcggaaaataataatggtgactcacaaaacaacgaagcccctaaaacttttaaggaattaggagtaattgacgaattatgcgaagcttgtgaaaaactgggatttaaaactccaactccgattcaacaagaagccattccagttgtattgaataaacgagatgttataggtctagctcaaactggtagtggtaaaactgcagcatttgcgctgcctgtcattcaagaattgtggaacaatccgagcccattttttgcagtcgtgcttgctccaactcgagaacttgcctatcaaatatctgaacaattcgaggctataggaggtagtatcggcgttcgcagtgttgtaattgttggtggtatggatatggtaactcaagcagtcgctttatcaaaaaagcctcatgtcctagtttgtacacccggacgtctgatggatcatttggagaacacgaaaggttttagtttaaagaatttgaaatatttaatcatggatgaagccgatcgtcttcttgatatggattttggtccaattattgataaaattcttaaaattattcctcatgaaagacgtactttgttattttctgctactatgactagcaaggttgaaaagcttcagcgtgcatcccttcaccaacccgtgcgtgttgctgtatcttccaagtttagtaccgtcgataccctaatacaacggtatttgttttttccatttaaacacaaggacacgtatctcgtttacttggtaaatgaacttgccggcaattcaattatcatattcgctcgtacagtaaacgatactcaacggttggccatattattacgtaccttaggattttctgctattcctttacatggacagttgtctcaaagtaatcgtcttggggctttaaataaatttaagtcaggtgcgagatctactcttgttgcaactgatgtcgctgccagaggtctagatatacctcttgttgatgtagtaattaattacgacattcctaccgactcaaaggcatatattcatagagttggtcgtaccgctcgagcaggtcgggcaggtaaatctattgcattggttactcagtatgatttagaaccttttcttcgaattgaagctacaattggcaaaaaaatgcaggaatatgaaattgacaaggagggtgtatttcttttatctgaacgtgttggagaagctcaacgtgaagctattattcaaatgaaggagattcacgataggagaaaatcaaagggaaaattgcacacgaagcgcaaacgtgatgatcttgatcgtgaagaacaaatctattaa

SEQ ID NO: 66003 - protein, 465 aa, Schizosaccharomyces pombe
MAPSEKKLTEDKKNSSLNKKIETSNSSSEKSSENNNGDSQNNEAPKTFKELGVIDELCEACEKLGFKTPTPIQQEAIPVVLNKRDVIGLAQTGSGKTAAFALPVIQELWNNPSPFFAVVLAPTRELAYQISEQFEAIGGSIGVRSVVIVGGMDMVTQAVALSKKPHVLVCTPGRLMDHLENTKGFSLKNLKYLIMDEADRLLDMDFGPIIDKILKIIPHERRTLLFSATMTSKVEKLQRASLHQPVRVAVSSKFSTVDTLIQRYLFFPFKHKDTYLVYLVNELAGNSIIIFARTVNDTQRLAILLRTLGFSAIPLHGQLSQSNRLGALNKFKSGARSTLVATDVAARGLDIPLVDVVINYDIPTDSKAYIHRVGRTARAGRAGKSIALVTQYDLEPFLRIEATIGKKMQEYEIDKEGVFLLSERVGEAQREAIIQMKEIHDRRKSKGKLHTKRKRDDLDREEQIY

SEQ ID NO: 66004 - DNA, 1443 bp, Yarrowia lipolytica
  CDS (1)..(1443)
atggccaaggcgacggaaaaacgagtgaagcgagcaaagaaggaggagagcgggtccgagtccgaggacaacgatgccatcgcgcaggaaatcctcgacaccaccaagtccgacaacgaggaagaagagcccaagaagagctccaagaactacacctcggtggaggtggatgagagtgaggagcaaaccaagaccttcaaggatctgggcgtgattgactccatctgtgagacctgcgaggagctcaaattcaccaaacccacacccattcaggcccagagtatcccgtacgccctcgagggacgagacatcatcggtttggcccagactggttccggtaagacggccgcctttgccatccccgttctgcagagtctgtacgagaacccccagccgctgtactgtgtggtgctagcccccactcgagagctggcgtaccagatcagcgagacgtttgaggcgttgggctctgccatgggtctgcgaaccgctgtggttgtgggaggtatgaacatgatgacacaggcggtggcgctgtccaagaagcctcatgtgattgtcgcaacccctggacgtctggtggaccatctggagaacacaaagggattttcgctgcgaaccctcaagttcctggtcatggacgaagccgaccgactgttggatatggagtttggaccttctctggacaagattctcaaggtcatcccccgacaacgaaacacatatctcttctctgccaccatgacctccaaggtcgagaagctgcagcgagcctctctggtggaccctgtccgagtggccgtttccacaaagtaccagactgcagacaacctgttgcagtacatggtcttctgtcccttcaagcacaaggacacacatctggtctacctcgtgtccgagaacgcgggcaactcgatgattatctttgcccgaaccaagtccgacacccagcgaatttctctgctgctgcgaaaccttggatacggcgctattcctctgcatggagatctgagtcagaccgcgcgacttggagctctcaacaagttcaaaagtggatctcgaaacattctgatcgccaccgacgttgcctctcgaggtcttgatatccccgccgtggacctggtcatcaactacgacatccccagcgactccaagtcgtatatccatcgagttggacgaactgcccgagctggtcgggccggcaaatctgtggctctggtttcgcagtacgatctcgagctttatctgcgaatcgagggcgctctaggcaagaagctggactcgtatcctctggagtccgaggctgtcatgctcttttctgagcgagtggccgaggcttctcgagctgccattcaggagatgaagggcgaggatggaactaagaagcgaagcaagtttgacaagaagagacgacgagacgagatggacattggagagcagtag

SEQ ID NO: 66005 - protein, 480 aa, Yarrowia lipolytica
MAKATEKRVKRAKKEESGSESEDNDAIAQEILDTTKSDNEEEEPKKSSKNYTSVEVDESEEQTKTFKDLGVIDSICETCEELKFTKPTPIQAQSIPYALEGRDIIGLAQTGSGKTAAFAIPVLQSLYENPQPLYCVVLAPTRELAYQISETFEALGSAMGLRTAVVVGGMNMMTQAVALSKKPHVIVATPGRLVDHLENTKGFSLRTLKFLVMDEADRLLDMEFGPSLDKILKVIPRQRNTYLFSATMTSKVEKLQRASLVDPVRVAVSTKYQTADNLLQYMVFCPFKHKDTHLVYLVSENAGNSMIIFARTKSDTQRISLLLRNLGYGAIPLHGDLSQTARLGALNKFKSGSRNILIATDVASRGLDIPAVDLVINYDIPSDSKSYIHRVGRTARAGRAGKSVALVSQYDLELYLRIEGALGKKLDSYPLESEAVMLFSERVAEASRAAIQEMKGEDGTKKRSKFDKKRRRDEMDIGEQ

SEQ ID NO: 66006 - DNA, 1392 bp, Encephalitozoon cuniculi
  CDS (1)..(1392)
atgggatgcaaggggattgaagatgtcgcgatgaacggcaggctgaagaaggaaattgaagagaatgggttcggaaagatgaccgaggttcagctgaagtgtataccggaggtgctaaagggaaaggatgtggtggtccagtctccaacaggcactggaaagactatggcatttcttgctccgatactcagctgcatatacgacggaaagggaagagggaggcctggtgttacggccgtggtcatcacgccaaccagagagcttgctctgcagattagggaggtggcaggcttgtttgatgtgaagtgtgagtgctttataggcgggatgagcattgaagaggactacaaaaggatgaaggaggagttcagcattgccgttgggactcctgggagactcttggagattgtgggcaaggagacgaagaagttttcatctctcagccatcttgtcctagacgaggcagacaagctcctgggctttggatttgaggagaagctgatgcagttgcttgcaaagcttccaagaaacagggtcacagggctgttctctgcaacgagaaatgactctgtagataagctctcccgggtcttcctgcgcaatcctgtcagcatcaacgtagggaacaacgaaatgcccgttgctcttgagtatattgtggtaagccctatggaaaagctgctcgttcttatggacattgtgactggtagaagatgcattgtcttctttgcaacatgcagcgaggtcgactttttttctggcctggtttcaagggccggctttgggaatatctgtaagatacatggaaagatatcgcaggatgagcggaacagggtttacgaggagttttttcaaagggatgggcttctcttctgtaccgacgttgcagcgaggggaatagacttcagaggcgtggatttggttgtgcactttgatgttccaaaggaatacagcagcatagtccatagaagcggtagaactgccaggaacggaagcaagggggagtctgtcctctttgtgatgccgaacgaaagggcgtatgtcgagtttctgaagctgaaagggattcccgcagtggaaagcagctacagaatgaagtcctcgctgtcctaccaggacataaagagcatgatcagtccggaactgctaggtctttctgtcaaggcatttgtgtcgtacataaggtcatataaagagcactttgtgtcatacatactggactacaagggcttagacttcgactctctggcagaactctttttccttgagaggataccaggaatggctgagctaaggaatgtgaagtttgagaagttcactaagcctgcaagggatgggaagaagagagccttgcccaagaagaagtacagaaaaaaaagagcaataaagtag

SEQ ID NO: 66007 - protein, 463 aa, Encephalitozoon cuniculi
MGCKGIEDVAMNGRLKKEIEENGFGKMTEVQLKCIPEVLKGKDVVVQSPTGTGKTMAFLAPILSCIYDGKGRGRPGVTAVVITPTRELALQIREVAGLFDVKCECFIGGMSIEEDYKRMKEEFSIAVGTPGRLLEIVGKETKKFSSLSHLVLDEADKLLGFGFEEKLMQLLAKLPRNRVTGLFSATRNDSVDKLSRVFLRNPVSINVGNNEMPVALEYIVVSPMEKLLVLMDIVTGRRCIVFFATCSEVDFFSGLVSRAGFGNICKIHGKISQDERNRVYEEFFQRDGLLFCTDVAARGIDFRGVDLVVHFDVPKEYSSIVHRSGRTARNGSKGESVLFVMPNERAYVEFLKLKGIPAVESSYRMKSSLSYQDIKSMISPELLGLSVKAFVSYIRSYKEHFVSYILDYKGLDFDSLAELFFLERIPGMAELRNVKFEKFTKPARDGKKRALPKKKYRKKRAIK

SEQ ID NO: 66008 - DNA, 1791 bp, Kluyveromyces lactis
  CDS (1)..(1791)
atgtcgaagtcgttatcgtgggacgatttgaaatgcgagatacaaccatggattagaacggctatagaatcgatggggtttgagaccatgacgccagttcaagcctcaactattccgttgttctctggtaacaaggatgtcgtggtagaatctgttacaggatctggtaagactatagcgttcgtgattccaattttagaaaggttgataaaagaagaagccaattcggccaaattcaagaaatcacatttccattcgttaatcatttcaccaaccagggaattagccagtcagattcatgatgtgatagaagactttctgaagtattatccagataatctgtacccaatacggtcgcaattactcgtcggaacaagtagcgctagtgttcgagacgatatcaatagttttacagataacagaccccaaatactagttggtactcctgggagagtcctagattttttgcagaagactaatgtaaagactgcttcctgtggtaccgtcgtgttagatgaagctgataagttattggatttgaatttccagaaagatgtagaaaccattttaaagatgttgccgaagcaaagaagaacagggttgttttcggcaacaatcgaaagtgcgggtgcgcaaatcttcaaaacaggtatgagaaatccagtgaaagttgctgtgaagtctaactcgagcgcaccttcatctctttcgataaactatatcgtcattccacctaaggataaattacaactattgttgactctactcaacaactacagattcaagaaatgcatagtttacttcccgacatgtatctcggtcacatatttttacgcattcataaaccatttgaaagagcttaatttgattcaggatgatctaaaactcttctcactacacggaaagctacagacgcaatcgagaatgaagacgcttgacagtttcacttctaacttgaccgatgccgtactattcaccacagatgttgctgctagagggatagacataccagatgttgatctagttatccaacttgatccaccaacagatgcagatatattcattcacagatgtggtagaacaggtagggctaataggattggtaaggcacttgtgtttttaaatgaaggtagagaagaagattacgtaccattcctggaagtgaaaaacgtcaaactagaagaagaatctgtggaactgaaaggcgtagagaatctaaccaaaatattccacgattggattttacacgatagagcaagattcgatcacagcgtaagagcatacgttgcatttataaaatactactcaaagcatactgcatcatcgatcttcagattccactccatggatttcatcggcgttgcgaacttttacgggttgttacgtctgccacgtatgcccgaaataaccaggtatgctgccgaccaaattccggaggaaggttggttggtatcaccaccagtgaatttagacacatttgcttacttagataaacaaaaggagaaggcgaggttacaagaattacaaaacctcaagcaaataagcgataaaaagaaactgaaaagtgagctaaagaagaagaacatggcatggtccgataagacactaactaaagaagccaaagctgaaagaagagcagctatggccatcaagaggaaggcaattgaagagaaacttctgcggggcgatgaggaatcagaagatgaagttgagcaagactggaaagaccttgtaagacaaaacaagaaaaagaagcataactccatgcaaggaagtttcgatgatttatag

SEQ ID NO: 66009 - protein, 596 aa, Kluyveromyces lactis
MSKSLSWDDLKCEIQPWIRTAIESMGFETMTPVQASTIPLFSGNKDVVVESVTGSGKTIAFVIPILERLIKEEANSAKFKKSHFHSLIISPTRELASQIHDVIEDFLKYYPDNLYPIRSQLLVGTSSASVRDDINSFTDNRPQILVGTPGRVLDFLQKTNVKTASCGTVVLDEADKLLDLNFQKDVETILKMLPKQRRTGLFSATIESAGAQIFKTGMRNPVKVAVKSNSSAPSSLSINYIVIPPKDKLQLLLTLLNNYRFKKCIVYFPTCISVTYFYAFINHLKELNLIQDDLKLFSLHGKLQTQSRMKTLDSFTSNLTDAVLFTTDVAARGIDIPDVDLVIQLDPPTDADIFIHRCGRTGRANRIGKALVFLNEGREEDYVPFLEVKNVKLEEESVELKGVENLTKIFHDWILHDRARFDHSVRAYVAFIKYYSKHTASSIFRFHSMDFIGVANFYGLLRLPRMPEITRYAADQIPEEGWLVSPPVNLDTFAYLDKQKEKARLQELQNLKQISDKKKLKSELKKKNMAWSDKTLTKEAKAERRAAMAIKRKAIEEKLLRGDEESEDEVEQDWKDLVRQNKKKKHNSMQGSFDDL

SEQ ID NO: 66010 - DNA, 1854 bp, Pichia stipitis
  CDS (1)..(1854): transl_table=12
atggaaacaaagaaaggttcactcgactggaaaaatctccagtatgacctccaaccatggatcaaagaagcgattgcctcgttggggttccctaccatgaccccagtacaagctgctacgattcctttacttagtgggaacaaagatgttgtcgtagaagcagtgactggttcaggcaaaactcttgcatttgctatacccgtcttacagaaagtctcgaaccgtttgtatgactcacaagaagaaggcgaagcccccgaaaaagttaaacaaggacacatgcttgctattgtattatctcctactagagaactcgctagtcaaatccaatccgtattcaacaatgtcatcgaatatttacctgaagataaaattcctattaaaacacagttgcttgtgggttccctttccacagtgagagatgacttggatcgtttcttgaaagataaacctcatatcttgattgccacacctggtagaatgcttgacttcatgtcttcacaatatgtaaaaatgaattcggtagagatagctattttagatgaagcagacaagctattggacttctcattcgaaaaggatgttgttaacatcctaaagagattaccaaaacaaagaagaacgggacttttttcagctactatttcagctgctggaaatacaatttttagagcaggcatgaacaacccagtgaaggtggctgtgaagtccaagtctaccactgccaactcagctccttcagcattgcatatctcctatctaatgatagaaccagaaaaaaagatcactactttaataaagttattgcacgattacagatacaagaagtgtattgtatatttccctacctgtacatctgttaagcacttttattctatcttccagaaaattgtcaatggaaatgacaacactgaatcgttcaaattctactcattacatgggcagcttgctaccaaaccaagattaagaacattgcaaagtttcacggatggagatgtggcattgaacaaacatatcttgatgaccacagatgtagcagccagaggtatcgatatcccagatgtagacttggttatccagttagatcctccaactgatccagatgtgtttttgcacagatgtggtagaactggaagagccaataaggttgggcgtgctattgtcatgttaaacgatggtagtcgagagctagactatgttgatttcatggaagtgaagggtgtagcaatgcaagaaatgccaacgccagacttgaaccagagtgaccatcaacagttccaagacaaactcagaaagtatatgcttgatgacagggcccgccatgaaattgcaatcaagtcgtatgttggatttgtcagatactacaccaaacatatggcaacttctatcttcagataccagactttggattatcttgggatagctaagatgtatgggttgttgagattacccaaaatgcccgagtcgaaatatatacctaatgataatatgcctgatgatggatggctaggcgaacccatcgatatggacaaatatagttatgcagataaccagcaggaagcatcgagattggaaaacttgaatgcagaaaagatcaagaagatagctgatgcaaagaggagaaaggagttgaaggtcaaaaatgaagcatggtccagtaagacagaaacaaaggaaacgaaacaagaaagacgggagaagatgaagagaaaaagagaagccattgaaaaacagatcatggaagaatcttcggacgacgaagagacaaaagtcgactggaaggacatcgtaaagagtaacaagaagaaaaaggcaaactctggcctgatgcaaggttcattcgatgatttatag

SEQ ID NO: 66011 - protein, 617 aa, Pichia stipitis
METKKGSLDWKNLQYDLQPWIKEAIASLGFPTMTPVQAATIPLLSGNKDVVVEAVTGSGKTLAFAIPVLQKVSNRLYDSQEEGEAPEKVKQGHMLAIVLSPTRELASQIQSVFNNVIEYLPEDKIPIKTQLLVGSLSTVRDDLDRFLKDKPHILIATPGRMLDFMSSQYVKMNSVEIAILDEADKLLDFSFEKDVVNILKRLPKQRRTGLFSATISAAGNTIFRAGMNNPVKVAVKSKSTTANSAPSALHISYLMIEPEKKITTLIKLLHDYRYKKCIVYFPTCTSVKHFYSIFQKIVNGNDNTESFKFYSLHGQLATKPRLRTLQSFTDGDVALNKHILMTTDVAARGIDIPDVDLVIQLDPPTDPDVFLHRCGRTGRANKVGRAIVMLNDGSRELDYVDFMEVKGVAMQEMPTPDLNQSDHQQFQDKLRKYMLDDRARHEIAIKSYVGFVRYYTKHMATSIFRYQTLDYLGIAKMYGLLRLPKMPESKYIPNDNMPDDGWLGEPIDMDKYSYADNQQEASRLENLNAEKIKKIADAKRRKELKVKNEAWSSKTETKETKQERREKMKRKREAIEKQIMEESSDDEETKVDWKDIVKSNKKKKANSGSMQGSFDDL

SEQ ID NO: 66012 - DNA, 1821 bp, Schizosaccharomyces pombe
  CDS (1)..(1821)
atgagttttcagagtattaatatagataaatggctaaagaacgccgtagctgctcaaggatttaaaaaaatgacacccgttcaggctaatgccataccattatttttgaaaaataaagatctggtagttgaagcagtaacgggttcaggcaagactttggcctatttacttccttgcttcgataaagtcactcgtagagatacggacgaaacaggtttgggtgcattaattgttgcacctactcgtgaattagctacacagatattcaatgttaccaaagagcttttggcgtaccaaccagactctttggatggagggaaaaaactcgttgcagatatgtatattgggggaaagggaacgctcacgaatgatttagcttcatttcgggaaaaaaacccctcagtggtgattggtacacccggtcgattgaatgaaatgctttctcatatatccagtaagcatttggaaatactaatattagacgaagctgatacccttattgacatgggatttcagcgtacattacaatccattatatctcaacttccgaaacaacgtcgaactgggttgtttagcgcaacaatgaatgacactgtgtcatcatttttaaaaattgctggccttcgaaatagcgtacgtgtttctgtgacagttacatcaaaaaaaattgatacaagaacaccgtcaagtctagctatacaatctttagtgattcctcccatatacaaagtacaatgtatgatacatttgctttgtacgatcgaatacgaaaaagcaattgtttttttttcttcttgtgcttctgttgaatattttaactccctttttctcacttataaattaccgtttgaaatagtagctttgcatggacagcaagttcagtcgaatcgatcacgtaattttgaaaaatttaagaaatcaaataaaaaaacagttctttttacaactgacattgcttcccggggtcttgatattccaaatgttgactttgttcttcagctcgacccgcctttggatccgaaatctttttctcatagatgcggcagagctggtcgcgctggtcgagcgggtgttgcaatagttttgttaaatgatggaagagaagaagaatatgaggaattgttaagggttaggaaggtacctattactcgtatagacactccaattgaagctttagatctttcacgacttaaagtattaacccacgaattgagaaaaatcgtatccaaagacagagatctatatgataagggattaagagcgtttgtttcacatgttcgtgcgtacacaaaacatcatgcgtcgtttatttttcgtatcaaagatttggatttgggacagttggccacggcatacgctttattacatcttccaaaaatgccagagttaaaagacaccgaaatatccgaaaatatttttaaaaaatttgacattgattatgcaaccataccataccgtgatcaagtacgcgagcaggccagacgacgccgattggaagtcgaaaaaactgaacccaaaaaattagctcggccagcaaaaattaagaacgaagcttggtccaaacaaaaggaagtaaaggagaagcgtaacacccgacgtgaaaaaaggaaatccaagaaagaatttttgaaggcacagaaaaacgaagcttctaataacctgaaacaagaaatagtatcaaaagctggagcacaagaaacggaaaacgatgacttaatagatgaggaatcggatgctttatctgaattagaagaggattaccgacagttgaaaaaaagcaaaaaaagaaaaaatcaagcatcctttggatttagtatgtag

SEQ ID NO: 66013 - protein, 606 aa, Schizosaccharomyces pombe
MSFQSINIDKWLKNAVAAQGFKKMTPVQANAIPLFLKNKDLVVEAVTGSGKTLAYLLPCFDKVTRRDTDETGLGALIVAPTRELATQIFNVTKELLAYQPDSLDGGKKLVADMYIGGKGTLTNDLASFREKNPSVVIGTPGRLNEMLSHISSKHLEILILDEADTLIDMGFQRTLQSIISQLPKQRRTGLFSATMNDTVSSFLKIAGLRNSVRVSVTVTSKKIDTRTPSSLAIQSLVIPPIYKVQCMIHLLCTIEYEKAIVFFSSCASVEYFNSLFLTYKLPFEIVALHGQQVQSNRSRNFEKFKKSNKKTVLFTTDIASRGLDIPNVDFVLQLDPPLDPKSFSHRCGRAGRAGRAGVAIVLLNDGREEEYEELLRVRKVPITRIDTPIEALDLSRLKVLTHELRKIVSKDRDLYDKGLRAFVSHVRAYTKHHASFIFRIKDLDLGQLATAYALLHLPKMPELKDTEISENIFKKFDIDYATIPYRDQVREQARRRRLEVEKTEPKKLARPAKIKNEAWSKQKEVKEKRNTRREKRKSKKEFLKAQKNEASNNLKQEIVSKAGAQETENDDLIDEESDALSELEEDYRQLKKSKKRKNQASFGFSM

SEQ ID NO: 66014 - DNA, 1821 bp, Saccharomyces cerevisiae
  CDS (1)..(1821)
atgtcaaagtcattggaatgggataatctcgggttttctttacttccctggataaggacaggactcgatgttatgggttttgagaccatgactccagtccaagcatcgacaattcccatgcttgctggcaacaaggatgtagtagttgattctgtaacaggctcaggtaagaccgctgcgtttgttatacctgtactagaaaaagttgtaaaggaagaagcgaatacatcaaaattcaagaaagcacacttccactcgttaattattgctccaacaagagaattgtcacgccaaattgagtctgtcgttctatcatttctggaacattatccttccgacttgttccctattaaatgtcagctcctggttggtactaatgaagccacagttagagatgatgtaagtaattttctgcggaatagaccgcagattctgattggaacacctggtagagttttggactttttacaaatgccagcagtaaagacgtcagcatgcagtatggtagttatggatgaagcagacagattgttggatatgagttttattaaggataccgaaaaaattctgaggctattgcctaaacaaagaaggacgggtctattttctgcaactatgcgtagcgccggatcagatatctttaagacagggcttagaaatcctgtcaggattaccgttaactctaagaaccaggcgccctcctctttgaaattaaattactgtgtcgtaaatcctgccgaaaaactacaacttttggttagcattttgaataactacaaattcaagaaatgtattgtatattttccaacatgtgtgtcagtctcctacttctactcatttatccagtatttgggaaagaggaatattctcgtgaatgaagtagaaatattttccttgcatggaaaacttcaaacatcggcaaggacaaaaactctaacagcttttactgattcgctaagtaattctgttttattcacaacagatgtggctgctagaggtattgacatacccgacgttgatctcgtcatccagcttgatccccctaccaatactgatatgttcatgcatagatgtggtagaactggtagagcaaatagagtgggtaaagcaattacgtttcttaatgaaggcagagaagaggattttattcctttcatgcaagttaaaaatgtggaacttgaagaacttgatttggaagtaaagggcataacaacaaacttttacgaggactttagaaattggatactagaagatagggatagatttgataaaggtgttaaagcatatgttgcctttattaaatactactcaaatcattccgcaacttcaatttttaggcttcaatctttagattatgttggtattgcgaaattgtatggtcttttccgcctgcctagaatgcctgagataacaaagtacttagccaccgaaaaacaagaagggattttcccagggaattggttggtcgatcccccagttaatatggatgaatataaatacaaggacaaaaaacgtgaaaaggagagacaagaaacattaaaaaatataagcctgattaatgataaaaagaagctgaaaagtgagttgaagaagaagaatttagcgtggtcagataaaacattgacgaaagaacggaaactcgagagaaaggaaaagatgagtttaaaaaggaaggctatagaggaagaattgaaagcagaagagctcgatgaaaatgctgaagaagagcgtattaaagaggattggaaagaaatcgttttacagaataaacggaagaaagtttccagcaaagctatccaaggcaattttgacgacttataa

SEQ ID NO: 66015 - protein, 606 aa, Saccharomyces cerevisiae
MSKSLEWDNLGFSLLPWIRTGLDVMGFETMTPVQASTIPMLAGNKDVVVDSVTGSGKTAAFVIPVLEKVVKEEANTSKFKKAHFHSLIIAPTRELSRQIESVVLSFLEHYPSDLFPIKCQLLVGTNEATVRDDVSNFLRNRPQILIGTPGRVLDFLQMPAVKTSACSMVVMDEADRLLDMSFIKDTEKILRLLPKQRRTGLFSATMRSAGSDIFKTGLRNPVRITVNSKNQAPSSLKLNYCVVNPAEKLQLLVSILNNYKFKKCIVYFPTCVSVSYFYSFIQYLGKRNILVNEVEIFSLHGKLQTSARTKTLTAFTDSLSNSVLFTTDVAARGIDIPDVDLVIQLDPPTNTDMFMHRCGRTGRANRVGKAITFLNEGREEDFIPFMQVKNVELEELDLEVKGITTNFYEDFRNWILEDRDRFDKGVKAYVAFIKYYSNHSATSIFRLQSLDYVGIAKLYGLFRLPRMPEITKYLATEKQEGIFPGNWLVDPPVNMDEYKYKDKKREKERQETLKNISLINDKKKLKSELKKKNLAWSDKTLTKERKLERKEKMSLKRKAIEEELKAEELDENAEEERIKEDWKEIVLQNKRKKVSSKAIQGNFDDL

SEQ ID NO: 66016 - DNA, 1335 bp, Escherichia coli
  CDS (1)..(1335): transl_table=11
atgactgtaacgactttttccgaacttgaactcgacgaaagcctgctggaagccctccaggataaaggtttcactcgcccgaccgccattcaggctgccgccattccgcctgcgctcgatggccgtgatgtactcggttctgcgccgacaggcaccggtaaaacggcggcgtatctgctgccagcgttgcagcacctgctcgatttcccgcgtaagaaatccggtccgccgcgtattttgatcctcaccccaactcgcgagctggcgatgcaggtgtccgatcatgcccgcgaactggcgaaacatacgcatctggatatcgccaccatcaccggcggcgtagcctatatgaaccacgcggaagtgttcagcgaaaatcaggacatcgtggtcgccacgaccggacgtctgctgcaatacataaaagaagagaacttcgattgccgcgcggttgaaacgctgatcctcgacgaagcagaccgtatgctggatatgggcttcgctcaggatatcgaacatattgctggcgaaacgcgctggcgtaaacagaccctgctcttttcggcaacgctggaaggcgatgcgattcaggactttgccgagcgtctgctggaagatccggtggaagtttctgccaatccctccacccgtgagcgcaaaaaaattcatcagtggtattaccgcgccgatgatcttgagcataaaaccgcgttgctggtgcatctgttaaaacagccggaagcgacccgctcaattgtgtttgtgcgtaagcgtgagcgtgtgcatgagctggcaaactggctgcgcgaagcgggcatcaacaactgctatctcgaaggtgagatggtacagggcaagcgtaacgaagcgatcaagcgtttgaccgaaggtcgcgtaaacgtactggtcgcaaccgatgttgccgcgcgcggtatcgacattcctgacgtcagccacgtctttaacttcgatatgccgcgcagtggcgatacttatttgcaccgtatcggacgtaccgcgcgcgccggtcgtaaaggcaccgcaatttcgctggtggaagcccatgaccatctgctgctgggtaaagtaggccgctatattgaagagccaattaaagctcgcgttattgatgagttacgcccgaaaacgcgtgcgccaagcgaaaagcagaccggcaagccatcgaagaaagtactggctaaacgtgctgagaagaaaaaagctaaagagaaagagaagccgcgggtgaaaaaacgccatcgcgacaccaaaaatattggtaagcgccgtaaaccaagcggaacgggcgtgccaccgcaaacgacagaagagtaa

SEQ ID NO: 66017 - protein, 444 aa, Escherichia coli
MTVTTFSELELDESLLEALQDKGFTRPTAIQAAAIPPALDGRDVLGSAPTGTGKTAAYLLPALQHLLDFPRKKSGPPRILILTPTRELAMQVSDHARELAKHTHLDIATITGGVAYMNHAEVFSENQDIVVATTGRLLQYIKEENFDCRAVETLILDEADRMLDMGFAQDIEHIAGETRWRKQTLLFSATLEGDAIQDFAERLLEDPVEVSANPSTRERKKIHQWYYRADDLEHKTALLVHLLKQPEATRSIVFVRKRERVHELANWLREAGINNCYLEGEMVQGKRNEAIKRLTEGRVNVLVATDVAARGIDIPDVSHVFNFDMPRSGDTYLHRIGRTARAGRKGTAISLVEAHDHLLLGKVGRYIEEPIKARVIDELRPKTRAPSEKQTGKPSKKVLAKRAEKKKAKEKEKPRVKKRHRDTKNIGKRRKPSGTGVPPQTTEE

SEQ ID NO: 66018 - DNA, 1323 bp, Aspergillus niger
  CDS (1)..(1323)
atgtcccacgaagaggatctcatcgactactccgacgaggagcttcagaccactgacgcggcggccaccaccgctgctcccgcctctaacggagaggctaagaagggcgacttgacggtttctggcggccgtccggacaagaagggtagttacgtcggtatccattcgaccggtttccgcgactttttgctcaaagaggaactcctacgtgccatcaccgattgcggtttcgaacatccatcggaggtccagcaagtctgcattcctaccgccattctgaacgtcgatgttctctgccaggccaagtctggtctcggaaagaccgcggtcttcgttttgaccactctgcaccagctggagccggttcctggcgagtgctctatccttgttatgtgccacacccgcgagttggcataccagatcaagaacgagtacgctcgtttcagcaagtaccttcctgatgtcaagactgctgtcttctacggaggtacccctattcagaaggacgttgaattgctatccaacaaggagtcctaccccaacattgttgttggtactcctggtcgtctgaacgccttggtccgtgacaagaagctttctctgcgcaacgtcaaggctttcgttctcgacgagtgtgataagatgctggaccagatcgacatgcgtcgtgatgtccaggagatcttccgtgccacccctgccgacaagcaggttatgatgttcagtgccactctttctcaggagatccgccccgtgtgcaagaagttcatgaggaaccctctcgaggtctacgtcgatgacgacacgaagctcacgctgcacggtctgcagcaatattacattaagctcagcgaagcggagaagaaccgcaagctgaacgagctcctggatagcctggagttcaaccaggttatcatcttcgtcaagagcaccctgcgtgcgaatgagctcgacaagctgttgcgcgagtgcaacttccccagtattgcggtgcactctggtgtgagccaggaggagcgtatcaaacgctacaaggagttcaaggaattcaacaagcgtatctgtgttgcgaccgacgtgttcggacgtggtatcgatattgagcgtatcaaccttgccatcaactacgacttgccggctgatgccgactcctacctgcaccgtgtcggtcgtgcgggtcgtttcggtaccaagggtctgtcgatttcttttgtcagcaccgaggatgacgagaaggtgctcaaggacatcgagaagcgcttcgaggttgcccttcctgaataccccgagggcggcgtcgactcgagcacttacatggcctag

SEQ ID NO: 66019 - protein, 440 aa, Aspergillus niger
MSHEEDLIDYSDEELQTTDAAATTAAPASNGEAKKGDLTVSGGRPDKKGSYVGIHSTGFRDFLLKEELLRAITDCGFEHPSEVQQVCIPTAILNVDVLCQAKSGLGKTAVFVLTTLHQLEPVPGECSILVMCHTRELAYQIKNEYARFSKYLPDVKTAVFYGGTPIQKDVELLSNKESYPNIVVGTPGRLNALVRDKKLSLRNVKAFVLDECDKMLDQIDMRRDVQEIFRATPADKQVMMFSATLSQEIRPVCKKFMRNPLEVYVDDDTKLTLHGLQQYYIKLSEAEKNRKLNELLDSLEFNQVIIFVKSTLRANELDKLLRECNFPSIAVHSGVSQEERIKRYKEFKEFNKRICVATDVFGRGIDIERINLAINYDLPADADSYLHRVGRAGRFGTKGLSISFVSTEDDEKVLKDIEKRFEVALPEYPEGGVDSSTYMA

SEQ ID NO: 66020 - DNA, 1326 bp, Aspergillus oryzae
  CDS (1)..(1326)
atgtctcacgaggaggatctcattgactactccgatgaggagcttcagaccactgatgccgcagctaccactgctgctcccgccgcaaatggcgacgccgccaaaaagggcgacctaacggtttctggtggccgtcccgacaagaagggaagctatgtcggtattcactcgaccggtttccgcgactttttactgaagggagaactcttacgtgccatcaccgattgcggtttcgaacatccatcggaggtccagcaagtttgcattccgaccgctattctcaatgtcgatgttctttgccaggcaaagtctggtctcggaaagaccgccgtcttcgtcttgaccacccttcaccagctggagcctgtccccggagagtgctctgtcttggtcatgtgccacacccgtgagttggcttaccagattaagaacgaatatgctcgtttcagcaaataccttcccgacgtgaagactgccgtcttctacggaggtacgcccatccagaaggacgtcgaagtgctgtccaacaaagaatcataccccaacattgtcgtcggtactcccggtcgactgaacgcccttgttcgcgacaagaagctttccctgcgtaatgtcaaggcattcgttcttgacgagtgtgacaagatgctcgaccagatcgatatgcgccgcgatgttcaggagatcttccgtgctacacccgctgataagcaagttatgatgttcagcgctactctctcccaagagatccggcctgtttgcaagaagttcatgaggaacccccttgaagtttacgtggacgacgacaccaagctcaccctccacggtttgcagcaatactacatcaagctcagcgaagcggaaaagaaccggaagctgaacgaactcctggatagccttgagttcaaccaggttattattttcgtcaagagcacactccgtgcaaatgagctggacaagcttttgcgcgagtgtaacttccccagtatcgcagtccactctggtgtgagccaggaggagcgtatcaaacgctacaaagaattcaaggagttcaacaagcgtatctgtgttgctactgatgtcttcggacgtggtatcgatatcgagcgtattaaccttgctattaactacgacttgcctgcggatgctgactcgtacctgcaccgcgttggtcgtgccggtcgtttcggtaccaagggtctctcgatctcgttcgtcagcaacgaggaggacgagaaggtccttaaggatattgagaagcgtttcgaagttgctcttcctgaataccccgagggtggtgttgactccagcacgtacatggcataa

SEQ ID NO: 66021 - protein, 441 aa, Aspergillus oryzae
MSHEEDLIDYSDEELQTTDAAATTAAPAANGDAAKKGDLTVSGGRPDKKGSYVGIHSTGFRDFLLKGELLRAITDCGFEHPSEVQQVCIPTAILNVDVLCQAKSGLGKTAVFVLTTLHQLEPVPGECSVLVMCHTRELAYQIKNEYARFSKYLPDVKTAVFYGGTPIQKDVEVLSNKESYPNIVVGTPGRLNALVRDKKLSLRNVKAFVLDECDKMLDQIDMRRDVQEIFRATPADKQVMMFSATLSQEIRPVCKKFMRNPLEVYVDDDTKLTLHGLQQYYIKLSEAEKNRKLNELLDSLEFNQVIIFVKSTLRANELDKLLRECNFPSIAVHSGVSQEERIKRYKEFKEFNKRICVATDVFGRGIDIERINLAINYDLPADADSYLHRVGRAGRFGTKGLSISFVSNEEDEKVLKDIEKRFEVALPEYPEGGVDSSTYMA

SEQ ID NO: 66022 - DNA, 1320 bp, Candida glabrata
  CDS (1)..(1320)
atgtcccacgaaggtgaagaagatttattggagtactctgacaacgagcaagagatccaagttgacaacaaggagactgctgttgaaggtactaccgaaaatgaagctacccaggagaatggtgaggctgacaagaagggttcctacgttggtatccactctaccggtttcaaggacttcttgttgaagcctgagttgtccagagctattatcgactgtggtttcgagcacccttctgaagtccaacagcacaccatcccacaatccattcacggtacagatgtgctatgtcaagccaagtccggtttgggtaagaccgcggtcttcgtcctgtccacattgcaacagctagatccagttccaggtgaagtgtccgttgttgttatatgtaacgccagagagttggcttaccaaatccgtaacgaatacctaagattttccaaatacatgccagacgtcagaaccgctgtcttttacggtggtactccaatcgccaaggatgccgaactactaaagaacaaagacaccgctcctcacattgttgtcgctactccaggtcgtctaaaggcccttgttagggacaagatgattgacttgtctcacgtcaagaacttcgttatcgatgaatgtgacaaggtccttgaagaacttgacatgagaagagacgtccaagaaattttcagagccactccaagagacaagcaagtaatgatgttctccgccaccctatcccaagaaatcagaccaatctgcagaagattcctacaaaacccactggaaatctttgtcgatgatgaggctaagttgactctacacggtctacaacaatactacatcaaattagaagagcgtgagaagaaccgtaaacttgcacaattgctagatgacttagaattcaaccaagttatcatctttgtcaaatctacctccagagctaacgaactaacgaaactattgaacgcttcaaacttcccagccattaccgtccatggccacatgaaacaagaagaacgtattgcccgttacaaggctttcaaggactttgaaaagcgtatctgtgtctccactgatgtcttcggtagaggtatcgatattgaacgtatcaacttggctattaactacgatttactaaatgaagccgaccaatacttacaccgtgttggtagagccggtagattcggtaccaagggtttggctatttcttttgtctctaacaaggaagacgaggaagtcttgtccaagattcaagaaagattcgacgtcaagattgctgaattcccagaggaaggtattgacccatccacttacttaaacaactaa

SEQ ID NO: 66023 - protein, 439 aa, Candida glabrata
MSHEGEEDLLEYSDNEQEIQVDNKETAVEGTTENEATQENGEADKKGSYVGIHSTGFKDFLLKPELSRAIIDCGFEHPSEVQQHTIPQSIHGTDVLCQAKSGLGKTAVFVLSTLQQLDPVPGEVSVVVICNARELAYQIRNEYLRFSKYMPDVRTAVFYGGTPIAKDAELLKNKDTAPHIVVATPGRLKALVRDKMIDLSHVKNFVIDECDKVLEELDMRRDVQEIFRATPRDKQVMMFSATLSQEIRPICRRFLQNPLEIFVDDEAKLTLHGLQQYYIKLEEREKNRKLAQLLDDLEFNQVIIFVKSTSRANELTKLLNASNFPAITVHGHMKQEERIARYKAFKDFEKRICVSTDVFGRGIDIERINLAINYDLLNEADQYLHRVGRAGRFGTKGLAISFVSNKEDEEVLSKIQERFDVKIAEFPEEGIDPSTYLNN

SEQ ID NO: 66024 - DNA, 1329 bp, Cryptococcus neoformans
  CDS (1)..(1329)
atgataaacagcaccaacctcaacttgaccatcaaaatgtcccgacccgacgaagaagaacttgttgactacgatgaggccgctgaggagatcctgccccccgcccccgccgccgagaccaacggcgataaggcggatggtgacaagaagggttcatatgtcggtatccactcgaccggtttcagggatttccttttgaagcccgagctcctccgagccatctctgatctcggtttcgagcacccctctgaggttcaacaggaatgtattccccaggccatcctcggtacagatgttctgtgtcaagccaagtctggtatgggtaagacggctgtgtttgtgcttgccgctttgcaacagattgaacccgttgatggcgaggtttctatcatcattctctgtcacactcgagagcttgcctatcagatcaagaatgagtttactcgtttttccaaatttatgaccaatgtccgaactggtgtcttctacggtggtactcccatctctgccgaccaggagatccttgccaacaaggaaaagtgccctcacatcgttgttggtacccctggccgaaccatggccctcgtccgtgacaagaagctcaacgcaagcaaggtcaagcactttgttcttgacgagtgcgacaagatgctcgaacaacttgatatgcgacgagacgttcaggaaatcttccgagccacgcctcaccacaagcaggttatgatgttctccgccaccctttccaaggacatccgagctacttgcaaaaagtttatgcaaagccctcttgagatttacgtcgatgatgagaccaagttgaccctccacggtcttcaacaattctacctcaagctcgaggagagggagaagaacaggaagctcaacgacttgttggacaatctcgaattcaaccaggtctgcatctttgtcaagtctgttcaacgtgctactcagctcgacgctctcttgcaagagtgcaacttcccctccatctgtatccactctggtcttcaacaagccgagcgaatctctcgattccagcagttcaaggcttttgagaagcgaatcctcgttgctaccgacatctttggtcgaggtatcgatgttgagcgagtgaacgttgtcatcaactatgacgctccctcggatgccgactcttacctccaccgagtcggtcgtgctggtcgattcggcaccaagggtcttgccatctcctttgtctctagcgacgccgaccaagaggtccttcaaaggatccaggagcggttcaccgttgccatccccactttgcccgagactgtcgaccccgccacttacatgacttcgtaa

SEQ ID NO: 66025 - protein, 442 aa, Cryptococcus neoformans
MINSTNLNLTIKMSRPDEEELVDYDEAAEEILPPAPAAETNGDKADGDKKGSYVGIHSTGFRDFLLKPELLRAISDLGFEHPSEVQQECIPQAILGTDVLCQAKSGMGKTAVFVLAALQQIEPVDGEVSIIILCHTRELAYQIKNEFTRFSKFMTNVRTGVFYGGTPISADQEILANKEKCPHIVVGTPGRTMALVRDKKLNASKVKHFVLDECDKMLEQLDMRRDVQEIFRATPHHKQVMMFSATLSKDIRATCKKFMQSPLEIYVDDETKLTLHGLQQFYLKLEEREKNRKLNDLLDNLEFNQVCIFVKSVQRATQLDALLQECNFPSICIHSGLQQAERISRFQQFKAFEKRILVATDIFGRGIDVERVNVVINYDAPSDADSYLHRVGRAGRFGTKGLAISFVSSDADQEVLQRIQERFTVAIPTLPETVDPATYMTS

SEQ ID NO: 66026 - DNA, 1314 bp, Kluyveromyces lactis
  CDS (1)..(1314)
atgtctcacgaagcagaagaggatttattggagtattccgataacgaacaagaagttcaagttgacaacaaggccactgaagtgaatgccgagggtaacggtgagagccaagcaaaggattctgataagaaaggttcttatgttggtattcactccactggtttcaaggatttcttgttgaagccagaattgtccagagctatcattgactgtggttttgaacatccttctgaagtgcaacaacataccattcctcaatccattcatggtactgacgtcttatgtcaagctaagtctggtctaggtaagactgctgtgttcgtgttgtctactttgcaacaattggatccagttcaaggtgaagtcagtgtcgtcgtgctatgtaacgcgagagaattggcttaccaaattagaaacgaatacttgagattctccaaatacatgccagacgttaagactgctgtattttacggtggtactgaatataagaacgatattgatttgctatccaagaaggaaaccgtccctcatatcattgtagccactcctggtcgtttaaaggctttggttagagacaagcatatcgatctatctcacgtcaagaactttgtcattgatgaatgtgacaaggtcttggaagaattggatatgagaagagatgttcaagatatttttagagccaccccaagagataagcaagttatgatgttttccgcaactctatcccaagaaatcagaccaatctgtagaagattccttcaaaatccattagaaatctttgtcgatgacgaagccaagttgactctacacggtttgcaacaatactatatcaaattgaatgaaaaggaaaagaaccgtaagttggctcaattgttggacgatttggaattcaaccaagttatcattttcgtcaagtctactgtcagagctaacgaattgaccaaactattgaatgcttctaacttcccagccatcactgtgcatggtcacatgaaacaagaagaacgtattgctcgttacaaggctttcaaggaattcgaaaaacgtatttgtgtttccactgatgttttcggtagaggtattgatatcgaacgtattaacttggccattaattatgatatgccaaacgaagcagaccaatacttgcatcgtgttggtagagctggtagattcggtaccaagggtttggctatctccatgatatctagtgaagatgacgaacaagtcttggccaagatccaagaaagatttgatgttaagatcactgagttcccagaagaaggtgttgatccatctacttatttgaacacttag

SEQ ID NO: 66027 - protein, 437 aa, Kluyveromyces lactis
MSHEAEEDLLEYSDNEQEVQVDNKATEVNAEGNGESQAKDSDKKGSYVGIHSTGFKDFLLKPELSRAIIDCGFEHPSEVQQHTIPQSIHGTDVLCQAKSGLGKTAVFVLSTLQQLDPVQGEVSVVVLCNARELAYQIRNEYLRFSKYMPDVKTAVFYGGTEYKNDIDLLSKKETVPHIIVATPGRLKALVRDKHIDLSHVKNFVIDECDKVLEELDMRRDVQDIFRATPRDKQVMMFSATLSQEIRPICRRFLQNPLEIFVDDEAKLTLHGLQQYYIKLNEKEKNRKLAQLLDDLEFNQVIIFVKSTVRANELTKLLNASNFPAITVHGHMKQEERIARYKAFKEFEKRICVSTDVFGRGIDIERINLAINYDMPNEADQYLHRVGRAGRFGTKGLAISMISSEDDEQVLAKIQERFDVKITEFPEEGVDPSTYLNT

SEQ ID NO: 66028 - DNA, 1311 bp, Magnaporthe grisea
  CDS (1)..(1311)
atgtctgccgaagaagatctcatcgactactccgatgaggagctcaacaccaacgagaccgccgccccggccgcggactcgaacggaaagaagggcgagctcgctgccggcggaaacgtcgacaagaagggcagttatgtcggcatccactcgaccggcttccgcgacttcctgctgaagccggagctcctccgcgcgatcggtgactgcggtttcgagcacccctcggaggtccaacagacatgtattcctcaagccatgttgggaggagatatcatctgccaagccaagtccggtctcggaaagacggccgttttcgttctcaccaccctccagcaggtcgagcctgtggctggggagtgctccgtcctcgtcatgtgccacactcgtgaattggctttccagattcgtaacgagtacaaccgtttctccaagtacatgcctgacatcaagactggagtgttctttggcggtaccccaatccagaaggatgctgagttgctgaagaacaaggagacgcaccctcacatcattgtcggaacaccaggacgacttaacgcgcttgtccgtgacaagttcctgcgccttagcagcgtgcgcatctttgtcctcgatgagtgtgacaagatgctcgatcagattgacatgcgccgtgacgtgcaggagatcttccgtgctacgccccagcagaagcaggttatgatgttctctgccactctctcggatgagatcaagccgatttgcaagaagttcatgcagaacccgacagagcactacgtcgacgaggacaccaagttgacgctgcacggtctgcagcaatactttgttgctcttgaggagaaggagaagaacaggaagctcaacgagcttctggatgatttgcaattcaaccaagtcatcatcttcgtcaagagcaccctgcgtgccaccgagcttgacaagcttcttcgcgagtgcaacttcccttcgattgctgtacactctggtgtcagccaggaagagcgtatccgccggtacaaggagttcaaggaattcaacaagcgtatctgcgtagccaccgacgtgttcggccgtggtatcgatatcgagcgtatcaacctggccatcaactacgatatgcctgctgacgctgactcataccttcatcgtgtcggtcgtgctggtcgtttcggtaccaagggtctcgccgtctcttttgtgaccaacgaccaagacaaggaggtcctgactgctatcgagaagcgctttgaagttcccattcctgagtttcccaaggacggtattgacgcaagcacctacatggcttcgtaa

SEQ ID NO: 66029 - protein, 436 aa, Magnaporthe grisea
MSAEEDLIDYSDEELNTNETAAPAADSNGKKGELAAGGNVDKKGSYVGIHSTGFRDFLLKPELLRAIGDCGFEHPSEVQQTCIPQAMLGGDIICQAKSGLGKTAVFVLTTLQQVEPVAGECSVLVMCHTRELAFQIRNEYNRFSKYMPDIKTGVFFGGTPIQKDAELLKNKETHPHIIVGTPGRLNALVRDKFLRLSSVRIFVLDECDKMLDQIDMRRDVQEIFRATPQQKQVMMFSATLSDEIKPICKKFMQNPTEHYVDEDTKLTLHGLQQYFVALEEKEKNRKLNELLDDLQFNQVIIFVKSTLRATELDKLLRECNFPSIAVHSGVSQEERIRRYKEFKEFNKRICVATDVFGRGIDIERINLAINYDMPADADSYLHRVGRAGRFGTKGLAVSFVTNDQDKEVLTAIEKRFEVPIPEFPKDGIDASTYMAS

SEQ ID NO: 66030 - DNA, 1302 bp, Pichia stipitis
  CDS (1)..(1302): transl_table=12
atgtcgcacgaaggacaagaagaattgttggattactccgactctgaagaaatcgccgttccaaccaccaccgaagtggctggcgcagattctgccactgataaggaagctgacaagaagggatcctacgttggaatccatgccaccgggttcagagacttcttgttgaagccagaattgttgagagccattggagactgtggttttgaacacccttcagaagtccaacaagtctgtattccacaatccattttgggtactgacgttttgtgccaggctaagtctggtttgggtaagacggccgtgttcgtcttgtctaccttacaacagttagacccagttccaggtgaaatttccaccttggttatctgtcacaccagagaattggcctaccagatccgtaacgaatacgccagattttccaagtatatgccagacgttaagaccgaggtcttttatggtggtactccaatcaagagagacatcgaaaagttgaagagcaaggatacatgtcctcacattgtagttgctacaccaggtagattacatgctttggttaacgaaaaggctatccgtttgtccaacgtcaagtcttttgttatcgatgaatgtgacaaggtcttggaatccatcgacatgagaagagacgtccaggacattttccgtgctactcctcaccagaagcaagtgatgatgttctcggctactttgtcgcaggaaatccgtcccgtctgcaagaagttcatgcaaaaccccttggaaatctacgtcgacgacgaagccaagttgactttgcacggcttgcaacagtactacatcaagttggaagagaaagaaaagaacagaaagttgtctgacttgttggactcattagaattcaaccaggtcatcatttttgtgaagtctactcagagagccaacgagttgaacaagttgttgtgtagttgtaacttcccatctattgctgtccactctggtttgcctcaagaagaaagaattgagagatacagatctttcaaggaattcaacaagcgtatctgtgtttccaccgacgttttcggtagaggtattgatatcgaaagaatcaacttggccatcaactatgacttgccaaacgaagccgaccagtacttgcacagagtaggtagagccggtagatttggtactaagggtttggccatttctttggtgggatccaaggaagacgaagaggttttggaaaagattcaatccagattcgatgttaaaatcaccgagttcccagaagaaggtgttgacccatccacttacatgaacacctaa

SEQ ID NO: 66031 - protein, 433 aa, Pichia stipitis
MSHEGQEELLDYSDSEEIAVPTTTEVAGADSATDKEADKKGSYVGIHATGFRDFLLKPELLRAIGDCGFEHPSEVQQVCIPQSILGTDVLCQAKSGLGKTAVFVLSTLQQLDPVPGEISTLVICHTRELAYQIRNEYARFSKYMPDVKTEVFYGGTPIKRDIEKLKSKDTCPHIVVATPGRLHALVNEKAIRLSNVKSFVIDECDKVLESIDMRRDVQDIFRATPHQKQVMMFSATLSQEIRPVCKKFMQNPLEIYVDDEAKLTLHGLQQYYIKLEEKEKNRKLSDLLDSLEFNQVIIFVKSTQRANELNKLLCSCNFPSIAVHSGLPQEERIERYRSFKEFNKRICVSTDVFGRGIDIERINLAINYDLPNEADQYLHRVGRAGRFGTKGLAISLVGSKEDEEVLEKIQSRFDVKITEFPEEGVDPSTYMNT

SEQ ID NO: 66032 - DNA, 1305 bp, Schizosaccharomyces pombe
  CDS (1)..(1305)
atggcatctgctcaggaggatttaattgattacgaagaggaagaagaattagttcaagatcagcctgctcaggagatcactcctgctgctgataccgcagagaacggtgaaaaatctgataaaaagggatcttatgtaggaattcactctacgggctttcgggactttttgttaaagcccgaacttcttcgtgcaattacggacagtgggtttgagcacccttcagaggttcaacaggtttgtattccccaatcaattttgggaacagatgttttgtgccaagccaaatccggtatgggtaagactgccgtttttgttctatcaactttacagcaaattgaacctgtcgatggagaagtctcggttcttgtcttgtgtcatactcgtgaacttgcttttcaaatcaaaaatgaatatgctcgtttcagcaagtatcttcccgatgtgcgtaccgctgtattttatggtggtattaatattaaacaagacatggaggcttttaaagataagagcaaatcccctcatatagtagtagccacacctggtcgtttgaatgctcttgttcgcgagaaaattttgaaggttaatagtgtcaagcactttgtactcgatgagtgcgataagcttttggaaagcgttgacatgcgtcgtgatatccaagaggttttccgcgccactcctcctcagaagcaagttatgatgtttagtgctacactttccaacgaaattcgtccaatctgcaaaaagtttatgcaaaaccccttggagatttatgtggacgatgagactaagcttactcttcatggtctccaacaacattatgttaagctggaggaaaaagctaaaaacaggaaaatcaatgatttgttagattctttggaattcaatcaggttgtcattttcgtaaagtcagtaagccgtgccaatgaacttgatcgtcttttacgtgagtgcaactttccatcaatttgcattcacggtggtcttcctcaggaagagcgtattaagcgttataaggccttcaaagacttcgacaagcgtatttgcgttgctactgatgtttttggccgtggtattgatattgagcgcgtcaacattgtaattaactatgacatgcctgattcccctgatagttatcttcatcgtgtcggtcgtgcaggtcgtttcggtacaaaaggtttggccattacattttctagttcagaagaagactctcaaattttggacaaaattcaggaacgttttgaggttaacattactgagcttcctgatgaaattgatgttggctcatacatgaatgcataa

SEQ ID NO: 66033 - protein, 434 aa, Schizosaccharomyces pombe
MASAQEDLIDYEEEEELVQDQPAQEITPAADTAENGEKSDKKGSYVGIHSTGFRDFLLKPELLRAITDSGFEHPSEVQQVCIPQSILGTDVLCQAKSGMGKTAVFVLSTLQQIEPVDGEVSVLVLCHTRELAFQIKNEYARFSKYLPDVRTAVFYGGINIKQDMEAFKDKSKSPHIVVATPGRLNALVREKILKVNSVKHFVLDECDKLLESVDMRRDIQEVFRATPPQKQVMMFSATLSNEIRPICKKFMQNPLEIYVDDETKLTLHGLQQHYVKLEEKAKNRKINDLLDSLEFNQVVIFVKSVSRANELDRLLRECNFPSICIHGGLPQEERIKRYKAFKDFDKRICVATDVFGRGIDIERVNIVINYDMPDSPDSYLHRVGRAGRFGTKGLAITFSSSEEDSQILDKIQERFEVNITELPDEIDVGSYMNA

SEQ ID NO: 66034 - DNA, 1341 bp, Saccharomyces cerevisiae
  CDS (1)..(1341)
atgtcacacgaaggtgaagaagatttattggagtactccgataacgaacaagaaattcaaattgatgcctctaaggccgctgaagctggagaaactggcgccgccacttctgcaactgaaggtgataataataacaacactgcagctggcgacaagaaaggttcctatgttggtatccattccaccggtttcaaagatttcttgctaaagccagaactatcaagagccatcattgactgtggttttgaacatccttctgaggtccagcaacataccattcctcagtcaattcatggtaccgatgtcttgtgtcaagcaaagtctggtttaggtaagacagctgtctttgtcttatccactctgcaacaattggaccctgttccaggtgaagttgccgttgttgtcatttgtaatgctagagaactggcctatcaaattcgtaacgagtatttgagattttccaaatatatgccagacgttaagacagcagtcttttacggtggtactccaatttctaaggatgctgaacttttaaagaataaagatactgctcctcacattgttgttgcaactccaggtcgtttaaaagcgttagtgagagaaaaatacattgatttgtcacacgtcaagaactttgtcatagatgaatgtgataaggttttagaagaattagacatgagaagagatgtgcaagaaattttcagagctactccaagagacaaacaagtcatgatgttttcagccacactttctcaagaaattagaccaatttgtagacgcttcttacagaatccattggaaattttcgtcgatgatgaagctaagctaaccttgcacgggttgcaacaatattatatcaaattagaagaacgtgaaaagaaccgtaaattggctcaattattagatgatttggagttcaatcaagtcattattttcgttaaatctaccacaagagctaatgagttgaccaaactattaaacgcctctaactttccggctatcaccgttcatggtcatatgaaacaagaagaacgtattgctcgttacaaggctttcaaagattttgaaaaacgtatttgcgtgtccacagatgtttttggtagaggtatcgatattgaacgtattaatttagccatcaattacgatttgactaatgaagctgaccaatatttacatcgtgtcggtagagctggtagatttggtactaagggtttggctatttcattcgtttcttcaaaggaagatgaggaagtcttggctaagatccaagagcgtttcgatgtcaaaatcgctgaattcccagaagaaggcattgatccgtccacttatttgaataattaa

SEQ ID NO: 66035 - protein, 446 aa, Saccharomyces cerevisiae
MSHEGEEDLLEYSDNEQEIQIDASKAAEAGETGAATSATEGDNNNNTAAGDKKGSYVGIHSTGFKDFLLKPELSRAIIDCGFEHPSEVQQHTIPQSIHGTDVLCQAKSGLGKTAVFVLSTLQQLDPVPGEVAVVVICNARELAYQIRNEYLRFSKYMPDVKTAVFYGGTPISKDAELLKNKDTAPHIVVATPGRLKALVREKYIDLSHVKNFVIDECDKVLEELDMRRDVQEIFRATPRDKQVMMFSATLSQEIRPICRRFLQNPLEIFVDDEAKLTLHGLQQYYIKLEEREKNRKLAQLLDDLEFNQVIIFVKSTTRANELTKLLNASNFPAITVHGHMKQEERIARYKAFKDFEKRICVSTDVFGRGIDIERINLAINYDLTNEADQYLHRVGRAGRFGTKGLAISFVSSKEDEEVLAKIQERFDVKIAEFPEEGIDPSTYLNN

SEQ ID NO: 66036 - DNA, 1275 bp, Drosophila melanogaster
  CDS (1)..(1275)
atggccgacaatgacgatcttttggactacgaggatgaggagcagaccgagaccactgcggtcgaaaaccaggaggcccccaagaaggatgtcaagggcacctatgtgtccattcacagttccggcttccgcgatttcctcctgaaaccggagatcctgcgcgccatcgtagactgcggcttcgagcatccctcggaggttcagcacgagtgcattccgcaggccgtactgggcatggacatcctctgtcaggccaagtccggcatgggtaagaccgccgtcttcgttctggccacgctgcagcagctggagccgtcggacaacaacacctgccacgtcctggtcatgtgccacacccgcgagctggccttccagatcagcaaggagtatgagcgattctccaagtacatgcccacagtcaaggtggctgtcttctttggcggaatggctattcaaaaggacgaggagaccctcaagagcggcaccccgcatattgtggtgggcacccctggccgaattctcgccctcattcgcaacaagaaacttaatctgaagcttttgaagcactttgtgctcgacgagtgcgacaagatgctggagcagctggatatgcgtcgtgacgttcaagagattttccgtagcacgccgcacggcaaacaagtgatgatgttctctgccacattgagcaaggacattcgtcccgtttgcaaaaagttcatgcaagatcccatggaggtctacgtcgacgatgaggccaagctgacgctgcacggactgcagcagcactacgtcaatctgaaggagaacgagaagaacaagaaactgttcgaactgctcgacgtgctcgagttcaatcaggtggtcatctttgtgaagtctgtgcaacgttgcgtggctctgtcgcagctgctgacggagcagaacttccccgccatcggcatccatcgtgggatgacccaggaggagcgtctgaatcgctaccagcagttcaaggacttccagaagcgcattctggtggccaccaatctctttggccgcggcatggacatcgagcgtgtgaacatcgtgttcaactacgacatgcccgaggattccgacacctacttgcatcgcgtggcccgtgccggtcgcttcggcaccaagggactggcgatcacattcgtttcggacgagaacgacgccaagatacttaacgaagtacaggatcgtttcgatgtgaacatcagtgagctgcccgaggaaatcgatctctctacatacattgagggacgctag

SEQ ID NO: 66037 - protein, 424 aa, Drosophila melanogaster
MADNDDLLDYEDEEQTETTAVENQEAPKKDVKGTYVSIHSSGFRDFLLKPEILRAIVDCGFEHPSEVQHECIPQAVLGMDILCQAKSGMGKTAVFVLATLQQLEPSDNNTCHVLVMCHTRELAFQISKEYERFSKYMPTVKVAVFFGGMAIQKDEETLKSGTPHIVVGTPGRILALIRNKKLNLKLLKHFVLDECDKMLEQLDMRRDVQEIFRSTPHGKQVMMFSATLSKDIRPVCKKFMQDPMEVYVDDEAKLTLHGLQQHYVNLKENEKNKKLFELLDVLEFNQVVIFVKSVQRCVALSQLLTEQNFPAIGIHRGMTQEERLNRYQQFKDFQKRILVATNLFGRGMDIERVNIVFNYDMPEDSDTYLHRVARAGRFGTKGLAITFVSDENDAKILNEVQDRFDVNISELPEEIDLSTYIEGR

SEQ ID NO: 66038 - DNA, 1521 bp, Staphylococcus aureus
  CDS (1)..(1521): transl_table=11
ttgcaaaattttaaagaactagggatttcggataatacggttcagtcacttgaatcaatgggatttaaagagccgacacctatccaaaaagacagtatcccttatgcgttacaaggaattgatatccttgggcaagctcaaaccggtacaggtaaaacaggagcattcggtattcctttaattgagaaagtagtagggaaacaaggggttcaatcgttgattttagcacctacaagagaattggcaatgcaggtagctgaacaattaagagaatttagccgtggacaaggtgtccaagttgttactgtattcggtggtatgcctatcgaacgccaaattaaagccttgaaaaaaggcccacaaatcgtagtcggaacacctgggcgtgttatcgaccatttaaatcgtcgcacattaaaaacggacggaattcatactttgattttagatgaagctgatgaaatgatgaatatgggattcatcgatgatatgagatttattatggataaaattccagcagtacaacgtcaaacaatgttgttctcagctacaatgcctaaagcaatccaagctttagtacaacaatttatgaaatcaccaaaaatcattaagacaatgaataatgaaatgtctgatccacaaatcgaagaattctatacaattgttaaagaattagagaaatttgatacatttacaaatttcctagatgttcatcaacctgaattagcaatcgtattcggacgtacaaaacgtcgtgttgatgaattaacaagtgctttgatttctaaaggatataaagctgaaggcttacatggtgatattacacaagcgaaacgtttagaagtattaaagaaatttaaaaatgaccaaattaatattttagtcgctactgatgtagcagcaagaggactagatatttctggtgtgagtcatgtttataactttgatatacctcaagatactgaaagctatacacaccgtattggtcgtacgggtcgtgctggtaaagaaggtatcgctgtaacgtttgttaatccaatcgaaatggattatatcagacaaattgaagatgcaaacggtagaaaaatgagtgcacttcgtccacctcatcgtaaagaagtacttcaagcacgtgaagatgacatcaaagaaaaagttgaaaactggatgtctaaagagtcagaatcacgcttgaaacgcatttctacagagttgttaaatgaatataacgatgttgatttagttgctgcacttttacaagagttagtagaagcgaacgatgaagttgaagttcaattaacttttgaaaaaccattatctcgcaaaggccgtaatggtaaaccaagcggttctcgtaacagaaatagtaagcgtggtaatcctaaatttgacagtaagagtaaacgttcaaaaggatactcaagtaagaagaaaagtacaaaaaaattcgaccgtaaagagaagagcagcggtggaagcagacctatgaaaggtcgcacatttgctgaccatcaaaaataa

SEQ ID NO: 66039 - protein, 506 aa, Staphylococcus aureus
MQNFKELGISDNTVQSLESMGFKEPTPIQKDSIPYALQGIDILGQAQTGTGKTGAFGIPLIEKVVGKQGVQSLILAPTRELAMQVAEQLREFSRGQGVQVVTVFGGMPIERQIKALKKGPQIVVGTPGRVIDHLNRRTLKTDGIHTLILDEADEMMNMGFIDDMRFIMDKIPAVQRQTMLFSATMPKAIQALVQQFMKSPKIIKTMNNEMSDPQIEEFYTIVKELEKFDTFTNFLDVHQPELAIVFGRTKRRVDELTSALISKGYKAEGLHGDITQAKRLEVLKKFKNDQINILVATDVAARGLDISGVSHVYNFDIPQDTESYTHRIGRTGRAGKEGIAVTFVNPIEMDYIRQIEDANGRKMSALRPPHRKEVLQAREDDIKEKVENWMSKESESRLKRISTELLNEYNDVDLVAALLQELVEANDEVEVQLTFEKPLSRKGRNGKPSGSRNRNSKRGNPKFDSKSKRSKGYSSKKKSTKKFDRKEKSSGGSRPMKGRTFADHQK

SEQ ID NO: 66040 - DNA, 1464 bp, Bacillus licheniformis
  CDS (1)..(1464): transl_table=11
ttgacaataacgtttcaagattttcaattaagttctgatctcacaaaagcaatcaagcgtatgggatttgaagaggcaacaccgattcaggcacaaacgattccactcggccttgcaaataaagatgtgatcggacaagcgcaaacgggaacaggaaaaacggctgcatttggcatcccccttgttgagaaaatcaaccccgagtctcctaacattcaagccattgttatcgcacctactcgtgaactagccattcaagtttctgaagagctatataaaattggacaggataaacgcgctcgcgtgctgccgatttacggaggacaggatatcggacgccagattcgcgcgcttaagaaaaaccctcatattatcgtcggcacacctggtcgtctgcttgaccatatcaaccgccgcacaatgcgtcttcaaacagtgaacaccgttgtgcttgatgaagcggatgaaatgctgaacatgggattcatcgaagatatcgaatccatcctttccaatgtgcctgctgaacaccagacattgctgttttctgcaacaatgcctgctccgattaagcggattgcagaacgtttcatgaccaacccggagcacgtaaaagtgaaagcaaaagaaatgacagtatcaaacatccagcagttctacctagaagttcatgaacgcaaaaagtttgatacgctgacacgccttcttgacatccagtctccggaattggcgatcgtattcggccggacaaagcgccgtgtcgatgaactgacagaagcgcttaatctgcgcgggtatacagctgaaggaattcacggagatttgacccaggcgaagcggatggttgcactccggaaatttaagcaaggcgcgattgaagtgctcgttgcgacagacgttgcggctcgcggccttgatatttcaggtgtaacgcacgtctacaacttcgatgtgccgcaagatcctgagagctatgttcaccgcatcggaagaacgggacgcgcgggcaaaacaggaatggcgatgaccttcattacaccgcgtgaaaaggatatgctgcgcgccatcgagcagacgacaaaacgcaaaatggaccgcatgaaagcaccgactctcgatgaggccattgaaggacagcagcaggtgacggttgaccgcatccggacgatcatcgaggaaaataacctgaacttctatatgacggctgcagcggaattattggaagaccatgattctgtgacagttgttgcggctgccattaaaatgatgactaaagagccggacaacacacctgtccgtttgacggaagaggctccgctcagaacgaagcgaaacaaaaatcaccaccaccgttcatcaaaacgcagagacggcggcggctacagaggaaagaacaatcgttcatcttatgataaaaagcgttcttcgaatgacagacgccaaaaaaaatcatataattcataa

SEQ ID NO: 66041 - protein, 487 aa, Bacillus licheniformis
MTITFQDFQLSSDLTKAIKRMGFEEATPIQAQTIPLGLANKDVIGQAQTGTGKTAAFGIPLVEKINPESPNIQAIVIAPTRELAIQVSEELYKIGQDKRARVLPIYGGQDIGRQIRALKKNPHIIVGTPGRLLDHINRRTMRLQTVNTVVLDEADEMLNMGFIEDIESILSNVPAEHQTLLFSATMPAPIKRIAERFMTNPEHVKVKAKEMTVSNIQQFYLEVHERKKFDTLTRLLDIQSPELAIVFGRTKRRVDELTEALNLRGYTAEGIHGDLTQAKRMVALRKFKQGAIEVLVATDVAARGLDISGVTHVYNFDVPQDPESYVHRIGRTGRAGKTGMAMTFITPREKDMLRAIEQTTKRKMDRMKAPTLDEAIEGQQQVTVDRIRTIIEENNLNFYMTAAAELLEDHDSVTVVAAAIKMMTKEPDNTPVRLTEEAPLRTKRNKNHHHRSSKRRDGGGYRGKNNRSSYDKKRSSNDRRQKKSYNS

SEQ ID NO: 66042 - DNA, 1317 bp, Bacillus subtilis
  CDS (1)..(1317): transl_table=11
atgaaagaaacgaaatttgaactttatgaattgaaaccatttattatagatgcagtacatcgccttggtttttacgaaccgactgatatccagaaaaggctgattcctgcagtgttaaaaaaagaaagcgtcatcggccagtctcagacgggtactggaaagactcacgcttatttactgcctttattaaacaaaatcgatcctgctaaggatgtcgttcaggtagtcattacggctccgacaagagagcttgccaaccagatttatcaggaagcgcttaaaatcacgcagggtgaagaaggaagtcagattcgctcgaaatgttttatcggaggcactgataaacaaaaatcaattgataaattgaaaatacagccgcatcttgttgtcggtacacctggacggattgctgacttaatcaaagaacaggcgttaagtgttcataaagcggaatctcttgttattgatgaagcggatttaatgctggacatgggattccttgcagatgtagattacatcggttcccgcatgcctgaggatctgcaaatgcttgtgttctcagcgaccataccggaaaagctgaaaccattcttgaagaaatacatggaaaatccgaaatacgcccatgtggagccaaaacaggtgactgctgcgaaaatcgagcatatcctcattccttcgaaacatcgtgacaaggacaagctcctttttgacatcatgtcgcatctgaatccatacctggggattgtgtttgccaacacgaaaaatacggctgaccatattgcccagtatctgactggcaaaggcatgaaaatcggcttgctgcacggcggattaacaccacgtgagcggaaaaaagtcatgaagcagatcaatgatttggaattcacatatatcattgcaactgaccttgccgcaagaggtattgatattaaaggtgtcagccatgttatcaactatgagctgccggatgatctcgatttctatgttcaccgtgtgggcagaacggctcgtgccggctcatcaggacaagcgatgaccatttatgagcttactgatgaggatgcattagtaagacttgaaaaaatgggcatcgaatttgagtacttagagcttgaaaagggcgaatggaaaaaaggcgatgaccgtcagcgccgcaaaaaacgtaaaaaaacgccgaatgaagcggatgaaattgctcatcgtctcgtgaaaaagccgaagaaggttaagcctgggtataaaaagaaaatgagctatgagatggagaaaatcaagaaaaaacagagaagaaaccaatctaagaaaagaaagtag

SEQ ID NO: 66043 - protein, 438 aa, Bacillus subtilis
MKETKFELYELKPFIIDAVHRLGFYEPTDIQKRLIPAVLKKESVIGQSQTGTGKTHAYLLPLLNKIDPAKDVVQVVITAPTRELANQIYQEALKITQGEEGSQIRSKCFIGGTDKQKSIDKLKIQPHLVVGTPGRIADLIKEQALSVHKAESLVIDEADLMLDMGFLADVDYIGSRMPEDLQMLVFSATIPEKLKPFLKKYMENPKYAHVEPKQVTAAKIEHILIPSKHRDKDKLLFDIMSHLNPYLGIVFANTKNTADHIAQYLTGKGMKIGLLHGGLTPRERKKVMKQINDLEFTYIIATDLAARGIDIKGVSHVINYELPDDLDFYVHRVGRTARAGSSGQAMTIYELTDEDALVRLEKMGIEFEYLELEKGEWKKGDDRQRRKKRKKTPNEADEIAHRLVKKPKKVKPGYKKKMSYEMEKIKKKQRRNQSKKRK

SEQ ID NO: 66044 - DNA, 1299 bp, Oryza sativa
  CDS (1)..(1299)
atgggcgaagctgaggtcaaggacaacgaggtgtacgaggaggatctcgtcgactacgaggaggaggtcgagaacggcgccgacggcggcgccgccgccgccaacgcctccgccgacgtcgtcaagaaggggtacgtggggatccacagctcggggttcagagacttcctgctcaagccggagctgcttcgcgccatccaggactgcgggtttgagcacccttccgaagtgcaacacgaatgcatcccacaagccattcttggaatggatgtcatctgccaagcaaaatctgggatggggaagactgctgtttttgttctctcaagtcttcagcaaattgatcctgttgctggtcaagttggtgcacttgtgctatgtcacacaagggagctagcttaccagatttgccatgaatttgagaggtttagcaagtaccttcctgaggtaaaagttgctgtcttctatggtggcgttcacataaaaaaacacaaggatctgttgaagaatgactgccctcatattgtggttggaacacctggaaggatacttgctctagctagagaaaaggatctttccttgaagaatgtgaggcatttcattcttgatgaatgtgacaagatgctcgattcgcttgatatgcgtagagatgtgcaggagatcttcaaaatgacaccccatgataagcaagtgatgatgttttcagcgacccttagcaaggagatccgcccagtttgcaagaaattcatgcaagatcctatggaaatttatgttgatgatgaggctaaactgacccttcacgggcttgttcagcactatataaaactaagtgaggcggagaagaaccggaaattgaatgatctcttagatgcacttgacttcaatcaagttgtgatatttgttaaaagtgttagtagagctgcagaactgaacaagctgctttgtgaatgcaactttcctgcgatctccatacattctggaatgacacaggaggagaggctgacccggtacaagaacttcaaggaaggacacaagaggattcttgtggctactgatttagttggcaggggaattgatattgaacgtgtcaacattgtcataaactatgacatgcccgattctgctgactcgtatttgcacagggttggaagggctggacgttttggaaccaaaggacttgcaataacatttgtttcctctgcctcagactctgatgttcttaatcaagtgcaagaaagattcgaggttgacataaaggagcttcctgagcagattgatacttcgacatatatgccttcgtaa

SEQ ID NO: 66045 - protein, 432 aa, Oryza sativa
MGEAEVKDNEVYEEDLVDYEEEVENGADGGAAAANASADVVKKGYVGIHSSGFRDFLLKPELLRAIQDCGFEHPSEVQHECIPQAILGMDVICQAKSGMGKTAVFVLSSLQQIDPVAGQVGALVLCHTRELAYQICHEFERFSKYLPEVKVAVFYGGVHIKKHKDLLKNDCPHIVVGTPGRILALAREKDLSLKNVRHFILDECDKMLDSLDMRRDVQEIFKMTPHDKQVMMFSATLSKEIRPVCKKFMQDPMEIYVDDEAKLTLHGLVQHYIKLSEAEKNRKLNDLLDALDFNQVVIFVKSVSRAAELNKLLCECNFPAISIHSGMTQEERLTRYKNFKEGHKRILVATDLVGRGIDIERVNIVINYDMPDSADSYLHRVGRAGRFGTKGLAITFVSSASDSDVLNQVQERFEVDIKELPEQIDTSTYMPS

SEQ ID NO: 66046 - DNA, 1245 bp, Oryza sativa
  CDS (1)..(1245)
atggcaggaatggcacccgaaggctcccagtttgatgctaagcactatgacagcaagatgcaggaactactgcaccaaggtgacaatgaggaattcttcacttcatatgatgaagtttttgagagttttgatgacatgggcctccaagagaaccttctcagaggcatctatgcttatggttttgagaagccatcagctattcagcaaagggggattgttcccttctgcaaagggcttgatgtgattcagcaggctcaatctggaacaggaaaaactgctaccttctgttctgggatcctgcagcaacttgactatggattggtggagtgccaatccctggtccttgcaccaacacgtgagcttgcccagcaaattgaaaaggtcatgcgtgctcttggtgactacttaggtgtcaaggtgcatgcctgtgttggtggaacctctgtccgtgaggaccaaaggattcttgctagtggtgtgcatgttgttgttggcacacctggacgtgtgtttgacatgctacgtcggcaatctctccgcccagaccacattaagatgtttgtgctggatgaagctgatgagatgctctcccgtggtttcaaggatcagatctatgatatcttccagctccttccaccaaagatccaggtcggagtgttctctgctaccatgcctcctgaggcccttgagatcacccgcaagttcatgaacaagcccgtgaggattcttgtgaagagagatgagcttacccttgagggtatcaagcaattctacgtcaatgtggagaaggaagattggaagctcgacactctttgtgacttgtatgagacactggccatcacccagagtgtcatctttgtgaacacccgccgcaaggtggactggctcaccgacaagatgaggagcagggaccacactgtctctgccacacatggagacatggaccagaacactagggacatcatcatgagggagttccgatctggttcttcccgtgtgcttatcaccactgatctgcttgctcgtggtatcgatgtccagcaagtctcccttgtcatcaactacgacctgcccacccagcctgagaactacctccatcgcattggtcgtagtggtcggtttggcaggaagggagttgccattaactttgtcacccgcgatgatgagaggatgctgttcgacatccagaggttctacaatgtgaccatcgaggagctgccggccaacgtcgctgaccttctctag

SEQ ID NO: 66047 - protein, 414 aa, Oryza sativa
MAGMAPEGSQFDAKHYDSKMQELLHQGDNEEFFTSYDEVFESFDDMGLQENLLRGIYAYGFEKPSAIQQRGIVPFCKGLDVIQQAQSGTGKTATFCSGILQQLDYGLVECQSLVLAPTRELAQQIEKVMRALGDYLGVKVHACVGGTSVREDQRILASGVHVVVGTPGRVFDMLRRQSLRPDHIKMFVLDEADEMLSRGFKDQIYDIFQLLPPKIQVGVFSATMPPEALEITRKFMNKPVRILVKRDELTLEGIKQFYVNVEKEDWKLDTLCDLYETLAITQSVIFVNTRRKVDWLTDKMRSRDHTVSATHGDMDQNTRDIIMREFRSGSSRVLITTDLLARGIDVQQVSLVINYDLPTQPENYLHRIGRSGRFGRKGVAINFVTRDDERMLFDIQRFYNVTIEELPANVADLL

SEQ ID NO: 66048 - DNA, 1527 bp, Oryza sativa
  CDS (1)..(1527)
atggatccgcgcgccaggtaccctcccggcatcggcaacggccgcggcgggaaccccaactactacaaccgcggcccgccgctgcagcagcagcacaaccaccaccagcagcagcagacgtcggcgccgcaccaccagcagtacgtgcagcgccagccgcagcagcatcaccaccacaaccaccaccagcagcatcagcaacagcagcagcagtggctgcggcggaatcagatcgcccgcgaggccgcgggaaccgacaggaatagcgagccgaaggctgtggcgcaatccccagccgtcgacggcatcgattcgagttcacaagactggaaggcccaattgaagcttccacctcaagatacacgatacaggacagaggatgttacagccaccaaaggaaatgagtttgaagactattttctcaagcgtgaacttctgatgggaatatatgagaaaggatttgaaagaccctctccgatccaagaagaaagcattcctattgcattaactggtagtgatattctagccagagcaaaaaatggaactggcaagactgctgcattttgtatccctgcactagaaaagattgatcaagagaaaaacgctattcaagttgttatattggttcccacaagggagctggctttgcaaacgtcacaagtttgtaaagagcttgggaaacatctgaagatccaggtcatggtcaccactggaggaaccagcctgaaagatgatatcattcgtctctatcaacctgtccatttacttgttggaacgcctgggcgtattttggaccttacaaagaaaggtatctgcattttgaaggactgctctatgcttatcatggatgaggcagacaagcttctctctcctgagttccagccttccgtggaacagctgattcgttaccttccagcgagccggcaaattttgatgttctcggcaacgttccctgtgactgtgaaggagttcaaggacaaatacctgcctaaaccttatgttattaaccttatggatgaacttacactgaagggaattacacagttttatgcttttgtagaagaaaggcagaaagttcattgccttaacactctcttttccaagcttcaaatcaaccaatcaataatcttctgcaactctgtaaatcgtgttgagcttctggcaaagaagatcacggagcttggttactcttgcttctacatccatgcaaagatgctgcaagaccatcgtaatagagttttccatgatttccgtaatggggcatgcaggaacctggtttgtacagatcttttcacaaggggaattgacattcaagctgttaatgttgttatcaattttgatttccccaaaaccgctgaaacatacctccacagggttggtagatctgggagatttggccatcttggcctggctgtgaatttgatcacctatgaggatcggtttaacttgtataggattgagcaagagcttgggactgagataaaaccaattcctcctcagattgaccaagctatatattgccaataa

SEQ ID NO: 66049 - protein, 508 aa, Oryza sativa
MDPRARYPPGIGNGRGGNPNYYNRGPPLQQQHNHHQQQQTSAPHHQQYVQRQPQQHHHHNHHQQHQQQQQQWLRRNQIAREAAGTDRNSEPKAVAQSPAVDGIDSSSQDWKAQLKLPPQDTRYRTEDVTATKGNEFEDYFLKRELLMGIYEKGFERPSPIQEESIPIALTGSDILARAKNGTGKTAAFCIPALEKIDQEKNAIQVVILVPTRELALQTSQVCKELGKHLKIQVMVTTGGTSLKDDIIRLYQPVHLLVGTPGRILDLTKKGICILKDCSMLIMDEADKLLSPEFQPSVEQLIRYLPASRQILMFSATFPVTVKEFKDKYLPKPYVINLMDELTLKGITQFYAFVEERQKVHCLNTLFSKLQINQSIIFCNSVNRVELLAKKITELGYSCFYIHAKMLQDHRNRVFHDFRNGACRNLVCTDLFTRGIDIQAVNVVINFDFPKTAETYLHRVGRSGRFGHLGLAVNLITYEDRFNLYRIEQELGTEIKPIPPQIDQAIYCQ

SEQ ID NO: 66050 - DNA, 1215 bp, Oryza sativa
  CDS (1)..(1215)
atggcggcggccaccacgtcccggcgcggccccggcgccatggacgacgagaacctcaccttcgagacctcccccggggtcgaggtcatcagcagcttcgaccagatggggatccgcgaggacctcctccgcggcatctacgcctacggcttcgagaagccctccgccatccagcagcgcgccgtcctccccatcatcagcggccgcgacgtcatcgcccaggcccagtccggaaccggcaagacctccatgatctcgctctccgtctgccagatcgtcgacaccgccgtccgagaggttcaggccttgatactctcaccaactagagaacttgctgcacaaacagaaagagttatgctggccattggtgattacatcaatatccaagtgcatgcttgtattggtggcaaaagtattggtgaggatattagaaagcttgagcatggagtgcatgttgtgtcaggaacacctggcagagtctgtgatatgatcaagagaaggaccttgcgtacaagagccattaagctcctaattctggatgaagccgatgagatgttgggcagaggctttaaggatcagatatatgatgtctacagatatctacccccagagctccaggtttgcttgatctccgcaactctgccacatgagatcttggaaatgaccagcaagttcatgactgacccagtccggatccttgtaaagcgtgatgaattgaccctagagggcatcaaacaattctttgttgctgttgagaaagaagaatggaagtttgatactctttgtgatctttatgatacactgacaatcacccaagctgtcattttctgcaacacgaagagaaaggttgattggcttacagaaagaatgcgcagcaataacttcacggtatcagctatgcatggtgacatgcctcaaaaggaaagggatgccattatgggtgaattcaggtctggtgcaacccgtgttctaattacgacagatgtgtgggctcgaggcctggatgttcagcaggtctctcttgtcataaactatgatcttccaaataatcgtgaactttacatccatcgcattggtcgctctggacgttttggtcgcaagggtgtggccatcaattttgtcaaaaaggaagacatccgtatcctgagagatattgagcagtactacagcacacagattgatgaaatgccaatgaatgttgctgatctaatttga

SEQ ID NO: 66051 - protein, 404 aa, Oryza sativa
MAAATTSRRGPGAMDDENLTFETSPGVEVISSFDQMGIREDLLRGIYAYGFEKPSAIQQRAVLPIISGRDVIAQAQSGTGKTSMISLSVCQIVDTAVREVQALILSPTRELAAQTERVMLAIGDYINIQVHACIGGKSIGEDIRKLEHGVHVVSGTPGRVCDMIKRRTLRTRAIKLLILDEADEMLGRGFKDQIYDVYRYLPPELQVCLISATLPHEILEMTSKFMTDPVRILVKRDELTLEGIKQFFVAVEKEEWKFDTLCDLYDTLTITQAVIFCNTKRKVDWLTERMRSNNFTVSAMHGDMPQKERDAIMGEFRSGATRVLITTDVWARGLDVQQVSLVINYDLPNNRELYIHRIGRSGRFGRKGVAINFVKKEDIRILRDIEQYYSTQIDEMPMNVADLI

SEQ ID NO: 66052 - DNA, 1497 bp, Oryza sativa
  CDS (1)..(1497)
atggatccgcgcgcgaggtaccctcccggcatcggcaacggccggggcgggaaccctaactactacggccgtggcccaccgccatcgcagcatcagcagcaccagcaccagcaccagcagccgccgcacccgcaccaccaccagtacgtgcagcggcagccgcagccgcagcaaacgccgcacaacagccagcatcagcagtggcttcggcggaaccagatcgccgccgaggccgcgggcgccagcgagcagaaggcgccgcctgtcgcggacggcatagattcgagttcacaagactggaaggcccaactgaagctcccaccgcaagatacacgctacaggacagaggatgttactgctaccaagggaaatgaatttgaagactattttctgaagcgagaactccttatggggatatatgagaaaggatttgaaagaccttctcctatacaagaagaaagtattcctattgcattaactggcagtgatattcttgcaagagcaaaaaatggaactggcaagactgctgcattttgtatacccgcgctggaaaagattgatcaagacaaaaatgctattcaagttgttatattggttcccacaagggaattggctctacaaacatcacaagtttgcaaggagcttgggaaacatttgaagattcaagtgatggtcactactggaggaaccagcctaaaggatgatattgtccgtctttatcaacctgttcatttacttgttggaactcctggtcgcattttagaccttacaaagaaaggtgtctgcgtcctgaagaactgttcaatgcttgttatggatgaggcagacaagcttctttctcctgagttccaaccgtctattcaggaattgattcggtatcttccatcgaatcggcaaattttgatgttctctgcaacattccctgtgactgtcaaggagttcaaggacaaatatctccctaaaccctatgtcattaaccttatggatgaacttacattgaagggaattacacagttttatgcttttgttgaagagaggcagaaagtccactgtcttaatactcttttttccaagctgcaaattaatcaatcgataatattctgtaactcggtaaatcgtgttgaactattggcaaagaagatcacagagcttggttattcttgcttctatatccatgctaaaatgttgcaagaccatcggaacagggttttccatgattttcgcaatggtgcatgcaggaacttggtttgtacagatctttttacaaggggaatagatatccaagctgttaatgttgttatcaattttgatttccccaagagcgcagaaacatatctccatagggttggtagatctggcagattcggccaccttggtttggctgtgaatttgatcacctatgaggaccgttttaacttgtatcgcattgaacaagagcttggaaccgagataaaaccaataccacctcagatagaccgagcaatatattgccaatag

SEQ ID NO: 66053 - protein, 498 aa, Oryza sativa
MDPRARYPPGIGNGRGGNPNYYGRGPPPSQHQQHQHQHQQPPHPHHHQYVQRQPQPQQTPHNSQHQQWLRRNQIAAEAAGASEQKAPPVADGIDSSSQDWKAQLKLPPQDTRYRTEDVTATKGNEFEDYFLKRELLMGIYEKGFERPSPIQEESIPIALTGSDILARAKNGTGKTAAFCIPALEKIDQDKNAIQVVILVPTRELALQTSQVCKELGKHLKIQVMVTTGGTSLKDDIVRLYQPVHLLVGTPGRILDLTKKGVCVLKNCSMLVMDEADKLLSPEFQPSIQELIRYLPSNRQILMFSATFPVTVKEFKDKYLPKPYVINLMDELTLKGITQFYAFVEERQKVHCLNTLFSKLQINQSIIFCNSVNRVELLAKKITELGYSCFYIHAKMLQDHRNRVFHDFRNGACRNLVCTDLFTRGIDIQAVNVVINFDFPKSAETYLHRVGRSGRFGHLGLAVNLITYEDRFNLYRIEQELGTEIKPIPPQIDRAIYCQ

SEQ ID NO: 66054 - DNA, 1245 bp, Oryza sativa
  CDS (1)..(1245)
atggcgggaatggcaccagagggatcccagtttgatgctaagcactatgattctaaaatgcaggagcttctgaaccaaggtgaaaccgaggagttcttcacatcttatgatgaagttcatgagagttttgatgacatgggtctccaagagaaccttctcagaggcatctatgcctatggtttcgagaagccttcagccattcagcaaaggggtattgtccctttctgcaagggtcttgatgtgattcagcaagctcagtcaggaacaggaaagactgccaccttctgttctggaattttgcagcaacttgactatgctgtggttgagtgccaggccttggtccttgctcctactcgtgagcttgcacagcaaattgagaaagtcatgcgcgcacttggtgactatctgggtgtgaaggttcatgcttgtgttggaggtacttctgttcgtgaggaccaaaggattcttgcaagtggagtgcatgttgttgttggaacacctggtcgtgtgtttgacatgctgcgtaggcagtccctccgtcctgattacatcaagatgtttgtccttgatgaagctgatgaaatgctttctcgtggtttcaaggatcagatttatgatatcttccagctcctcccgtcaaagatccaagttggtgtgttctctgctacaatgccccctgaggcccttgagatcacccgtaaattcatgaacaagcctgtgcggatccttgtgaagagggatgagctcactcttgagggtatcaaacagttttatgtcaatgtggagaaggaagaatggaagcttgacacactctgtgacctgtatgagacactggccatcacgcagagtgtcatctttgtgaacacccgccgcaaggtggactggctcactgataagatgaggggcagggatcacacagtttctgctacccatggtgacatggaccagaacactagggacatcatcatgagggagttccgatctggttcttcccgtgtgctcattaccacggaccttcttgcccgtggtattgatgtccagcaggtgtcccttgtcatcaactatgatctgccgacccaacctgagaactacctgcatcgcattggtcgtagtggtcgttttggtaggaaaggtgttgccattaactttgtgacccgtgacgatgagaggatgctgtttgacatccagaggttctacaatgtggtgattgaggagctgccggccaacgtcgctgaccttctgtga

SEQ ID NO: 66055 - protein, 414 aa, Oryza sativa
MAGMAPEGSQFDAKHYDSKMQELLNQGETEEFFTSYDEVHESFDDMGLQENLLRGIYAYGFEKPSAIQQRGIVPFCKGLDVIQQAQSGTGKTATFCSGILQQLDYAVVECQALVLAPTRELAQQIEKVMRALGDYLGVKVHACVGGTSVREDQRILASGVHVVVGTPGRVFDMLRRQSLRPDYIKMFVLDEADEMLSRGFKDQIYDIFQLLPSKIQVGVFSATMPPEALEITRKFMNKPVRILVKRDELTLEGIKQFYVNVEKEEWKLDTLCDLYETLAITQSVIFVNTRRKVDWLTDKMRGRDHTVSATHGDMDQNTRDIIMREFRSGSSRVLITTDLLARGIDVQQVSLVINYDLPTQPENYLHRIGRSGRFGRKGVAINFVTRDDERMLFDIQRFYNVVIEELPANVADLL

SEQ ID NO: 66056 - DNA, 1566 bp, Oryza sativa
  CDS (1)..(1566)
atgcaccaccccagggcgcgctacccgcccggctacacctccggcggcggcggcggaggcggaggcggaggaggaggcggccgtggtaatggcggcggcggatttggaggaggtggcggcggcggcggcgggaaccacggctactacggccggggtccgcagccgcagccgcagcagcagcactaccaccaccaggcgcagcagctgcatcagcatcagcagcagcagcagcacgcgcagaggaacagctcctcgcagcagcagcagtggctgcggcgggaccaggccacggcggcggctgcgtccggggaggtcgcggcgaggacggcggcgcagctggaagccgtcgactcgagctctgaagattggaaggcacaattgaatttgccagctccagatacacgttataggacagaggatgtcactgcaacgaaaggcaacgagtttgaggattactttttgaaacgtgaactactaatgggaatatatgagaaaggattcgaaaggccatcacctattcaggaagaaagcattccaatagctctgactggtagcgatattcttgcaagagctaaaaacggcactggcaagactgccgcattttgcattcccgcacttgaaaaaattgatccagagaaaaatgccatacaagttgttatattggtaccaacacgggaactagctctgcagacctcacaagtttgtaaagagcttgggaagtatctgaatattcaagttatggttagtactggtggaaccagcttaaaggatgacattatgcgtttgtatcaacctgttcatttacttgttgggacacctggtcggatactagatctaactaggaagggcatctgtgtgctgaaggattgttcaatgctcgtaatggatgaggcagacaaactgttagctccagagtttcagccttccatagagcaactcatccatttccttccagctaatcgtcaactattgatgttttcagcaacctttccagtaaccgttaaggatttcaaagagaaatacctacctaggccttatgttattaatctcatggatgaactaacactaaagggaattacacaatactatgctttcgtggaagaaagacagaaagttcactgtctgaatacacttttctcgaagcttcaaataaaccagtccattatattctgtaactctgttaacagagttgagctactggctaagaaaatcaccgagcttggctattcatgcttctacattcatgcaaaaatgttgcaagaccatcgaaaccgagtgtttcatgattttcgcaatggtgcttgcagaaaccttgtgtgcacagatctgtttacaagaggaattgacatccaagctgtgaatgttgtcattaattttgacttccctaagacttctgaaacatacttgcatagggttggtcgttcagggagatttggacaccttggtttggcggtgaacttaatcacttatgaggaccgtttcaacttgtatcggattgagcaagaacttgggacagaaataaaaacgatacccccacaaatcgatctggcagtgtattgtcaatga

SEQ ID NO: 66057 - protein, 521 aa, Oryza sativa
MHHPRARYPPGYTSGGGGGGGGGGGGGRGNGGGGFGGGGGGGGGNHGYYGRGPQPQPQQQHYHHQAQQLHQHQQQQQHAQRNSSSQQQQWLRRDQATAAAASGEVAARTAAQLEAVDSSSEDWKAQLNLPAPDTRYRTEDVTATKGNEFEDYFLKRELLMGIYEKGFERPSPIQEESIPIALTGSDILARAKNGTGKTAAFCIPALEKIDPEKNAIQVVILVPTRELALQTSQVCKELGKYLNIQVMVSTGGTSLKDDIMRLYQPVHLLVGTPGRILDLTRKGICVLKDCSMLVMDEADKLLAPEFQPSIEQLIHFLPANRQLLMFSATFPVTVKDFKEKYLPRPYVINLMDELTLKGITQYYAFVEERQKVHCLNTLFSKLQINQSIIFCNSVNRVELLAKKITELGYSCFYIHAKMLQDHRNRVFHDFRNGACRNLVCTDLFTRGIDIQAVNVVINFDFPKTSETYLHRVGRSGRFGHLGLAVNLITYEDRFNLYRIEQELGTEIKTIPPQIDLAVYCQ

SEQ ID NO: 66058 - DNA, 1785 bp, Brassica napus
  CDS (1)..(1785)
atggattcatcatcgtcgaacacaaacaaagcgttaacggagacgcgtttctccgacctcgaacctccgctctccgaagacatcatcgaggccctcgaacggtccggtttcaagttctgcactccggttcaagccgcgacgatccctttgctctgccgccacaaggatgtcgccgtcgacgccgccaccggctcgggaaaaaccctagctttcgtcttacccttaatagagattctccgtcgctccacctcttaccctcccaagcctcaccaggttatgggagtgattatatcgccaacgagagagctatcaacgcagatatacaacgtggcacagccatttgtctccactttgccaaatgtgaactctgtgctgctcgttggaggccgtgaggtgaagtccgacatgagcactatagaagaaggaggatgcaatctcttgatcggcactcctggaaggctctctgacataatggaacgaatggagattcttgatttcagaaaccttgagattcttatcttagatgaagcagataggcttttggagatgggattccagaagcaggtgaacagcattatatctcgcttgccgaagcagcggaggactggtctcttttcagctacacagaccgaaggtgttgaggagcttgccaaggctgggcttaggaaccctgtgagagttgaagttcgagctgagtcaaagtctgaatcatcatcccagcaattaacaaactccaaagtgccttctggtcttcaccttgagtatttggtatgcgaagcagataagaagtcatcacagctagtggatctcctcgttgagaatgcaaagaagaaacttatagtatactttatgacttgtgcttctgttgattactggggactagtactttcgaaagtccctgccttgaagtccatttctttgatccctatccatggagatatgaagcagaatgcaagagacaaggcgttagcttcgtttactgaagcatcaagcggtgtccttttgtgcactgatgtggctgcacgtggactagatattccggggattgattacgttgttcagtatgatcctccacaagacccaaatatgttcaaccatagagttggcagaactgcgagattgggaaaagaaggaagggccatcgtttttttactgcctgaggaagaagattatgtagagtttatgcggagaagaggggtcccttgtcaagagaaaaatttatctgaggaagcatctgacgtcatcccaataatacggtcactagccatgaaggacagggcagtgttggagaagggactaaaggcgtttgtttcctttgtccgtggttataaggagcatcactgctcttacattttcagatggaaaagcctagaaataggaaagttagcaatgggatatggactcttgtatcttccttcaatgtctgaagtcaaacaacacagactctccagtgagggtttcacacctgttacagacgtcaagtttgaggacatcaagttcaaggacaaatctagggaaaagcaaaggaagcagaacatgcaagcaaggaaagagaaacggcaacaagagaaaaaggagaaaggcaagaagaactcgaaaaaggcggttgttgctgctgccacagattctaacaaaaggaagttaacaggaaaacagagacagaccatccaaacagcggaagacgaagaggagatggctcgagattatcggttacttaagaaactcaagaaaggttctattaaagaagatgattttgctaaacttacaggagctgatgacttttaa

SEQ ID NO: 66059 - protein, 594 aa, Brassica napus
MDSSSSNTNKALTETRFSDLEPPLSEDIIEALERSGFKFCTPVQAATIPLLCRHKDVAVDAATGSGKTLAFVLPLIEILRRSTSYPPKPHQVMGVIISPTRELSTQIYNVAQPFVSTLPNVNSVLLVGGREVKSDMSTIEEGGCNLLIGTPGRLSDIMERMEILDFRNLEILILDEADRLLEMGFQKQVNSIISRLPKQRRTGLFSATQTEGVEELAKAGLRNPVRVEVRAESKSESSSQQLTNSKVPSGLHLEYLVCEADKKSSQLVDLLVENAKKKLIVYFMTCASVDYWGLVLSKVPALKSISLIPIHGDMKQNARDKALASFTEASSGVLLCTDVAARGLDIPGIDYVVQYDPPQDPNMFNHRVGRTARLGKEGRAIVFLLPEEEDYVEFMRRRGVPCQEKNLSEEASDVIPIIRSLAMKDRAVLEKGLKAFVSFVRGYKEHHCSYIFRWKSLEIGKLAMGYGLLYLPSMSEVKQHRLSSEGFTPVTDVKFEDIKFKDKSREKQRKQNMQARKEKRQQEKKEKGKKNSKKAVVAAATDSNKRKLTGKQRQTIQTAEDEEEMARDYRLLKKLKKGSIKEDDFAKLTGADDF

SEQ ID NO: 66060 - DNA, 1245 bp, Zea mays
  CDS (1)..(1245)
atggcaggaatggcacctgagggttctcagttcgatgctaagcactatgattctaagatgcaggagctgctgagcaccggtgagactgaggagttcttcacttcatatgatgaagtttttgagagttttgatgatatgggcctccaagagaatcttctgagaggcatttatgcttatggttttgagaagccatctgcaattcagcagagaggaattgttcccttctgcaagggtcttgatgtcattcagcaagcacaatctggtacaggaaagacagcaaccttctgttctgggatcttgcagcagctggactatggcctggttgaatgccaggccctggtccttgctcccacccgtgagcttgcacagcaaatcgagaaagtcatgcgcgcgcttggtgattaccttggtgttaaggtccatgcatgtgtgggaggaacatccgtccgtgaggaccaaaggattcttggcagtggtgtgcatgttgttgttggtacacctggtcgtgtgtttgatatgctgcgcagacagtccctccgccctgataacatcaagatgtttgttctagatgaagctgatgaaatgctttctcgtggtttcaaggatcagatttacgacatcttccagcttctcccagccaagattcaggttggagtcttctctgctaccatgccccctgaggcccttgagattacccgcaagttcatgaacaagccagtgagaatcctcgtgaagagagatgagctgactcttgagggtatcaagcagttctatgtgaatgtggataaggaagactggaagctggacacactgtgtgacctgtacgagacccttgccatcacccagagtgtcatctttgtcaacacccgccgcaaggtggactggctcactgacaagatgaggagcagggaccacactgtttctgccactcatggtgacatggaccagaacactagagacatcatcatgagggagttccggtctggctcctcccgtgtgctcatcaccaccgacctgcttgctcgtggtattgatgttcagcaggtgtccctggtcatcaactatgatctccccacccagccagagaattacctgcatcgcattggtcgtagtggtcgtttcggtaggaagggtgttgccatcaactttgtgacccgcgacgacgagcggatgctgttcgacatccagaagttctacaacgtgttgattgaggagctgcctgccaacgtcgctgaccttctgtga

SEQ ID NO: 66061 - protein, 414 aa, Zea mays
MAGMAPEGSQFDAKHYDSKMQELLSTGETEEFFTSYDEVFESFDDMGLQENLLRGIYAYGFEKPSAIQQRGIVPFCKGLDVIQQAQSGTGKTATFCSGILQQLDYGLVECQALVLAPTRELAQQIEKVMRALGDYLGVKVHACVGGTSVREDQRILGSGVHVVVGTPGRVFDMLRRQSLRPDNIKMFVLDEADEMLSRGFKDQIYDIFQLLPAKIQVGVFSATMPPEALEITRKFMNKPVRILVKRDELTLEGIKQFYVNVDKEDWKLDTLCDLYETLAITQSVIFVNTRRKVDWLTDKMRSRDHTVSATHGDMDQNTRDIIMREFRSGSSRVLITTDLLARGIDVQQVSLVINYDLPTQPENYLHRIGRSGRFGRKGVAINFVTRDDERMLFDIQKFYNVLIEELPANVADLL

SEQ ID NO: 66062 - DNA, 2196 bp, Glycine max
  CDS (1)..(2196)
atgtttagactccaagtctcacttcaacaacgtcctcgagcccaccaacgccactccactgggccgggcctcaagcccacaccgactactttcgtcccctccgccgtcgccacgcccaattcctccctcctcagcgaagaagccttcaaaggacttggccgcgacttcgacgaattcgaccacgcctccgattccgactccgccgccgaatccgttcaccccgacgagcttgacatttccaagctcgacttgccctcgcgcctcgtcgagtctctccagagccgtggaattactcaacttttccccattcagagagcggtgttagtacctgcactagaaggtagagatatcattgcgcgagccaagaccggtaccggaaagacgttagcgttcggaattcctattattaaaggcctcactgaagatgaacacgcaccttctcacaggaggtctggtaggcttccgagatttttggtgcttgcgcctacgagagagttggcgaagcaagtggagaaggagataaaggaatctgcgccttacctgagcactgtttgtgtttacggtggtgtttcttatgttactcagcagggtgcgctttcgcgtggtgttgacgtggtggttgggacaccagggagaataattgacttgataaacgggaacagccttaagctcagtgaggttcagtatttggttctcgatgaagcggaccagatgcttgctgttgggtttgaggaagacgtggaaatgattctagagaatcttccagctcaaaggcagagcatgcttttctctgctaccatgcccagttgggtgaagaagttggcgagaaaatatttgaacaatccactcacaattgatttggttggtgatgaagaggaaaagcttgctgaagggataaaactttatgctatagcagccactgccacttcaaagcggacaattctttctgatcttgtaactgtttacgcaaagggtgggaagactatagtttttacacagacaaaaagagatgctgatgaagtatcattgtcattaacaaatagtataatgtctgaagcactgcatggtgatatatctcagcatcagagagagagaacactgaatggtttccgtcaaggaaaattcacagtgcttgttgccactgatgttgcagctcgtggactggatattcccaatgttgatttgattatccattatgagcttcccaatgatcctgagacttttgtgcatcgctctggtcgtactgggcgtgctggaaaacaaggtaatgccattctgctgtacaccagtagccagaggagaacagttagatccctcgaacgtgatgtcggatgcaagtttgaatttgttagtgcaccggctatggaagaggttttggagtcatctgctgagcaggttgttgccacacttggtggagttcatcctgagtctgttcagtttttcaccccaactgcacagagactgatcgaagaacaaggaacaagtgcccttgcagctgcactcgcacaactgagtggattttcccgaccaccatcatcccggtctcttatcacccatgaacagggatggattacattgcaactaactcgagattcagatagtagaagatatttttcagcaagatcaatcactgggtttctttctgatgtttatcctgcagctgctgatgaagttggaaaaatccatttaattgcagatgaaaaggttcaaggagctgtttttgatcttcctgaggagattgctaaagaattacttaatagggacataccacctggaaacaccgtttccaagatcaccaagctacctcctttgcaagatgatgggcctccaagtgatttctatgggaggttctctgacagagatagaagtagccgaagaggttctacttctaggggaggttccgcttctagggaccggagaggttttaaatcctcacggggctgggatgtggaagactccggtgatgactttggtgatcaatccagtaggagaggtggtagaaattttaaaactggcaacagctggtctcgagcagcaggtaaaagcagtggcgatgattggctaattggaggtggtagacgatcaagcaggccttcatcatcagacagatttggagggacctgttttaattgcggggaatctgggcatcgtgcatcagattgtccaaacgtttcaaacagacgaagctttttttaa

SEQ ID NO: 66063 - protein, 731 aa, Glycine max
MFRLQVSLQQRPRAHQRHSTGPGLKPTPTTFVPSAVATPNSSLLSEEAFKGLGRDFDEFDHASDSDSAAESVHPDELDISKLDLPSRLVESLQSRGITQLFPIQRAVLVPALEGRDIIARAKTGTGKTLAFGIPIIKGLTEDEHAPSHRRSGRLPRFLVLAPTRELAKQVEKEIKESAPYLSTVCVYGGVSYVTQQGALSRGVDVVVGTPGRIIDLINGNSLKLSEVQYLVLDEADQMLAVGFEEDVEMILENLPAQRQSMLFSATMPSWVKKLARKYLNNPLTIDLVGDEEEKLAEGIKLYAIAATATSKRTILSDLVTVYAKGGKTIVFTQTKRDADEVSLSLTNSIMSEALHGDISQHQRERTLNGFRQGKFTVLVATDVAARGLDIPNVDLIIHYELPNDPETFVHRSGRTGRAGKQGNAILLYTSSQRRTVRSLERDVGCKFEFVSAPAMEEVLESSAEQVVATLGGVHPESVQFFTPTAQRLIEEQGTSALAAALAQLSGFSRPPSSRSLITHEQGWITLQLTRDSDSRRYFSARSITGFLSDVYPAAADEVGKIHLIADEKVQGAVFDLPEEIAKELLNRDIPPGNTVSKITKLPPLQDDGPPSDFYGRFSDRDRSSRRGSTSRGGSASRDRRGFKSSRGWDVEDSGDDFGDQSSRRGGRNFKTGNSWSRAAGKSSGDDWLIGGGRRSSRPSSSDRFGGTCFNCGESGHRASDCPNVSNRRSFF

SEQ ID NO: 66064 - DNA, 1593 bp, Glycine max
  CDS (1)..(1593)
atggtggttgggcagcttgttccttcgaatttgttcctgaatcgttctgctgcgaccagacacagacaccttctttgtgtttctgcaaatgacacaacctcaaccaataacacggataacggttctccattctcaagtttcggaagactcaaggcccagaaagtgaagactctcctggtccacagaagaggaaaggaccaaagccatagacgccccgttcaccttgaagatgatgatgattatgtagccacccctagaccccgacgctctcagtctcgtacacgaggaggagaaagatgggatatgattcccaattatactccaccggcacaaagcaaatcggtgagcgacaccaagtttttcagcctcaagtcctttaaagaaatagggtgcagtgagtatatgattgaatccctccaaaaactcttgtttagccggccttcccatgtacaggccatggcattcacacctgttattagtggaaagacttgtgtcattgctgaccagagtggttctggtaagacatttgcttatctggctcctatcattcagcgccttagacaacaagagcttgaaggaattattagtaaatcctcttcacaagctcctagtcctagagtccttgttcttgcaccaactgctgagttggcttctcaggtcttagataattgtcgctccttgtctaaatctggcgttccattcaagtctatggttgtcaccggtggttttcgacaaaaaactcaactggaaaatttacagcagggagttgatgtcttaatagctacacctggccgttttctgttcctcatcaatcaaggcttcttgcatttaacaaatctaagatgtgctgtgttggatgaggtagatatactctttggtgatgaggacttcgaagtggctcttcaatccttgatcaattcatcaccagttgacacacagtatttatttgtgactgcaactttacctaaaaatgtttacaccaaattggttgaagtttttcctgattgtgaaatgattatggggcctggcatgcaccgaataagttctcgccttcaagagattatagtagattgcagtggagaagatggacaagaaaaaactcctgatacagcatttttgaacaagaaaactgcacttctgcagcttgtggaggaaagtcctgtcccaagaactattgtgttctgcaacaaaattgaaacctgcagaaaagttgaaaatttattaaagcgttttgatagaaaaggaaattgcgtgcaagttctaccattccatgctgccatgacacaagaatcacggcttgctagtatggaagagtttacacgttctccatcaaaaggagtctcccagtttatggtttgcaccgacagagcatcacggggaatagattttgcaagagtggatcatgtcatactctttgacttcccacgtgatccaagtgaatatgtacgacgggttggaagaacagccagaggtgccaagggagtgggcaaggcatttatctttgtggttggcaagcaagtatcccttgcacgcaaaataatggaaagaaatcagaagggtcacccactacatgatgtgccttcggcttattag

SEQ ID NO: 66065 - protein, 530 aa, Glycine max
MVVGQLVPSNLFLNRSAATRHRHLLCVSANDTTSTNNTDNGSPFSSFGRLKAQKVKTLLVHRRGKDQSHRRPVHLEDDDDYVATPRPRRSQSRTRGGERWDMIPNYTPPAQSKSVSDTKFFSLKSFKEIGCSEYMIESLQKLLFSRPSHVQAMAFTPVISGKTCVIADQSGSGKTFAYLAPIIQRLRQQELEGIISKSSSQAPSPRVLVLAPTAELASQVLDNCRSLSKSGVPFKSMVVTGGFRQKTQLENLQQGVDVLIATPGRFLFLINQGFLHLTNLRCAVLDEVDILFGDEDFEVALQSLINSSPVDTQYLFVTATLPKNVYTKLVEVFPDCEMIMGPGMHRISSRLQEIIVDCSGEDGQEKTPDTAFLNKKTALLQLVEESPVPRTIVFCNKIETCRKVENLLKRFDRKGNCVQVLPFHAAMTQESRLASMEEFTRSPSKGVSQFMVCTDRASRGIDFARVDHVILFDFPRDPSEYVRRVGRTARGAKGVGKAFIFVVGKQVSLARKIMERNQKGHPLHDVPSAY

SEQ ID NO: 66066 - DNA, 1284 bp, Linum usitatissimum
  CDS (1)..(1284)
atgggagaaacaagggacaacgattacgaggaggagcttctcgattacgaggaagaggaggagaaagcccccgactctatcactgccaaagtcaacggcgaagcccctaagaagggatatgttgggatacacagttcgggattcagagacttccttttgaagccagagctacttcgggctattgtagattctgggtttgagcatccttctgaagttcaacacgagtgtattccccaagccatcttgggaatggatgttatctgccaagctaagtctgggatgggaaagactgctgtctttgttctgtctactctccagcaaattgagccaactcctgggcaagttattgcccttgttctatgtcacacaagagaacttgcttaccagatctgccacgagttcgagagattcagtacctacttgccggataccaaggttgctgtattttatggtggtgtcaacatcaaaactcacagggatcttctgaaaaatgaatgccctcacgttgttgttggaacacctggtagaatactggcattggcgcgagacaaggaactttctctgaaaaatgttagacatttcattcttgatgaatgtgacaagatgcttgaatcccttgacatgcggagagatgtgcaggagatattcaagatgacccctcatgacaagcaagtcatgatgttttctgcaacactaagtaaagaaatccgcccagtatgcaagaagttcatgcaagatccgatggaaatttatgttgacgatgaggccaagctgacacttcatggacttgtccagcactacatcaaattgaccgagctggagaaaaaccggaagctgaacgaccttcttgatgcgctggacttcaatcaagttgttatctttgtcaagagtgtgagccgtgcagctgagctgaacaagttgctaatcgagtgtaatttcccttcaatatgcattcactctggaatgtcccaggaggaaaggctgacacgctacaagggtttcaaagagggtcataaaaggattcttgttgctactgatctggttggaaggggaatagacatagagcgggtcaacattgttattaactatgacatgcctgattcagctgacacatatcttcacagggttggtcgtgctggtaggtttggcacaaaggggcttgcgattacatttgtatcatcagcttccgactcagatgttcttaatcaggttcaggagaggtttgaggtggacataaaagaactgccggagcaaattgatacatctacatacatgccctcctaa

SEQ ID NO: 66067 - protein, 427 aa, Linum usitatissimum
MGETRDNDYEEELLDYEEEEEKAPDSITAKVNGEAPKKGYVGIHSSGFRDFLLKPELLRAIVDSGFEHPSEVQHECIPQAILGMDVICQAKSGMGKTAVFVLSTLQQIEPTPGQVIALVLCHTRELAYQICHEFERFSTYLPDTKVAVFYGGVNIKTHRDLLKNECPHVVVGTPGRILALARDKELSLKNVRHFILDECDKMLESLDMRRDVQEIFKMTPHDKQVMMFSATLSKEIRPVCKKFMQDPMEIYVDDEAKLTLHGLVQHYIKLTELEKNRKLNDLLDALDFNQVVIFVKSVSRAAELNKLLIECNFPSICIHSGMSQEERLTRYKGFKEGHKRILVATDLVGRGIDIERVNIVINYDMPDSADTYLHRVGRAGRFGTKGLAITFVSSASDSDVLNQVQERFEVDIKELPEQIDTSTYMPS

SEQ ID NO: 66068 - DNA, 1227 bp, Helianthus annuus
  CDS (1)..(1227)
atggcgggaacgtcggtggtaccggcgaacagagggcggaggaacacgatggtggacgacgagaagctggtgtttgaaacatcgaaaggagtggagccaatcatgaccttcgatcagatgggaattaaggacgatctcctccgtggaatctaccaacacggcttcgagaaaccttccgcaattcaacagagagctgtacgcccaattattgaaggccgtgacgtcattgctcaggctcagtctggtaccggaaaaacctcaatgattgcccttactgtttgccagattgttgacacctcttccagagaggtccaagcgttgattttgtcacctacaagagagcttgcagctcaaacagagaaacaaatactggctattggtgatttcatcagcatacaagcccatgcatgcattggtggaaaaagtgtcggtgaggacatcagaaagttagaaaatggagttcatgtcgtttctggaacccctggtagagtctgtgacatgatcaagagaagaacattgagaactagagccattaaattgctaattcttgatgaatctgatgaaatgttgagccgagggtttaaggatcaaatttatgatgtttaccgataccttccaccagagcttcaggtttgtttggtgtctgctacacttcctaatgaaatattggagatgactagcaaattcatgaccgatcctgttagaattcttgttaagcgtgatgaattgactcttgagggaataaagcagttctttgttgctgttgaaagagaaaattggaagtttgatactctctgtgatctgtacgatactcttacaattacccaggctgtaatcttctgtaacacaaagcgaaaggtggattggttaactgagaagatgcgtgagaacaactttactgtatcggcaatgcatggagacatgcctcaaaaggagcgagatgcgataatggaagaatttcgatctggtgttactcgtgtcttgattaccacagatgtgtgggccaggggattggatgttcaacaggtttctctggtgattaattatgacctcccaaataacagagagctttacattcaccgtattggtcgatctggtcgttttggacgaaagggtgttgctataaatttcgtgaaaactgacgatatcaagattctaagagacatagagcagtattacagtacccagatagatgaaatgcccatgaatgtggctgacttgatataa

SEQ ID NO: 66069 - protein, 408 aa, Helianthus annuus
MAGTSVVPANRGRRNTMVDDEKLVFETSKGVEPIMTFDQMGIKDDLLRGIYQHGFEKPSAIQQRAVRPIIEGRDVIAQAQSGTGKTSMIALTVCQIVDTSSREVQALILSPTRELAAQTEKQILAIGDFISIQAHACIGGKSVGEDIRKLENGVHVVSGTPGRVCDMIKRRTLRTRAIKLLILDESDEMLSRGFKDQIYDVYRYLPPELQVCLVSATLPNEILEMTSKFMTDPVRILVKRDELTLEGIKQFFVAVERENWKFDTLCDLYDTLTITQAVIFCNTKRKVDWLTEKMRENNFTVSAMHGDMPQKERDAIMEEFRSGVTRVLITTDVWARGLDVQQVSLVINYDLPNNRELYIHRIGRSGRFGRKGVAINFVKTDDIKILRDIEQYYSTQIDEMPMNVADLI

SEQ ID NO: 66070 - DNA, 1320 bp, Helianthus annuus
  CDS (1)..(1320)
atggaagaagagagagaagaattgaaatcattcaaagaacttggaattgttgacgaactgattgaggcttgtgatagtttgggctggaaaaatccttctaaaatacaagctgaggccattcctcatgctcttgaagggaaggatttgattgggttagcacaaactggttctgggaaaactggagcttttgctctgccaattattcaagctcttttggttgctaaacaagcattttttgcttgtgtgctttctcccactagggaacttgcgatacagattgctgagcagtttgaggccttgggatcgagcaatggcttaaggtgtgcagtgcttgttggaggggtggaccatgtacaacaaagcataacacttggaaaacgaccacacatcgttgttgcgacacctggacgtcttgtggatcacttgtctaataccaagggtttttctcttcgcacgattaagtacctggtgttagatgaggcagacaggttgctaaacgaggactttgagaaatcgcttgatgaaatccttagtgccattccccgtgagaggagaacatacttgttctccgctactatgactaaaaaggtgcaaaagctgcagagagcttgcctaagaaatcctgtaaagattgaagcagcatctaaatattctactgttgacaccttgaaacaacaatatcgttttgttcctgctaaatacaagaactgttatcttgtatacatcttgattgaaaaatccgcaagtacatcaatggttttcacccgtacatgtgaagcaacccgtcatttggctttgatgcttaggaaccttgggctacgtgcaatcccgatttccggtcaaatgactcagacaaagaggcttggtgcattgaacaagttcaaggctggtgagtgtaatattcttatatgcactgatgtagccagcagaggacttgatattccgtctgttgatatggttattaattatgatatccccacaaactcaaaggattatattcattgggttggaagaactgcacgtgcggggcgatctggggttgctatttcgctagtgaaccagtacgagctggagtggtatatccagatagaaaaacttattggcaaaaagttaccggagtttagtgcccaagaggaggaagttttgttactgttggaacgtgtgacagaggctgaacgattatctcggatgaaaatgaaggaaatgggaggtcctaagagaagaagagggggtgaaggtgaagaggaagaagttgaaaagttccaagggaagggcaagaagaagtcatcaaataaaaagtcaaaacgacaattcgtttaa

SEQ ID NO: 66071 - protein, 439 aa, Helianthus annuus
MEEEREELKSFKELGIVDELIEACDSLGWKNPSKIQAEAIPHALEGKDLIGLAQTGSGKTGAFALPIIQALLVAKQAFFACVLSPTRELAIQIAEQFEALGSSNGLRCAVLVGGVDHVQQSITLGKRPHIVVATPGRLVDHLSNTKGFSLRTIKYLVLDEADRLLNEDFEKSLDEILSAIPRERRTYLFSATMTKKVQKLQRACLRNPVKIEAASKYSTVDTLKQQYRFVPAKYKNCYLVYILIEKSASTSMVFTRTCEATRHLALMLRNLGLRAIPISGQMTQTKRLGALNKFKAGECNILICTDVASRGLDIPSVDMVINYDIPTNSKDYIHWVGRTARAGRSGVAISLVNQYELEWYIQIEKLIGKKLPEFSAQEEEVLLLLERVTEAERLSRMKMKEMGGPKRRRGGEGEEEEVEKFQGKGKKKSSNKKSKRQFV

SEQ ID NO: 66072 - DNA, 1500 bp, Brassica napus
  CDS (1)..(1500)
atgagtcgctacgatagccggaccggcgactccacctcctaccgtgaccgtcgaagtgactcagggtttggtggagcttcagcatacggaagctcagctagtaaaagggagagtagtagtgttggcgatgagtctccaaagaagcctgatttggatggtttgactcctttcgagaagaatttttatgttgagtctccctctgtggcggctatgacggaggcggaagtggaggagtatcgaaagaagagggagattactgttgaaggtcgtgatattcctaaacctgtcaaaagctttcgtgatgttggctttcctgattatgttttggaagaggttaagaaggctggttttactgaacctacacctatacaatcacaagggtggccaatggcgttgaagggacgtgatctcattggcattgctgaaactggctctggaaagactctttcttacttgctacctgccatagtccatgtgaatgctcaaccaattttagctcctggagacggcccaatagtcttggttcttgctcctacacgtgaactggctgtgcagatacagcaagaagcgtctaagtttggttcatcgtcaaagattaagagcacttgcatttacggtggtgttccaaaagggcctcaagtgcgtgatctccagaaaggtgtggagattgttatagctactcctgggaggttgattgacatgatggagtcgaacaacacaaacttgcgaagggttacttatcttgttttggatgaggctgatcgaatgctggatatggggtttgaccctcagatcaagaaaattgtttcacatattcggacagaccggctaactttgtactggattgctacttgtcctaaggaagtggaacagctctctaagaagattctttacaacccatacaaagcgataatacgatcttctgatttaaacgctaaccgtgcaatccgtcagattgttgatgtcatctccgaaagtcaaaagtacaacaagttggtgaaattgcttgaagacataatggatggaagcaggattcttgtcttccttgacaccaaaaaaggctgcgaccaaatcactcgtcagcttcgcatggatggttggcctgctttgtcaatacatggtgataaaagtcaagccgagagagattgggttctctcggagtttacatcaggcaaaagccctataatgactgctactgacgttgcagctcgtggactagatgttaaggatgtgaagtatgtgataaactatgacttccctggatcactggaagattatgttcacaggattggacgaactggtagagccggggccaaaggaacagcttacagtttcttcacagctgcaaatgcgaggttcgccaaagagcttatcagcatactagaagaagctggacagaaagtgagccacgaattagcttcaatgggtcgcagcactgctcctcctcctccagggcttggaggatttagagaccgtggaagcagaagagcttggagctga

SEQ ID NO: 66073 - protein, 499 aa, Brassica napus
MSRYDSRTGDSTSYRDRRSDSGFGGASAYGSSASKRESSSVGDESPKKPDLDGLTPFEKNFYVESPSVAAMTEAEVEEYRKKREITVEGRDIPKPVKSFRDVGFPDYVLEEVKKAGFTEPTPIQSQGWPMALKGRDLIGIAETGSGKTLSYLLPAIVHVNAQPILAPGDGPIVLVLAPTRELAVQIQQEASKFGSSSKIKSTCIYGGVPKGPQVRDLQKGVEIVIATPGRLIDMMESNNTNLRRVTYLVLDEADRMLDMGFDPQIKKIVSHIRTDRLTLYWIATCPKEVEQLSKKILYNPYKAIIRSSDLNANRAIRQIVDVISESQKYNKLVKLLEDIMDGSRILVFLDTKKGCDQITRQLRMDGWPALSIHGDKSQAERDWVLSEFTSGKSPIMTATDVAARGLDVKDVKYVINYDFPGSLEDYVHRIGRTGRAGAKGTAYSFFTAANARFAKELISILEEAGQKVSHELASMGRSTAPPPPGLGGFRDRGSRRAWS

SEQ ID NO: 66074 - DNA, 1365 bp, Brassica napus
  CDS (1)..(1365)
atggaggaagagagcgaagtggtgaagacgttcgcagagctcggcgttcgcgaggagctcgtgaaagcttgcgagaggttggggtggaagaacccttcgaagattcaagtcgaagctcttccttatgctctcgaagggaaggatgtgattggacttgcgcaaaccggttcaggcaaaaccggagccttcgcgttgcctatattgcaagcgcttcttgagtatgttaataacgctgagcctaagaaagggcgtagacctgatcctgctttcttcgcttgtgttttgtctccaacgagagagctggctattcagattgctgagcagtttgaagctctagggtctgatataagtcttaggtgtgctgtgcttgttggaggtatagacaggatgcaacaaactatagctcttgggaaacggcctcatgttattgttgcaacacctgggcgtctttgggatcatatgtctgacactaaaggcttttctctgaagacgttgaagtatctggttcttgatgaagcagatagactgctgaatgaagattttgagaaatctctcaaccagattctggaagagatccctcgtgaccgtaaaacgtatctcttttcagcaactatgactaaaaaggttcggaaacttcaaagagcatgcttaaggaatcctgtgaagattgaggctgcctccaaatactccacagttgatactctaaaacagcagtatcggtttgttcctgctaaatacaaggactgctaccttgtgtacattctgaccgaaatgcctgactcaacatcaatgatattcacccgaacttgtgacggtactcgttttatggctttgatgcttcggagccttggttttagagccattcccatcagtggtcaaatgactcagtcaaagagattaggagcgttgaataagttcaaagcaggggaatgtaacatcttggtctgcacggatgtggctagtagagggctcgatatcccatctgttgatatggttatcaattacgacattcccacaaattcaaaggattacatccatagagttggaagaacagctcgtgctggacggtctggtgttgggatatcacttgtaaaccagtatgaactcgaatggtacttgcaaattgaaaaactcataggcaagaagctgcctgaatatccagctgaggaggacgaagtcttgtcattgttggagagagtctcagaagccaaaaagttatccgcaatgaatatgaaagaatcaggaggtaggaagaagagaagaggagaagatgatgaagagagtgagaggttcttggatggtaacaaaggtggtaacaaaggaggtaacagggacaagaaatcttccaagaagttcaaacgataa

SEQ ID NO: 66075 - protein, 454 aa, Brassica napus
MEEESEVVKTFAELGVREELVKACERLGWKNPSKIQVEALPYALEGKDVIGLAQTGSGKTGAFALPILQALLEYVNNAEPKKGRRPDPAFFACVLSPTRELAIQIAEQFEALGSDISLRCAVLVGGIDRMQQTIALGKRPHVIVATPGRLWDHMSDTKGFSLKTLKYLVLDEADRLLNEDFEKSLNQILEEIPRDRKTYLFSATMTKKVRKLQRACLRNPVKIEAASKYSTVDTLKQQYRFVPAKYKDCYLVYILTEMPDSTSMIFTRTCDGTRFMALMLRSLGFRAIPISGQMTQSKRLGALNKFKAGECNILVCTDVASRGLDIPSVDMVINYDIPTNSKDYIHRVGRTARAGRSGVGISLVNQYELEWYLQIEKLIGKKLPEYPAEEDEVLSLLERVSEAKKLSAMNMKESGGRKKRRGEDDEESERFLDGNKGGNKGGNRDKKSSKKFKR

SEQ ID NO: 66076 - DNA, 1233 bp, Brassica napus
  CDS (1)..(1233)
atggcaggatcggcaacacagtttgatgatgcgcgtcagtttgatcaggcactcagtgaaatcctggagggacacgatgagttcttcacctcctatgatgaggtttatgagagttttgatggcatgggtttgcaagagaaccttcttaggggtatctatgcttatggttttgaaaagccttctgctattcagcaaagaggaatcgtacccttttgcaagggtcttgatgtgatccagcaggcacagtctggtactggaaaaaccgcaactttctgttctggtgtcttgcagcagcttgacgtcacccttgtccagtgccaagctctggtcttggctcccaccagggagcttgctcagcagattgagaaggtcatgcgtgctctcggagactacattggcgtcaaggttcatgcctgtgttggtggtaccagtgttcttgacgataagcgtatcctccaagctggtgtccatgttgttgttggaactccaggtcgtgtctttgacatgctccaaagacagtctcttcgctctgactgcatcaagatgtttgtccttgatgaagctgatgagatgctctcccgtggtttcaaggatcagatctatgacatattccagcttctcccaccaaagattcaggtcggagtgttctcagctacaatgccaccagaagctctcgagatcacaaggaagttcatgagcaaaccagtgagaatcctggtgaagcgtgacgagctaacgctcgaaggtatcaagcagttctacgtgaacgtggagaaagaagagtggaagctcgaaactctctgtgacctctacgagaccttagccatcactcagagcgtcatcttcgtcaacactcgccgcaaggtggactggctcacagacaaaatgagaagccgtgaccacacggtctcagccactcacggagacatggaccaaaacacgagagacatcatcatgagagagttcaggtctggttcttctcgtgttctcatcacaaccgatctcttggctcgtggtatcgatgtgcagcaagtgtctctggtcatcaactttgacctcccaactcagccggagaattaccttcaccgtatcggaagaagtggaaggtttgggaggaaaggtgcggcgattaactttgtgactcgtgatgatgagagaatgcttgctgatattcagaaattctacaatgttgttgttgaggagcttccatcaaacctagccgatctgctttga

SEQ ID NO: 66077 - protein, 410 aa, Brassica napus
MAGSATQFDDARQFDQALSEILEGHDEFFTSYDEVYESFDGMGLQENLLRGIYAYGFEKPSAIQQRGIVPFCKGLDVIQQAQSGTGKTATFCSGVLQQLDVTLVQCQALVLAPTRELAQQIEKVMRALGDYIGVKVHACVGGTSVLDDKRILQAGVHVVVGTPGRVFDMLQRQSLRSDCIKMFVLDEADEMLSRGFKDQIYDIFQLLPPKIQVGVFSATMPPEALEITRKFMSKPVRILVKRDELTLEGIKQFYVNVEKEEWKLETLCDLYETLAITQSVIFVNTRRKVDWLTDKMRSRDHTVSATHGDMDQNTRDIIMREFRSGSSRVLITTDLLARGIDVQQVSLVINFDLPTQPENYLHRIGRSGRFGRKGAAINFVTRDDERMLADIQKFYNVVVEELPSNLADLL

SEQ ID NO: 66078 - DNA, 1476 bp, Brassica napus
  CDS (1)..(1476)
atggcggatactgtagagaaagtctccaccactgaagcatcttcatcctccgcggaagcaccaatccccgccgagaaaacagagcccacggcaacggagaagacaaagtggggcgatgttgaggatgacgacgaagaggaagctaacgcagtttcggagctcaattccttgagtatcaaggaggaatctgtgcttgacgaacccgaagactcaagcatcaaagcggttacttccggtgagacaccatacacatcagcgagtaggtttgaagatttgaacttgtcacctgagttgatgaaaggcttatacgttgagatgaagttcgagaagcccagcaagatccaagccatcagtttgcctatgataatcacaccgcctcacaagcacctcattgctcaggcgcataacggatctggcaagaccacctgtttcgttcttgggatgcttagccgtgttgaccccagtctgagggagcctcaagctctttgcatctgtcccacccgagaactagctatccagaatatggaagttcttcagaagatggggaagtttactgggatcactgcggaactagctgtccctgagtcgaatcatggtgtaacctctgcaagaagagcacatgtttcagcgcaagttgtgattggcacccctgggacgcttaagaagtggatagcgtttaagaagctgggtctcaatcatctgaagattctcgtttttgatgaggctgaccatatgcttgctacggatggctttagggatgattccttgaggataatgaaagacattgagagagttaatcccaattaccaggttctcctgttctcagcaacgtttaacgaaacagtcaaagattttgttcagaggacagtcaagagccccaaccaactatttgtaaaaagagaggatctgaagttagactcagtaaaacagtataaggtggtttgcccaagggagcaaaacaagattgaagtcatcaaggatcagattatggagctcggggacattggccagaccataatattcgtgaaaactaaggtgtcagcaggcaaagtgcacaaagctcttgcggatatggggtatgatgtcaccagtgttcatggtaatatgacccaagaggacagagataagatagtgaaggagttcaaagactgcctaactcaagtcctcattgcaaccgatgtccttgcaagaggttttgaccaacaacgggtgaatttggtggtcaattataatctgccaactaagtatgacaccggtgagccagattatgaggtttaccttcacagagttggaagagctggcaggtttggtcgtaaaggagctgtattcaaccttctcctagatgataggagggagatagaggtgatggagaagatagagcgctactttgaagcacaggttaaagagataaagtcttggaattcagaggaagagtacaagagcgcactcaaagaagctggcctgcttgatgagtaa

SEQ ID NO: 66079 - protein, 491 aa, Brassica napus
MADTVEKVSTTEASSSSAEAPIPAEKTEPTATEKTKWGDVEDDDEEEANAVSELNSLSIKEESVLDEPEDSSIKAVTSGETPYTSASRFEDLNLSPELMKGLYVEMKFEKPSKIQAISLPMIITPPHKHLIAQAHNGSGKTTCFVLGMLSRVDPSLREPQALCICPTRELAIQNMEVLQKMGKFTGITAELAVPESNHGVTSARRAHVSAQVVIGTPGTLKKWIAFKKLGLNHLKILVFDEADHMLATDGFRDDSLRIMKDIERVNPNYQVLLFSATFNETVKDFVQRTVKSPNQLFVKREDLKLDSVKQYKVVCPREQNKIEVIKDQIMELGDIGQTIIFVKTKVSAGKVHKALADMGYDVTSVHGNMTQEDRDKIVKEFKDCLTQVLIATDVLARGFDQQRVNLVVNYNLPTKYDTGEPDYEVYLHRVGRAGRFGRKGAVFNLLLDDRREIEVMEKIERYFEAQVKEIKSWNSEEEYKSALKEAGLLDE

SEQ ID NO: 66080 - DNA, 1530 bp, Brassica napus
  CDS (1)..(1530)
atggataacaatagcagcagaggaagattcccaccggggattggagccccggatcctaatttccagtcacggaacccgaatccgaacccgaacccgccgcctcagcagttccttcactcacggactccgtttcctcaacagtatgtacagtctcggactccgttacccgacgctcagcagtacgttcagagaggctacccacaacaaaaccctcctcagcagatccaacagcagccgcagtggtctacacgcgctcagcttcctggtgattctagttatgtagaagaagtcgagaagacggttcaatccgaagctaataacaaccaggactggaaggcaacgttgaagctcccacctcgagataaccgttaccagactgaggatgtgacggctactaaaggaaatgagtttgaggattactttctgaaaagagatctgctcaaggggatatacgagaagggcttcgagaagccatctcctattcaagaagagagcattcccattgctttaaccggtagtgatattcttgctagagccaaaaacggcacagggaagactggtgccttctgcatcccagtcctagagagaattgatcctaataccaatgttattcaagccatgattctagttccaacacgagagctagctcttcagacatcacaggtttgcaaggagctttccaagtacttgaacatccaggttatggtcaccactggtggtaccagtctgagagatgatatcatgcggttacatcaacctgtgcatctgctcgttggaactcctggaaggatcttggatcttaccaaaaagggagtttgtgttttgaaagactgtacgatgcttgtcatggatgaggccgacaagcttttatcggcagagttccaaccttctctagaggaattgatacagtttctgccacagaatcgtcagtttttgatgtattccgctacatttcctgttactgtgaaagcctttaaggatcgacatctccggaagccatatgttatcaatctcatggatcaactcacgcttatgggtgtcacacaatattacgcttttgttgaagagagacagaaggttcactgcctcaacacactgttctctaagctgcaaataaaccaatcgatcatcttttgcaactctgtcaatcgcgtggaactgttggcaaagaaaattacagaactcggttattcgtgcttctacattcatgcgaagatggttcaagaccataggaacagagtgttccatgagttccgcaatggtgcttgcagaaatctcgtttgcactgatctgtttactcgtggaattgacattcaagctgtgaatgtagtgattaactttgattttcctaggacgtctgagtcgtatctacacagggtgggccgatcaggacgttttggacaccttgggttagctgtgaatttggtaacctatgaggaccgttttaaaatgtatcagactgagcaagaacttggcactgaaatcaaaccaattccttcgaatatcgatcaagcaatctactgccagtaa

SEQ ID NO: 66081 - protein, 509 aa, Brassica napus
MDNNSSRGRFPPGIGAPDPNFQSRNPNPNPNPPPQQFLHSRTPFPQQYVQSRTPLPDAQQYVQRGYPQQNPPQQIQQQPQWSTRAQLPGDSSYVEEVEKTVQSEANNNQDWKATLKLPPRDNRYQTEDVTATKGNEFEDYFLKRDLLKGIYEKGFEKPSPIQEESIPIALTGSDILARAKNGTGKTGAFCIPVLERIDPNTNVIQAMILVPTRELALQTSQVCKELSKYLNIQVMVTTGGTSLRDDIMRLHQPVHLLVGTPGRILDLTKKGVCVLKDCTMLVMDEADKLLSAEFQPSLEELIQFLPQNRQFLMYSATFPVTVKAFKDRHLRKPYVINLMDQLTLMGVTQYYAFVEERQKVHCLNTLFSKLQINQSIIFCNSVNRVELLAKKITELGYSCFYIHAKMVQDHRNRVFHEFRNGACRNLVCTDLFTRGIDIQAVNVVINFDFPRTSESYLHRVGRSGRFGHLGLAVNLVTYEDRFKMYQTEQELGTEIKPIPSNIDQAIYCQ

SEQ ID NO: 66082 - DNA, 1284 bp, Brassica napus
  CDS (1)..(1284)
atgggagacgttagggacaacgaagcatatgaggaggagctcctagactatgaggaagaggacgagaaggtcttggattctgggaataaagttaacggcgatgccgtgaagaaaggttacgtggggatacacagttctggattcagagacttccttttgaaacctgagcttctccgagctattgttgactctggttttgaacatccatccgaagtgcaacacgaatgtatccctcaagctatcttggggatggatgttatctgccaagctaaatctggtatggggaagactgctgtctttgttctttcgactctgcaacagatcgagccagctcctggccaggtgtctgcacttatcctgtgccatacaagagagttagcttatcagatctgcaatgagttcgtgaggttcagtacctatctccctgatactaaggtttcagtgttttatggaggagtcaacaataaaattcacaaagacttgctgaagaatgaatgtcctcacattgttgttggaacacctggtcgtgtccttggactcgccagggacaaagatctctctttgaagaatgtgaggcattttattcttgacgagtgcgataaaatgctcgagtctctcgacatgcggagggatgtgcaggagattttcaagatgactcctcacgacaaacaagttatgatgttctcagcaacgctcagcaaagagatacgcccagtctgcaagaaatttatgcaagatccaatggaaatatatgttgatgatgaagccaaattgactcttcatgggcttgtccagcactacatcaaactgagcgagatggagaaaaaccgcaagttgaatgatcttcttgacgcattggacttcaatcaagttgtcatatttgtgaagagcgttagcagagctggggagctgaacaagttgcttattgaatgcaatttcccctcaatatgcattcactctggcatgtctcaggaagagaggctgactcactacaaaagtttcaaggaaggacacaagagaattctggtggcgacagacttggtagggagaggcattgacattgagcgtgtcaacattgtcatcaactatgacatgccagattctgctgatacatatcttcacagggttgggagagctggtaggtttggaacaaagggtctagcaatcacatttgtggcatcagcttcggactcggaagttcttaatcaggtgcaagccaggttcgaggttgatataaagcaacttcctgagaatattgatacttctacttacatgccgtcctaa

SEQ ID NO: 66083 - protein, 427 aa, Brassica napus
MGDVRDNEAYEEELLDYEEEDEKVLDSGNKVNGDAVKKGYVGIHSSGFRDFLLKPELLRAIVDSGFEHPSEVQHECIPQAILGMDVICQAKSGMGKTAVFVLSTLQQIEPAPGQVSALILCHTRELAYQICNEFVRFSTYLPDTKVSVFYGGVNNKIHKDLLKNECPHIVVGTPGRVLGLARDKDLSLKNVRHFILDECDKMLESLDMRRDVQEIFKMTPHDKQVMMFSATLSKEIRPVCKKFMQDPMEIYVDDEAKLTLHGLVQHYIKLSEMEKNRKLNDLLDALDFNQVVIFVKSVSRAGELNKLLIECNFPSICIHSGMSQEERLTHYKSFKEGHKRILVATDLVGRGIDIERVNIVINYDMPDSADTYLHRVGRAGRFGTKGLAITFVASASDSEVLNQVQARFEVDIKQLPENIDTSTYMPS

SEQ ID NO: 66084 - DNA, 1239 bp, Brassica napus
  CDS (1)..(1239)
atggcaggatcagcaccagaaggtacacagtttgatactcgtcagtttgaccagaagctcaatgaagtcctcgagggacaagatgagttcttcacctcgtatgatgaggtccatgagagctttgatgccatgggtcttcaagagaaccttcttaggggcatctatgcctatggttttgaaaagccatctgctattcagcaaagaggaatcgtacccttttgcaacggtctcgacgtgatccagcaggcacagtctggtaccggcaaaaccgccactttctgctctggggtcttgcagcagctcgacttcacccttgtccagtgccaggctctcgtcttggctccaaccagggagcttgctcagcagattgagaaggtcatgcgcgctctaggagactatcttggcgtcaaggtccacgcctgtgtcggtggaaccagtgtccgtgaggatcagcgtatcctccaagccggtgtccacgtcgtggtgggaactccaggtcgtgtgttcgacatgctcagaagacagtctctccgcgctgactccatcaagatgtttgtcctcgacgaagccgacgagatgctctcacgcgggttcaaggaccagatctacgacatcttccagctcctcccaccgaagatccaagtcggtgtgttctcagccacaatgccgccggaggctctcgagatcacgaggaagtttatgagcaaaccggtgaggatcttggtgaagcgcgacgagctgactctcgaaggtatcaagcagttttacgtgaacgtggagaaggaagactggaagctggagactctctgtgacctctacgagacgttggccatcactcagagcgtcatcttcgtcaacactcgtcgcaaggtggactggctcacggataaaatgaggagccgtgaccatacggtgtcggcgactcacggagacatggaccagaacactagagacattatcatgagagagttcaggtctggctcttcgcgtgtgctgatcacgaccgatctcttggctcgtgggattgatgtgcagcaagtgtctttggttattaactttgatctgccgactcagcctgagaactaccttcaccgtattggtaggagtgggaggtttgggaggaaaggtgtggcgattaactttgtgaccaaggacgatgagaggatgctttttgatattcagaagttttacaatgtggttgttgaggagcttccatcaaacgtagccgatcttctttga

SEQ ID NO: 66085 - protein, 412 aa, Brassica napus
MAGSAPEGTQFDTRQFDQKLNEVLEGQDEFFTSYDEVHESFDAMGLQENLLRGIYAYGFEKPSAIQQRGIVPFCNGLDVIQQAQSGTGKTATFCSGVLQQLDFTLVQCQALVLAPTRELAQQIEKVMRALGDYLGVKVHACVGGTSVREDQRILQAGVHVVVGTPGRVFDMLRRQSLRADSIKMFVLDEADEMLSRGFKDQIYDIFQLLPPKIQVGVFSATMPPEALEITRKFMSKPVRILVKRDELTLEGIKQFYVNVEKEDWKLETLCDLYETLAITQSVIFVNTRRKVDWLTDKMRSRDHTVSATHGDMDQNTRDIIMREFRSGSSRVLITTDLLARGIDVQQVSLVINFDLPTQPENYLHRIGRSGRFGRKGVAINFVTKDDERMLFDIQKFYNVVVEELPSNVADLL

SEQ ID NO: 66086 - DNA, 1239 bp, Brassica napus
  CDS (1)..(1239)
atggcaggatccgcaccagaaggaacacagtttgatgctcgtcagttcgaccagaagcttaacgaagttctcgagggacaagatgagttcttcacctcttacgacgaggttcacgacagcttcgacgtcatgggtctccaagagaatctcctcaggggcatctacgcttatggttttgagaagccatctgctatccagcaaagaggaatcgtcccgttctgcaaaggcctcgacgtgatccaacaagcccaatccggaaccggcaaaaccgccaccttctgctccggcgtcctccagcagctggacttcgccatcgtccagtgccaagccctcgtcctcgctccaaccagagagctcgcccagcagatcgagaaggtcatgagggcactcggtgactacctcggcgtcaaggtccacgcctgcgtcggcgggaccagcgtccgcgaggaccagcgcatcctccaggccggcgtccacgtcgtcgtcggcaccccggggcgtgtcttcgacatgctgaagcgccagtccctccgcgccgacaacatcaagatgtttgttcttgacgaggccgacgagatgctctcccgcgggttcaaggaccagatctacgacatcttccagcttctcccaccaaagatccaggtcggcgtcttctcggcgaccatgcccccggaggctctcgagatcacgaggaagttcatgagcaagccggtgaggatcctggtgaagcgcgacgagctgaccttggaaggtatcaagcagttttacgtcaacgttgagaaggaggagtggaagctcgagacgctctgcgacctctacgagacgctcgccatcactcagagcgtcatcttcgtgaacacgaggaggaaggttgactggctcaccgacaagatgagggggcgtgaccacacggtctcggcgactcacggagacatggaccagaacacgagagacatcatcatgagggagtttaggtccgggtcctcgcgtgtgctcatcaccactgatctcttggctcgtggtatcgatgttcagcaggtgtctttggttatcaactacgatctgccgactcagcctgagaactaccttcaccgtatcggaagaagtgggaggtttgggaggaaaggtgtggcgatcaactttgtgaccaaggatgatgagaggatgctgtttgatatccagaagttttacaacgtggttgttgaggagcttccttccaacgttgctgatctgctttga

SEQ ID NO: 66087 - protein, 412 aa, Brassica napus
MAGSAPEGTQFDARQFDQKLNEVLEGQDEFFTSYDEVHDSFDVMGLQENLLRGIYAYGFEKPSAIQQRGIVPFCKGLDVIQQAQSGTGKTATFCSGVLQQLDFAIVQCQALVLAPTRELAQQIEKVMRALGDYLGVKVHACVGGTSVREDQRILQAGVHVVVGTPGRVFDMLKRQSLRADNIKMFVLDEADEMLSRGFKDQIYDIFQLLPPKIQVGVFSATMPPEALEITRKFMSKPVRILVKRDELTLEGIKQFYVNVEKEEWKLETLCDLYETLAITQSVIFVNTRRKVDWLTDKMRGRDHTVSATHGDMDQNTRDIIMREFRSGSSRVLITTDLLARGIDVQQVSLVINYDLPTQPENYLHRIGRSGRFGRKGVAINFVTKDDERMLFDIQKFYNVVVEELPSNVADLL

SEQ ID NO: 66088 - DNA, 1227 bp, Brassica napus
  CDS (1)..(1227)
atggcggaagcgaatcctggccgtggaggtggaagaagaggcggcggaccaatggacgacgacaaattggtcttcgagacgacggaagggatcgagcccatcacgaatttcaacgatatggggatcaaggaggacgttctccgcggcgtctacgagtacggtttcgagaagccctccgcgattcagcagagagcggtcatgccgattctccaaggtcgagatgtgatcgctcaggctcagtccggtaccggaaagacctccatgattgctctctccgtctgccaaatcgttgacacttcgtctagagaagttcaggcgttgatattgtccccgacgagagagctggcttcgcagacggagaagactattcaagctattgggttgcacgctaatattcaggcgcatgcgtgtattggtgggaagagcgttggagaggatatcaggaagctggagaatggtgtccatgttgtgtctgggacgcctgggcgtgtatgtgatatgattaagaggaggagtctgcgtaccagagctattaagcttttgattcttgatgaatctgatgagatgctgagcagggggtttaaggaccagatatatgatgtttacagatatcttccgcctgatcttcaggtttgtttggtttctgcaactcttcctcacgagattttggagatgacatcaaagtttatgacggagccagtgaagatacttgtgaagcgtgatgagttgactcttgaaggcattaaacaatttttcgttgctgttgagaaagaggagtggaaatttgatacgctctgtgatctttatgacactcttactatcactcaagctgttatcttctgcaacactaaacgaaaggtggattggctaagtgagaaaatgaggactaacaacttcacagtctcatcaatgcatggtgacatgcctcagaaggagagagacgagatcatgaatcagtttcggtcaggggacagtcgtgttttgatcacgacagatgtatgggcacgtgggattgatgtgcagcaagtttctcttgtgatcaattatgatctccccaacaaccgtgagctctacatccatcgtattggacgatctggtcgtttcggccgtaagggtgttgcgatcaactttgttaaaagcgacgacatcaagatcctccgggacattgagcagtactacagtactcagattgacgagatgccaatgaatgtagctgatcttatctaa

SEQ ID NO: 66089 - protein, 408 aa, Brassica napus
MAEANPGRGGGRRGGGPMDDDKLVFETTEGIEPITNFNDMGIKEDVLRGVYEYGFEKPSAIQQRAVMPILQGRDVIAQAQSGTGKTSMIALSVCQIVDTSSREVQALILSPTRELASQTEKTIQAIGLHANIQAHACIGGKSVGEDIRKLENGVHVVSGTPGRVCDMIKRRSLRTRAIKLLILDESDEMLSRGFKDQIYDVYRYLPPDLQVCLVSATLPHEILEMTSKFMTEPVKILVKRDELTLEGIKQFFVAVEKEEWKFDTLCDLYDTLTITQAVIFCNTKRKVDWLSEKMRTNNFTVSSMHGDMPQKERDEIMNQFRSGDSRVLITTDVWARGIDVQQVSLVINYDLPNNRELYIHRIGRSGRFGRKGVAINFVKSDDIKILRDIEQYYSTQIDEMPMNVADLI

SEQ ID NO: 66090 - DNA, 1626 bp, Zea mays
  CDS (1)..(1626)
atggagaacacgaagctctcgtcggcgctattcgccgggacccacttcgaccgcaagcgcttcgccgccgacttcgcccggtttcgtaaaggcccggctctcccatccgccgccaccccctccgcaccgtccccggagaagaagcggaagcgcaagagcggcaaggcaaaggcgaagaagaataagaagagagcccaggatgcggcggccgccgcctcgtcggattttgtggaggggttcagcgtgttcaagggattggctgataataatgcggagctgcgttctgagaaggtggatatgaggaaagatgatgattcggtggctgtgaggagacggaaagagattgagagggaattcgagagagctgcagttcttcgtaagaggtttgatatccacattgccgggcaaaatgctccagcaccacttgagagctttgaagaattgatttcaaggtatggttgtgattcttatttggttggaaacttgtcaaaacttggttttcaagaacctacaccaattcaaaggcaggccatgcccattcttctttcgggtagggaatgctttgcgtgtgcacctactggttctggcaagacattggctttcttgtttccacttcttatgaaaattaagccagggtcaaaaggtggtgttaaagccgtgattctttgcccaacaagggaattggctgcacaaactgtgagagaatgcaagaagttagttaaggggaggaagtattatattaaattgatgaccaaagagctgtccaaatcagggaatttcaaagatatgcactgtgatatccttgtttccacccctcttcgtttggaccatgctgtgaagaaaagagaccttgatttaagtagtgtggaataccttgtcttggatgaatctgataaactttttgagcttggatttgttgaagtggttgattcagttgttgaagcctgttccaatccttcaataattcggtctctgttcagtgccactttacccgattcaattgagactcttgcacgcactataatgcatgatgccattcgagtcattgtcggcagaaagaattcggcctcttcactgattaagcaaaagttgatttttgctggaactgagaggggaaagttgctaactcttcgccaaagctttcaagagtctctcaatcctccagtattgatttttgttcaaagcaaagagagggccaaggagctttacaaagaactggcctttgatgacattagagttgatgtaattcatgcagatctcagtgagcagcagcgtcaagatgctgttgacaatttgagagctggaaagacctgggtactgatagcaacggaagtcattgcccggggaatggacttcaaaggtgtcgcctgtgtgataaactacgattttccagagtcggctgctgcctatattcacaggatagggcgatccggaagagccggtaggtccggggaggctatcacgttcttcacagaggaggacaagccattcttgaggaatatcgccaacgtgttggtatcttcaggctgtgaagtgccttcctggataatggcactgccaaagctcaagcgaaagaagcacagagtggatagggacccaatctcctacctacctgacgaagtttga

SEQ ID NO: 66091 - protein, 541 aa, Zea mays
MENTKLSSALFAGTHFDRKRFAADFARFRKGPALPSAATPSAPSPEKKRKRKSGKAKAKKNKKRAQDAAAAASSDFVEGFSVFKGLADNNAELRSEKVDMRKDDDSVAVRRRKEIEREFERAAVLRKRFDIHIAGQNAPAPLESFEELISRYGCDSYLVGNLSKLGFQEPTPIQRQAMPILLSGRECFACAPTGSGKTLAFLFPLLMKIKPGSKGGVKAVILCPTRELAAQTVRECKKLVKGRKYYIKLMTKELSKSGNFKDMHCDILVSTPLRLDHAVKKRDLDLSSVEYLVLDESDKLFELGFVEVVDSVVEACSNPSIIRSLFSATLPDSIETLARTIMHDAIRVIVGRKNSASSLIKQKLIFAGTERGKLLTLRQSFQESLNPPVLIFVQSKERAKELYKELAFDDIRVDVIHADLSEQQRQDAVDNLRAGKTWVLIATEVIARGMDFKGVACVINYDFPESAAAYIHRIGRSGRAGRSGEAITFFTEEDKPFLRNIANVLVSSGCEVPSWIMALPKLKRKKHRVDRDPISYLPDEV

SEQ ID NO: 66092 - DNA, 2409 bp, Zea mays
  CDS (1)..(2409)
atgtcaggagggactggctcatccgggcgcgcggccccgcggtacgccccggatgacccgacgctgcccaagccgtggcgcggcctcgtcgacggcgccaccggctacctctactactggaacccggagacgaacgtcacgcagtacgagcggcctgtgccccccgagagccagctcctcccgcctccgcctccgttgccacccccgcctccacggagccgcgaccgccgcgacaggtccagatcccgatcccgcaccccaccccggcgcgaccacagggaccgcgaccgtgaccgtgacaggcgccacgacgagcacgcgtcctccaagacggcgtcttcccaccaccatccggctccggtagccgtcgccgacgatccttccaccgaggcataccgccgccgccatgagatcaccgtcacgggggataatgtgccgactccaataacttcatttgaggctggtggcttcccgtcagaaattctgaaggagatacaacgtgctggattcgcaagcccaacacctatccaagcccagtcatggccaattgctatgcaaaatcaagatgtagtagctattgcaaagactggatcaggcaaaactcttgggtatctacttcctgggtttatgcatatcaagcgcctgcagaacagcactaggaatggcccaacagtgctagttttggccccaacaagggaacttgcaacacagattctggatgaagctgtgaaatttggaagatcttcaagaatttcttgcacgtgcttatatggtggtgctcctaaaggtcctcagttgagagatttagatagaggggttgatgttgttgttgcaacacctggaaggttaaatgacatcttggagatgcgaaaggtaagtcttaagcaagtgtcatatcttgttctggatgaggctgatcgcatgctggacatgggctttgagccacaaatacggaagatagtgaaagagatacctcaccgtcggcaaacccttatgtacaccgctacatggcccaaggaagtccgaaggattgcagatgatcttcttgttcatcctgtacaggtgacaattggaagtgttgattcacttgttgctaatagttctattactcagcatgtagagatcataacaccctcagaaaaacaacggcgcctggagcagatattacgatcccaggattcaggttcaaagatattaatattttgtaccaccaagaggatgtgtgaccaacttgcaaggacactcaccaggcagtttggagcttcggccattcatggtgacaagtcccaaagtgaaagggagaaggttctgaatcagtttcgatctgggcggtctcccattttagtggcaactgatgttgctgcgcgaggtttggacatcaaagatatcagggtagtgatcaactatgacttccccactggtgttgaagactacgttcacaggattggcaggacaggaagggctggtgccactggtgttgcatatacatttttttgtgatcaggattcaaaatatgctgctgacctaatcaaaattctggaaggggcaaaccaacgagtgccccgtgatttagaggatatggcttctcgtggcggtggacgaggtaggaagaggaaccattgggcatcccgccctgacaggggtggttcacgttctgaactggattcaaggtacagcagcagagatggactagcatcttctgggaaatcagagagtggtcgcggcagtcgtggaagggatgataatggtagccgtggcaggtacgaccctggtgaaaccgatgggcgatctcgtaggtctactagaggccgcagtagaagccgtagcaaaagtgacagtagaagccgtagcccaagtcccaagaagtcacgtcgtcatgaaggtagacgtagcaggactaagagcaggagcaggagcaggagccgtagaaatcatggtgctagccacagcaagagtcgcagccctgtcgctagccgtaggtatgaaaagactgcttcaggatctgctcggcctaactcggggcatgcagagcacaaaagccctccaagatctcactctagggatgaccatgtgaaccactctgaccacaaggatgaccacaaggatgaccacatggaagatgggaagatggaaagggttgatcttgatcgctcgcccagcccacacgatgacaagtctgctccatatagtcctgtgtacaatggcaaagccagtggctcaatgagccccaacggtcagccagaggcaggtgccaaatttgttgaaccttctgggaaacctgagcctgcatctccagtgcgctgcagcaaaggcagagatgatgatgaggaaggtatcatagacgaggatggagagattggtgaggatgatccgcgtgcaaatgcagctgtgcagaatggtaataactga

SEQ ID NO: 66093 - protein, 802 aa, Zea mays
MSGGTGSSGRAAPRYAPDDPTLPKPWRGLVDGATGYLYYWNPETNVTQYERPVPPESQLLPPPPPLPPPPPRSRDRRDRSRSRSRTPPRRDHRDRDRDRDRRHDEHASSKTASSHHHPAPVAVADDPSTEAYRRRHEITVTGDNVPTPITSFEAGGFPSEILKEIQRAGFASPTPIQAQSWPIAMQNQDVVAIAKTGSGKTLGYLLPGFMHIKRLQNSTRNGPTVLVLAPTRELATQILDEAVKFGRSSRISCTCLYGGAPKGPQLRDLDRGVDVVVATPGRLNDILEMRKVSLKQVSYLVLDEADRMLDMGFEPQIRKIVKEIPHRRQTLMYTATWPKEVRRIADDLLVHPVQVTIGSVDSLVANSSITQHVEIITPSEKQRRLEQILRSQDSGSKILIFCTTKRMCDQLARTLTRQFGASAIHGDKSQSEREKVLNQFRSGRSPILVATDVAARGLDIKDIRVVINYDFPTGVEDYVHRIGRTGRAGATGVAYTFFCDQDSKYAADLIKILEGANQRVPRDLEDMASRGGGRGRKRNHWASRPDRGGSRSELDSRYSSRDGLASSGKSESGRGSRGRDDNGSRGRYDPGETDGRSRRSTRGRSRSRSKSDSRSRSPSPKKSRRHEGRRSRTKSRSRSRSRRNHGASHSKSRSPVASRRYEKTASGSARPNSGHAEHKSPPRSHSRDDHVNHSDHKDDHKDDHMEDGKMERVDLDRSPSPHDDKSAPYSPVYNGKASGSMSPNGQPEAGAKFVEPSGKPEPASPVRCSKGRDDDEEGIIDEDGEIGEDDPRANAAVQNGNN

SEQ ID NO: 66094 - DNA, 1242 bp, Glycine max
  CDS (1)..(1242)
atggctggacttgcacctgagggatcacagttcgatgctcgtcaatatgattctaaaatgagtgacttactttcatctgatggacaggacttcttcacatcctatgacgaggtttatgatagttttgacgctatgggtttgcaggaaaatcttctcaggggaatttacgcatatggttttgagaagccatctgccattcagcaaagggggatagttcccttctgcaagggacttgatgttattcagcaggctcagtctggaactgggaagacggctactttctgctctggtattctgcagaaagttgactatagtgtgactgaatgccaagccttggttttagcaccaactagggagcttgctcagcaaattgaaaaggttatgcgggcacttggagattatcttggtgtgaaggtgcacgcatgtgtgggaggtaccagtgttcgtgaagaccaacgcattctatcaagtggtgttcatgttgttgttggtactcctggtcgtgtatttgatatgctgcgcagacagtcacttcggccagactatatcaagatgtttgtattggatgaggctgatgaaatgctttcccgtggttttaaagatcagatctatgatatattccagttgcttccatctaagattcaagtgggagttttctctgctacaatgcctcccgaggcacttgagatcacaaggaagttcatgaacaaacctgtgaggatccttgtgaagcgtgatgagctcaccttggagggtatcaagcaatttcatgtcaatgttgagaaagaggaatggaagcttgacacactctgtgatctttatgagacattagctattactcagagtgtcatttttgttaacaccagaaggaaagttgattggttgactgacaagatgagaagccgtgaccacacagtctcagcaacccacggagacatggaccagaataccagggacattattatgcgtgaattccgttctgggtcttcccgtgtcttgataaccactgatcttttggctcgtggtattgatgtccaacaagtgtctctagttataaattttgatctcccaacacagcctgagaactatctccatcgtattggtcgtagtgggaggttcggaaggaaaggtgttgcgatcaactttgtcacaaaggatgacgagaaaatgctgtttgacatccagaagttttacaacgtgcaagttgaggagctgccttcaaatgttgctgagctcctttga

SEQ ID NO: 66095 - protein, 413 aa, Glycine max
MAGLAPEGSQFDARQYDSKMSDLLSSDGQDFFTSYDEVYDSFDAMGLQENLLRGIYAYGFEKPSAIQQRGIVPFCKGLDVIQQAQSGTGKTATFCSGILQKVDYSVTECQALVLAPTRELAQQIEKVMRALGDYLGVKVHACVGGTSVREDQRILSSGVHVVVGTPGRVFDMLRRQSLRPDYIKMFVLDEADEMLSRGFKDQIYDIFQLLPSKIQVGVFSATMPPEALEITRKFMNKPVRILVKRDELTLEGIKQFHVNVEKEEWKLDTLCDLYETLAITQSVIFVNTRRKVDWLTDKMRSRDHTVSATHGDMDQNTRDIIMREFRSGSSRVLITTDLLARGIDVQQVSLVINFDLPTQPENYLHRIGRSGRFGRKGVAINFVTKDDEKMLFDIQKFYNVQVEELPSNVAELL

SEQ ID NO: 66096 - DNA, 1242 bp, Glycine max
  CDS (1)..(1242)
atggcaggtttggctccagaaggaacacaatttgatggtcgccaatatgatgctaagatgagtgaattgctttccactgatgggcaagaattcttcacctcatatgacgaagtctatgacagctttgatgccatgggattgcaagagaatcttctgcgaggcatatatgcttatggttttgagaggccttctgcaatccagcaaaggggaattgttcctttctgcaaaggtctggatgtgattcaacaggctcagtctggaacaggaaagacagcaacattttgttctggaattttgcagcagcttgattatggattggttcagtgccaggctttggttttggcaccaacaagggagctagcacagcagattgagaaagttatgcgagctcttggtgattacctgggagttaaggttcatgcttgtgttggtgggacaagtgttcgtgaggatcagcgcattctccaagctggtgtccatactgttgttggcactcctgggcgtgtatttgacatgctacggagacagtctcttcgtccagatcacataaagatgtttgttttggatgaggctgatgaaatgctttctcgtggtttcaaggaccagatctatgacatcttccagcttctgccgggtcaaattcaggttggagtgttctctgctacaatgccacctgaggccttggagattacgaggaagttcatgaataagccagtgagaatcctggtaaagcgtgatgaattgacccttgagggtatcaaacagttttatgtgaatgttgataaggaagactggaaactagagacattatgtgacctttatgagactttggctatcacccagagtgtcatctttgtgaacacaaggcgtaaggtggactggctcactgacaagatgcgaagcaatgaccatacagtctcagccacccatggagacatggaccaaaacactcgtgacatcatcatgcgggaatttcgctctggctcttctcgagttctaattaccactgacctcttggctcgtggtatagatgtacagcaggtgtctttggttataaactatgatctgccaacccaacctgaaaattatcttcatcgcataggacgaagtgggcgttttggaagaaaaggtgttgccataaactttgtgactttggatgatgcaagaatgctgtctgatattcaaaagttctacaatgtgactgtagaggagttgccatcaaatgttgctgatctgctctga

SEQ ID NO: 66097 - protein, 413 aa, Glycine max
MAGLAPEGTQFDGRQYDAKMSELLSTDGQEFFTSYDEVYDSFDAMGLQENLLRGIYAYGFERPSAIQQRGIVPFCKGLDVIQQAQSGTGKTATFCSGILQQLDYGLVQCQALVLAPTRELAQQIEKVMRALGDYLGVKVHACVGGTSVREDQRILQAGVHTVVGTPGRVFDMLRRQSLRPDHIKMFVLDEADEMLSRGFKDQIYDIFQLLPGQIQVGVFSATMPPEALEITRKFMNKPVRILVKRDELTLEGIKQFYVNVDKEDWKLETLCDLYETLAITQSVIFVNTRRKVDWLTDKMRSNDHTVSATHGDMDQNTRDIIMREFRSGSSRVLITTDLLARGIDVQQVSLVINYDLPTQPENYLHRIGRSGRFGRKGVAINFVTLDDARMLSDIQKFYNVTVEELPSNVADLL

SEQ ID NO: 66098 - DNA, 1242 bp, Glycine max
  CDS (1)..(1242)
atggctggacttgcacctgagggatcacagttcgatgctcgtcaatatgattctaaaatgagtgacttactttcatctgatggacaggacttcttcacatcctatgacgaggtttatgatagttttgacgctatgggtttgcaggaaaatcttctcaggggaatttacgcatatggttttgagaagccatctgccattcagcaaagggggatagttcccttctgcaagggacttgatgttattcagcaggctcagtctggaactgggaagacggctactttctgctctggtattctgcagcaacttgactatagcttgacgcaatgccaggccttggttttagcaccaactcgtgagcttgctcagcagattgagaaggttatgcgagcacttggagattatctaggtgtgaaggttcatgcttgtgtgggaggtaccagtgtgcgtgaagaccaacgcattctatctagcggtgttcatgttgtggttggtacccctggtcgtgtgtttgatatgctgcgcagacagtcacttctgccagatcacatcaagatgtttgtattggatgaggctgatgaaatgctttcccgaggttttaaggatcagatctacgatatatttcagctgctgccatctaagattcaagtgggagttttctctgctacaatgcctcctgaggcccttgagatcactaggaagtttatgaacaaacctgttaggatccttgtgaagcgtgatgagctcaccttggagggtattaagcaattttatgtcaatgttgagagggaggattggaagctggacacactctgcgatctttacgagacattagctatcactcagagtgtcatttttgttaataccagaaggaaagttgattggttgactgacaagatgagaagccgtgaccacacagtctcagcaacccacggagacatggaccagaataccagggacattattatgcgtgaattccgttctgggtcttcccgtgtcttgataaccactgatcttttggctcgtggtattgatgtgcaacaagtgtctctagttataaactttgatctccctacacagcctgagaactatctccaccgtattggtcgtagtgggaggttcggaaggaaaggtgttgcgatcaattttgtcacaaaggatgacgagaaaatgctgtttgacatccagaagttttacaacgtgcaagttgaggagctgccttcaaatgttgctgagctcctttga

SEQ ID NO: 66099 - protein, 413 aa, Glycine max
MAGLAPEGSQFDARQYDSKMSDLLSSDGQDFFTSYDEVYDSFDAMGLQENLLRGIYAYGFEKPSAIQQRGIVPFCKGLDVIQQAQSGTGKTATFCSGILQQLDYSLTQCQALVLAPTRELAQQIEKVMRALGDYLGVKVHACVGGTSVREDQRILSSGVHVVVGTPGRVFDMLRRQSLLPDHIKMFVLDEADEMLSRGFKDQIYDIFQLLPSKIQVGVFSATMPPEALEITRKFMNKPVRILVKRDELTLEGIKQFYVNVEREDWKLDTLCDLYETLAITQSVIFVNTRRKVDWLTDKMRSRDHTVSATHGDMDQNTRDIIMREFRSGSSRVLITTDLLARGIDVQQVSLVINFDLPTQPENYLHRIGRSGRFGRKGVAINFVTKDDEKMLFDIQKFYNVQVEELPSNVAELL

SEQ ID NO: 66100 - DNA, 1770 bp, Glycine max
  CDS (1)..(1770)
atggattcggagttccccaacaaagcgttaacgagcacgcgtttttccgacctgaatccaccactctctgaaccggttctccaagccctatcacactctggcttcgagttctgcacccctgtccaagctgccactattcctctgctctgcagcttcaaggacgtcgccgtcgacgccgccaccggttccggcaaaactctagcttttgtcgttcctctcgtcgagattctacgccgctcctcttctcatcccaagcctcaccaggtgctaggaataattatatcccctacaagggagctatcaactcaaatatatcatgttgcacaacctttcatttcaacattggctaatgttaagtccatgctccttgttggtggagcagaagtaaaagcagacctaaagaaaatagaggaggaaggagcaaacatattgattggcacgcctgggcggctatatgacataatgaatcggatggatgtcttggatcttaaaaaccttgagattttgattttggatgaggctgatagactcttagatatgggattccagaagcagataacttctattataactctcttgcctaagcttcggagaactggtctgttctctgctactcaaactgaggctattgaagagcttgctaaggcaggattgaggaacccagtgagggttgaagttcgagcagaaacaaaatcagaaaatggtcctgcatcatcaaaacaaccagaatcttccaaaacaccttcaggacttcacattgagtacttggaatgcgaggcagataagaagccatcacagctagtacatatcctgataaagaatctctcgaaaaaaattattatatatttcatgacttgtgcttgtgttgattattggggagctgtccttccttgtctttctgttttgaaaggcttctccttgattcccctgcatggaaagatgaagcagtctgccagggagaaagcactagcttcatttacatccctttcaaatggaattcttctatgtacggatgttgcagcacgtggactggacataccaggtgtagattgtatagtgcagtatgatcctcctcaagatccaaatgttttcatacatagagtaggtcgaactgctcggctgggtaaacaaggtcatgctgttgtcttcttattaccaaaggaggaatcttatgtagaattcctgcgtataagaagagttcctcttcaagagagaatatgtgctgatgaagcatctgatgttgttcctcagattcgttctgctgcaaaaaaagatcgcgatgtcatgaaaaagggaattaaggcctttgtctcttacatccgtgcttataaagagcatcactgttcctatatttttaggtggaaagaacttgaaattggtaaattggccacaggatttggcttattacaacttccttcaatgccagaggtaaaacaccactcactttccattgatggatttgaaccagttgaagatatcaatttgggggacattaagtacagggataaatcacgggagaaacaaaggaagaagaaccttcaagcaaagaaagaagccaaagagaaagagccaaaacctcaaaaaccgaagaaaaccccaaatgcacccactgacatgcggaagaaaacagcccgacagagacgtgctcagcagacaatggaagacgaggaagagttgatgcatgaataccgcttgttgaagaaattgaagaaagggaccatagatgagaatgaatatgccaagttgacaggcactgaggaattactttga

SEQ ID NO: 66101 - protein, 589 aa, Glycine max
MDSEFPNKALTSTRFSDLNPPLSEPVLQALSHSGFEFCTPVQAATIPLLCSFKDVAVDAATGSGKTLAFVVPLVEILRRSSSHPKPHQVLGIIISPTRELSTQIYHVAQPFISTLANVKSMLLVGGAEVKADLKKIEEEGANILIGTPGRLYDIMNRMDVLDLKNLEILILDEADRLLDMGFQKQITSIITLLPKLRRTGLFSATQTEAIEELAKAGLRNPVRVEVRAETKSENGPASSKQPESSKTPSGLHIEYLECEADKKPSQLVHILIKNLSKKIIIYFMTCACVDYWGAVLPCLSVLKGFSLIPLHGKMKQSAREKALASFTSLSNGILLCTDVAARGLDIPGVDCIVQYDPPQDPNVFIHRVGRTARLGKQGHAVVFLLPKEESYVEFLRIRRVPLQERICADEASDVVPQIRSAAKKDRDVMKKGIKAFVSYIRAYKEHHCSYIFRWKELEIGKLATGFGLLQLPSMPEVKHHSLSIDGFEPVEDINLGDIKYRDKSREKQRKKNLQAKKEAKEKEPKPQKPKKTPNAPTDMRKKTARQRRAQQTMEDEEELMHEYRLLKKLKKGTIDENEYAKLTGTEELL

SEQ ID NO: 66102 - DNA, 1347 bp, Glycine max
  CDS (1)..(1347)
atgcgtcaccctgtcgacatcactcgctgtccagaactccccgtctgtagtgttcctttgatgaaacgcaggttacagtcggtactggaggagaacatgggaatttccaagctgttccctgttcaggtcgcactttggcaagaaacggttggaccgggtgactttgagcgagacctttgcataaactcgcccaccggaagtggcaaaaccttggcctatgctcttcccatcgttcaaaacttgttcaccaaccccggtggccgcctccgggctttggttgtagttcccacccgcgaccttgctttgcaggttaagcgcgtcttcgacgcccttgcatcgccgctgggtctccgtattggcttggctgctggtcaatcttcgcttcgccacgagctttctagcctcatttatctacctggagaagacgatggtccagatcctgggtttttgtctccgttgtggttccaaagcaaggtcgacatattggtagcgacccctggaaggctagtggaccatgtcaacaagttgtcattgaagcatcttcgttatctcgtggttgacgaagcagatcgattgctacgtgaggactaccagtcctggttacctactgtgcttaaattaactcagtctaggctggcaaagatagttttatctgctacgttaactcgggacccaggaagacttgctcaacttaatttgcatcaccctttattcctgagtgctgggaaaatgcgttatcggctcccagaatatttggaatgttacaaactgatctgtgaaagaaaggtcaaacccttgtatttggttgcccttttgaaatccctaggagaagaaaaatgcatagtttttacaagatctgtggaatcaacacatcatctctgcaaattgctaaattgttttggtgatctgaaaattggtatcaaggagttttctggtctaaaacatcaacgggtaagaagcaagacagtgggtgaatttcggagaggggagtttcaagtgcttgtatcttctgatgcaatgactcgtggaatggatgttgaaggggtaagaaatgtcattaattatgacatgcccaaatacacaaagacgtatgttcatcgagctggtagaactgcaagagctggccagactgggcgttgcttcacattgatgtcaaaagatgaggttggaggatttaagaagttgatgaaaaaggctgaggctagtgattgtcttgagtatactgttccatccagtttgattgaagcgcttcatagtacctaccaatcagcactgacaaaattgaaggagaaaattctggagtcccggagaaaaccaaggataagtcttgtcaatcgatcaaagtga

SEQ ID NO: 66103 - protein, 448 aa, Glycine max
MRHPVDITRCPELPVCSVPLMKRRLQSVLEENMGISKLFPVQVALWQETVGPGDFERDLCINSPTGSGKTLAYALPIVQNLFTNPGGRLRALVVVPTRDLALQVKRVFDALASPLGLRIGLAAGQSSLRHELSSLIYLPGEDDGPDPGFLSPLWFQSKVDILVATPGRLVDHVNKLSLKHLRYLVVDEADRLLREDYQSWLPTVLKLTQSRLAKIVLSATLTRDPGRLAQLNLHHPLFLSAGKMRYRLPEYLECYKLICERKVKPLYLVALLKSLGEEKCIVFTRSVESTHHLCKLLNCFGDLKIGIKEFSGLKHQRVRSKTVGEFRRGEFQVLVSSDAMTRGMDVEGVRNVINYDMPKYTKTYVHRAGRTARAGQTGRCFTLMSKDEVGGFKKLMKKAEASDCLEYTVPSSLIEALHSTYQSALTKLKEKILESRRKPRISLVNRSK

SEQ ID NO: 66104 - DNA, 1743 bp, Glycine max
  CDS (1)..(1743)
atggcagaaacagaagacaaaacccttcaagcctcgcccatgaacgaaaccaagaagatgaagaagaataagaataagaagaagagcgacaaaaaaagacctcgggagattgctacagaggagcgtccagaggaagaggagaatgagaataatacagatagcgatggagaatcctcgaagaagaagaagaagaagaaggtggaaggagaaagtgaagtgaaagagaaaaaggtgaagaacaacggtggctctggaattatgagcaccgagtcatttgaatctctcggattgtctgaacctacttataaagccattatggatatgggattccaccacatgactcagattcaagcgagggcaattccaccacttttgattggaaaagatgttcttggtgctgcaaggactggttctggaaaaactcttgccttcttaattcctgctctggagctgttgtacaatgttaaatttacgcctcgtaatggagctggtgttattgttatatgccctactagagagcttgcaatacagacacatgctgtggccaaggagctgctcaagtatcattcacaaactcttggattggttattggaggttcagctagaaaaattgaagctgaacgcattgctaaagggataaatttattggtaggaactcctggacgacttctagatcatcttcaaaacacaaaaggattcatatataaaaacttgaagagcctcatgattgatgaaactgacaggattttggaagcaaactttgaggaggaaatgaagcagattatcaagatccttccaaagaataggcaaacagctttattttcggctacacaaacaaagaaggttgaggatcttgcccgcttatcatttcagacaactcctatctatattgatgtagatgatgggagaaaaaaggtcacaaatgaaggattgcagcagggctatgttgttgttccctgtgctaaacgttttgttgttctctattcattcttgaggagataccaatcaaaaaaagtgatggtctttttctcttcatgcaactctgtcaaattccatgcagatcttctcaagtgcactgggttggactgtttaaatattcatggaaaacaaaagcaacatgccaggactactacgttcttcaacttctgcaaagcagaaaaggggatcttgctctgtactgatgttgctgctcgtggacttgacatacctgatgtggactggattgtgcagtatgatcctcctgatgaaccaaaggaatatatccacagggttggtagaacagctcgtggggaaggtggaaaaggaaatgctttacttttcctgattcctgaagaattgcaatttcttcactatttgaaggcagcaaaggttcccgtgaaagaatatgcgtttgatcataagaagcttgcaaatgtacaatctcaactggagaagttggtggctggcatttatcatttgaatgttatggctaaagatgcatataggtcatatatattagcatataattcacactccatgaaagatatattcaatgttcaccgccttgatttacaggctgttgctgcttcattctgtttttctaacccaccgaaggtgaatctgaacatagatagcagtgcttcaaagcataggaagaaaatacgcaaagtagagaggaaagagaagatgataaaaggcattttctcacggccgtgcagtggtgtgatccccacattctcccacccacaccacaccaccccataa

SEQ ID NO: 66105 - protein, 580 aa, Glycine max
MAETEDKTLQASPMNETKKMKKNKNKKKSDKKRPREIATEERPEEEENENNTDSDGESSKKKKKKKVEGESEVKEKKVKNNGGSGIMSTESFESLGLSEPTYKAIMDMGFHHMTQIQARAIPPLLIGKDVLGAARTGSGKTLAFLIPALELLYNVKFTPRNGAGVIVICPTRELAIQTHAVAKELLKYHSQTLGLVIGGSARKIEAERIAKGINLLVGTPGRLLDHLQNTKGFIYKNLKSLMIDETDRILEANFEEEMKQIIKILPKNRQTALFSATQTKKVEDLARLSFQTTPIYIDVDDGRKKVTNEGLQQGYVVVPCAKRFVVLYSFLRRYQSKKVMVFFSSCNSVKFHADLLKCTGLDCLNIHGKQKQHARTTTFFNFCKAEKGILLCTDVAARGLDIPDVDWIVQYDPPDEPKEYIHRVGRTARGEGGKGNALLFLIPEELQFLHYLKAAKVPVKEYAFDHKKLANVQSQLEKLVAGIYHLNVMAKDAYRSYILAYNSHSMKDIFNVHRLDLQAVAASFCFSNPPKVNLNIDSSASKHRKKIRKVERKEKMIKGIFSRPCSGVIPTFSHPHHTTP

SEQ ID NO: 66106 - DNA, 1614 bp, Glycine max
  CDS (1)..(1614)
atgggtcggaaacacgacgccgttttggccagcgaacctgtcgccgaagaagccccctgcagccctgagctcgattccgagaagaagaagaagaagaaaaagaagaacaaaaacaaagacaagcaccaaaccgaaagcagccccaaacgaaagctcgacgaacacgacccccaaaacggcaccgaatcgaagaagaaaaagaagaagcaccacgagtccaaggggaacgccgaggaaaccaacggcgatagcaacaacaacaacggcgatggtgctaatcgcgaggaaacggcgacggatgggtctgttgtggtcaccggtaacaatgcgggagaggcgaaatacgccgcggtgaagagcttcgcggattcggggctgccggagaacgtgctggagtgctgcaagggtttcgagaagccttctccgattcagtcccgggcgtggcctttcttattggacggtcgtgatttgattggaattgctgccactggctcagggaagacgttggcgttcggcataccggcggttatgcatgttttggggaagcggaaggggaaaagttccaagggacgaaaccctctcggcctcgtgctctcacccactagagagctagctcaacagatatcagatgtcatgtgtgatgctggtaggtcttgtggtgtgcaatcaatctgtttgtatggtggaacctccaaagggccacaaatctcctcactaaaatctggcattgacattgtcattggaacccctggtcgtatccaggatctgattgaaatgggtatctgttgcctaaaagaagtatcttttgtggtacttgatgaagctgatcggatgcttgacatgggttttgaacaaatagttcgctctatactgggtcaaacgtgttctgatcgtcaaatggttatgttcagtgctacatggcctttgccagttcattacttggcacaggagtttatggatcctaatcctgtaaaagttgttgtaggctcagaagacttagctgccaatcatgatgtcatgcagatagttgaggtcttggatgaccgttctcgtgataagcgcctagttgctttactggaaaagtaccacaaatctcagaggaatcgagtattggtttttgttttgtacaaattggaagccaaacgagttgaaaatatgcttcaagaagggggttggaaggttgtatcaatacacggggacaaagcccaacatgatcgcacaaaggcactctcattgttcaagaatgcaagctgtcctttgatgattgctactgatgtggccgcacgaggattggatattccagatgttgaagtagtgataaactatagttttcctctgactacagaagattatgttcatagaattgggcgaactggacgagctggtaaaaaaggtgttgcccatacattctttatgcagcagaataagggacttgctggggagctggtgaatgttttaagagaagcagggcaaattgtaccggatgccctcctgaaatttggcacacatgtaaagaaaaaggagtccaaactttatggggcacacttcaaggaaattcctgttgatgctccaaagtctcaaaagaaaacatttgacgactctgatgaagactaa

SEQ ID NO: 66107 - protein, 537 aa, Glycine max
MGRKHDAVLASEPVAEEAPCSPELDSEKKKKKKKKNKNKDKHQTESSPKRKLDEHDPQNGTESKKKKKKHHESKGNAEETNGDSNNNNGDGANREETATDGSVVVTGNNAGEAKYAAVKSFADSGLPENVLECCKGFEKPSPIQSRAWPFLLDGRDLIGIAATGSGKTLAFGIPAVMHVLGKRKGKSSKGRNPLGLVLSPTRELAQQISDVMCDAGRSCGVQSICLYGGTSKGPQISSLKSGIDIVIGTPGRIQDLIEMGICCLKEVSFVVLDEADRMLDMGFEQIVRSILGQTCSDRQMVMFSATWPLPVHYLAQEFMDPNPVKVVVGSEDLAANHDVMQIVEVLDDRSRDKRLVALLEKYHKSQRNRVLVFVLYKLEAKRVENMLQEGGWKVVSIHGDKAQHDRTKALSLFKNASCPLMIATDVAARGLDIPDVEVVINYSFPLTTEDYVHRIGRTGRAGKKGVAHTFFMQQNKGLAGELVNVLREAGQIVPDALLKFGTHVKKKESKLYGAHFKEIPVDAPKSQKKTFDDSDED

SEQ ID NO: 66108 - DNA, 1872 bp, Glycine max
  CDS (1)..(1872)
atgcgaacttcatgggctgatttggctgcaaattctgcagccgaaaacgcaggtcctggttcttctgctaacaatgtgggaactggtagcactttagctcccacgcgacctgtttatgtacctccccatctgaggaaccgtcagccagcagcagaatcccctgcccctgctccagcatatagtggcccttcctctggtgctggctctagttctggtgctggtaattctggatcccgttatgctgcacccagaaatgattatcgtcctgggtatggtggtggtggtggacgtacaggtggatggggaaacaaaagtggtggatgggatcgtggcagggagcgggaagtcaatccctttgaagaagaggataacgctgaagaggcattcagtgagcaggagaatacaggaataaattttgatgcatatgaagacattccagtggagaccagtggtgacaatgtgcccccacctgtgaatacgtttgcagagattgatttgggtgaagcacttaatcagaatataagaaggtgcaaatatgtgaagccaacacctgttcagcggcatgccataccgatatctctagctggacgggatttgatggcttgtgcgcagactggttctggaaagacagctgcattctgcttcccgattatcagtggaatcatgaggggccaacctgtgcagaggccacctcgtggggtgcgtacagtgtatccgcttgcgcttgttctttctccaacgagggagttatcaatgcaaatacatgaagaggctaggaagttttcataccaaactggggttagggtagttgttgcatatggtggagcaccaataaaccagcagggagatgcaagggacacttacacagtggcttcaggggtggacattcttgttgcaactcctggaagactggtagatttgctggagagagctagagtttcactgcagatgattcgatatctggcattagatgaggcagatcggatgctggatatgggttttgagccacaaataaggaagattgtagagcaaatggacatgcctccaccaggtgccagacagactatgttgttcagtgcaacatttccaaaagagatacagagattggcttctgatttcctttcaaattatattttccttgctgttggaagagtgggttcaagtactgatttaattgtccaaagagttgagtatgttcaagagtctgacaagagaagtcacctaatggaccttcttcatgcacagagggcaaatggtgtacaaggaaagcaagctttaactttagtttttgtggagactaagaagggagctgattcgctggaacattggttgtgtcttaatggttttccagcaactactattcatggtgacaggtcacagcaggaaagagaattagccttgaggtcatttaaaagtggcaacacccccatattggttgccaccgatgttgctgcacgtggtcttgatattccccatgttgctcatgtggtcaactttgacctgccaaatgacattgatgattatgtacaccgaattggaagaacagggcgagcaggaaagaaaggccttgcaactgcgttctttaatgacaacaatgcatccctggcaagggccttagcagatctgatgcaagaagcaaatcaagaagtacctgattggctctcacggtttgctgctcgctcttcctttggtgggggaaggaaccgtcgatcaggaggaggccgttttggtggccgtgactttcgaagagagggttcttttagtaggggtggttctgattactacagtgcaggaaacaacagtagtggatatggcacttctggtgggtatggtggaggatatggtcctggggtaaccagtgcttgggattga

SEQ ID NO: 66109 - protein, 623 aa, Glycine max
MRTSWADLAANSAAENAGPGSSANNVGTGSTLAPTRPVYVPPHLRNRQPAAESPAPAPAYSGPSSGAGSSSGAGNSGSRYAAPRNDYRPGYGGGGGRTGGWGNKSGGWDRGREREVNPFEEEDNAEEAFSEQENTGINFDAYEDIPVETSGDNVPPPVNTFAEIDLGEALNQNIRRCKYVKPTPVQRHAIPISLAGRDLMACAQTGSGKTAAFCFPIISGIMRGQPVQRPPRGVRTVYPLALVLSPTRELSMQIHEEARKFSYQTGVRVVVAYGGAPINQQGDARDTYTVASGVDILVATPGRLVDLLERARVSLQMIRYLALDEADRMLDMGFEPQIRKIVEQMDMPPPGARQTMLFSATFPKEIQRLASDFLSNYIFLAVGRVGSSTDLIVQRVEYVQESDKRSHLMDLLHAQRANGVQGKQALTLVFVETKKGADSLEHWLCLNGFPATTIHGDRSQQERELALRSFKSGNTPILVATDVAARGLDIPHVAHVVNFDLPNDIDDYVHRIGRTGRAGKKGLATAFFNDNNASLARALADLMQEANQEVPDWLSRFAARSSFGGGRNRRSGGGRFGGRDFRREGSFSRGGSDYYSAGNNSSGYGTSGGYGGGYGPGVTSAWD

SEQ ID NO: 66110 - DNA, 1467 bp, Glycine max
  CDS (1)..(1467)
atggcagaaccgtcgtccaccgccgccaccatcgctaccgctgatcctccggtgccagcgaccaaaagctgggccgacgaagcggacgaagaaaccaacgcctccaccgccgaggcagaaacctcctccgttaacctggaagcgttaaccatcgacgacaaagaaaagaactcttcaaaactcttggacgaccccgacgattctaatattcaagcggttacttctggcgatacgccgtacacgtcggcagcgaggttcgaggacctaagcctctcgccagagcttttgaaggggctctatgtggagatgaagtttgagaagccgagcaagatccaggctatcagtttgccgatgatccttagcccgcccaatcgggacctgattgcgcaggcacacaatggctctggcaagacgacttgcttcgtgcttgggatgcttagccgtgtcgatccaaaggtgcaggctccacaggcgctctgcatctgccccacccgggagctggccattcagaacatcgaggtgctccgcaggatggggaagtacacggggattgcatccgagtgccttgtgccattggaccgggatgcggttcatgtatcgaaaagggcacctattatggcacaggtggtgattgggaccccagggacaatcaagaagttcattagcttcaagaaacttgggaccacgaggttgaggattcttgttttcgatgaggctgatcaaatgcttgctgaggatggatttagagatgattccctgaagataatgaaagatatagaaaaagagaattctaagtgtcaggttcttttgttttctgctacatttaatgacaccgtcaagaatttcgtttcaaggacagtcaagatggatcataataaactctttgtaaagaaagaagaactatctttagatgcagtgaagcaatataaagtgtattgtcctgatgaacttgctaagattgatgtggtaaaagattacatatttgaaataggagagaatgtggggcaaacaattatatttgtgcgctcaaaaattactgcaagattaacacatgaagcacttgttaagttgggctatgaggttacatctatacaaggttctcttagtaatgaagagagagacaaagttgtcaaggagttcaaagatggtttgacccaagttcttatatcaacagatattcttgctcgtggctttgatcagcaacaggttaatttggtcatcaattatgatcttcccaagaaatacggtgtacgtgatgagccagattatgaagtgtatttgcacagggttggcagagctgggcgttttgggcgcaagggggctgtatttaacctgatatgtggtgaattggatgaaaggctcatgtcgaagatcgagaaccattttggcactcgtgtaactgaggtgcgagcacaaagtgttgaagaatataaagctgctctcaaggaagccggtttactgcaatga

SEQ ID NO: 66111 - protein, 488 aa, Glycine max
MAEPSSTAATIATADPPVPATKSWADEADEETNASTAEAETSSVNLEALTIDDKEKNSSKLLDDPDDSNIQAVTSGDTPYTSAARFEDLSLSPELLKGLYVEMKFEKPSKIQAISLPMILSPPNRDLIAQAHNGSGKTTCFVLGMLSRVDPKVQAPQALCICPTRELAIQNIEVLRRMGKYTGIASECLVPLDRDAVHVSKRAPIMAQVVIGTPGTIKKFISFKKLGTTRLRILVFDEADQMLAEDGFRDDSLKIMKDIEKENSKCQVLLFSATFNDTVKNFVSRTVKMDHNKLFVKKEELSLDAVKQYKVYCPDELAKIDVVKDYIFEIGENVGQTIIFVRSKITARLTHEALVKLGYEVTSIQGSLSNEERDKVVKEFKDGLTQVLISTDILARGFDQQQVNLVINYDLPKKYGVRDEPDYEVYLHRVGRAGRFGRKGAVFNLICGELDERLMSKIENHFGTRVTEVRAQSVEEYKAALKEAGLLQ

SEQ ID NO: 66112 - DNA, 1500 bp, Glycine max
  CDS (1)..(1500)
atgaataacaatagagggaggtaccctcccgggatggggattggtcgcggaggtttcaatcccaacctgggccagaacccgagcctgaaccagaacccgaacctgaaccagaatcatcacgcgttccaggctcggccgccgtaccaccaccagcaacaacagccgcagtatgtgcagaggcatttgttgcagccgccgccgccgcagcagcagcagcagtggctgagaagggatgccaatgccgtcgacgaggtcgagaagaccgtgcagtccgaacccatggattcgagttcccaagattggaaagcaagactaaagattccaccagctgatactcgctgtaggacagaggatgtaacggcaactaaaggaaatgagtttgaggattactttttgaagcgcgagctgctcatgggaatatatgagaagggttttgaaaggccttctcccatccaagaagaaagcattccgattgctcttactggtagtgacattcttgctagggctaagaacggaactggcaaaacagctgcattttgcattcctgcattggaaaaaattgaccaggacaataatgttattcaagttgttatactggtcccaacccgagaattggcattgcagacttctcaagtgtgcaaagagcttggaaagcacttgaaaattcaagttatggttacaacaggtggtaccagcctgaaagatgatataatgcgcttatatcaaccagttcatttactagttggaactccaggaagaatattagatcttgccaagaaaggtgtttgtattctgaaagattgtgctatgcttgttatggatgaggccgataagcttctgtccccagagtttcaaccttctatagagcagctgattcattttcttcctacaactcgtcaaatcttgatgttttcagcaacatttcctgttactgtaaaggatttcaaggataggtatcttcgaaaaccttatgtcatcaaccttatggatgagctaactctgaaaggtattacacaattttatgcattcgtggaagagagacagaaagtccactgtctaaatactcttttttctaagctgcaaataaaccagtctatcatcttctgcaattcagtaaatcgggttgaactccttgccaagaaaatcacagaacttgggtattcatgtttctacattcatgcaaagatgttgcaagaccatcgtaacagagtgtttcatgacttccgcaatggcgcatgtcgaaatcttgtttgtactgatctttttactagaggaatagacattcaagcagtaaatgttgttattaattttgattttcccaagaatgcggagacttatttgcacagggttggtcgttcagggaggtttgggcaccttggtttagcagtgaacttgattacctatgaggatcgctttaatttatataggattgaacaagaacttggaactgaaataaagcagattcccccacaaattgatcaggcaatttattgccggtga

SEQ ID NO: 66113 - protein, 499 aa, Glycine max
MNNNRGRYPPGMGIGRGGFNPNLGQNPSLNQNPNLNQNHHAFQARPPYHHQQQQPQYVQRHLLQPPPPQQQQQWLRRDANAVDEVEKTVQSEPMDSSSQDWKARLKIPPADTRCRTEDVTATKGNEFEDYFLKRELLMGIYEKGFERPSPIQEESIPIALTGSDILARAKNGTGKTAAFCIPALEKIDQDNNVIQVVILVPTRELALQTSQVCKELGKHLKIQVMVTTGGTSLKDDIMRLYQPVHLLVGTPGRILDLAKKGVCILKDCAMLVMDEADKLLSPEFQPSIEQLIHFLPTTRQILMFSATFPVTVKDFKDRYLRKPYVINLMDELTLKGITQFYAFVEERQKVHCLNTLFSKLQINQSIIFCNSVNRVELLAKKITELGYSCFYIHAKMLQDHRNRVFHDFRNGACRNLVCTDLFTRGIDIQAVNVVINFDFPKNAETYLHRVGRSGRFGHLGLAVNLITYEDRFNLYRIEQELGTEIKQIPPQIDQAIYCR

SEQ ID NO: 66114 - DNA, 1242 bp, Glycine max
  CDS (1)..(1242)
atggcaggaattgcacccgagggatcacagtttgatgctcgtcaatatgataccaagatgaatgagctgcttacgtccgatggtcaggatttcttcacatcctacgatgaggtttatgacagttttgatgctatgggcttgcaagagaatctcctgagaggcatttatgcatatggttttgagaagccatcagctattcagcaaaggggaatagttccattctgcaagggacttgacgttatacaacaggcccagtctggaactgggaaaacagcaactttctgctctggaattctgcagcaacttgactatagtgtgactgaatgccaagccttggttttagcaccaactagggagcttgctcagcaaattgaaaaggttatgcgggcactcggagattatcttggtgtgaaggtgcacgcatgtgtgggaggtaccagtgttcgtgaagaccaacgcattctatcaagtggtgttcatgttgttgttggtactcctggtcgtgtatttgatatgctgcgcagacagtcacttcggccagactatatcaagatgtttgtattggatgaggctgatgaaatgctttcccgtggctttaaagatcagatctatgatatattccagttgcttccatctaagattcaagtgggagttttctctgctacaatgcctcccgaggcacttgagatcacaaggaagttcatgaacaaacctgtgaggatccttgtgaagcgtgatgagctcaccttggagggtatcaagcaatttcatgtcaatgttgagaaagaggaatggaagcttgacacactgtgtgttctttatgagacattggcaattactcagagtgtcatttttgtgaacaccagaagaaaggttgattggctgactgacaagatgcgaagtcgagaccacacagtctcagcaacccatggagacatggaccagaataccagggacattattatgcgtgaattccgttctgggtcatcccgtgttttaataactactgatcttttggcccgtggtattgatgtccagcaagtgtctctagttataaattatgatctcccaacacagcccgagaactatctccatcgtattggtcgtagtggaaggtttggtaggaaaggtgttgccattaactttgtcacaagggatgatgaaaaaatgctgtttgacatccagaagttttacaatgtgattattgaggagctgccttcaaatgttgctgaactcctttga

SEQ ID NO: 66115 - protein, 413 aa, Glycine max
MAGIAPEGSQFDARQYDTKMNELLTSDGQDFFTSYDEVYDSFDAMGLQENLLRGIYAYGFEKPSAIQQRGIVPFCKGLDVIQQAQSGTGKTATFCSGILQQLDYSVTECQALVLAPTRELAQQIEKVMRALGDYLGVKVHACVGGTSVREDQRILSSGVHVVVGTPGRVFDMLRRQSLRPDYIKMFVLDEADEMLSRGFKDQIYDIFQLLPSKIQVGVFSATMPPEALEITRKFMNKPVRILVKRDELTLEGIKQFHVNVEKEEWKLDTLCVLYETLAITQSVIFVNTRRKVDWLTDKMRSRDHTVSATHGDMDQNTRDIIMREFRSGSSRVLITTDLLARGIDVQQVSLVINYDLPTQPENYLHRIGRSGRFGRKGVAINFVTRDDEKMLFDIQKFYNVIIEELPSNVAELL

SEQ ID NO: 66116 - DNA, 2277 bp, Glycine max
  CDS (1)..(2277)
atgtcgcctagtttcgtcttcgacccgcctagcgacgaagaaatcgaacactctgaacacgaagaagaagaagaatccgaagaagaaccagagtcaggatcaggaacaggatcagaatcagagtcagaaggagaaggagaagaagaagaagggcacgaagaagcgcgggttccgaagaagaagaagaagaaaacgcagtctccatgggactttgctaaatacacggaatcagtggcggaggaacacgctcgcaggagcacaacctcggtcgacgagaaaatctccaaagcactcaaacaacgttccacgccgctcgttgctgagcttgaccacagctccgagtccgaacctgatgaacaagaagattatagaccagaggaagaagatgaagaagagggtaatgatggtgatagcaaatccttttttgctccttctgatggaacctctttccatgccgattccttcttgcagctcaatctgtctcgccctttgctccgggcttgtgaggccttggggtattctaaaccaacgccaattcaggcagcttgtattccattggcattgagtggtcgtgatatatgtggtagtgccattactgggtcagggaagacagctgcatttgcactacctactttagagaggttgttgttccgtccaaagcgcatgcgtgcaataagggtcctcattcttactccaaccagagagttggcattccaagttcacagtatgatagagaagcttgctcagtttactgatataaggtgttgcctggttgttgggggtctgtcaacaaaggtgcaagaggctgctttgagaacaatgccagacattgttgtggctactccaggacgcatgatagaccatttacgcaatgctatgtccgtggatttggatgatcttgctgttctaatccttgatgaggctgatcgtcttttggagcttggatttagtgctgaaattcaagaacttgttcgcttgtgtcccaaaaaaaggcagactatgttgttttcagcaacaatgactgaggaggttgacgaacttattaaactttccctgtcaaagcccttgcgtctttctgctgacccatctacaaaacggccagcaaccttgactgaggaggttgttagaatacgaagaatgcgtgaagtaaatcaggaagcagttcttcttgcaatgtgctccaaaacttttacttccaaagtcatcatcttcagtggaacaaagcaagctgcacatagattgaagattatatttggattagctggcttaaaagctgctgagcttcatggaaatcttactcaagcccagcgccttgaagctttggaacagttcaggaagcagcaagtggattttttggttgcaacagatgtggctgcccgtggccttgacattattggtgttcaaacagttatcaactttgcatgtccacgtgatcttaccagctatgttcatcgagtgggtcgtactgcaagagccggaagagaaggatatgctgtcacttttgtgactgacaatgaccgatcacttttaaaagccattgcaaagagggcaggttcaaagctgaaaagccgtattgttgctgagcaatctatacataagtggtctcatataattgagcaaatggaagaccaaatttctgaagtacttcatgaagagagagaaggaagagttctaagaaaagctgaaatggaggccacaaaggccgaaaacatgattgcacatagggaagagatcttttcccgccccaaaagaacctggtttgtcacagagaaggagaaaaagcttgctgcaaaagcatccaaggcatccatggataagtgcaagagttctgggaaagaggttattagtgctgaacaagctgaagacctcagaatgaaggagaagaggaagcgagagcgagagaaacatttgcctagaaagaagcgtagaaagttggaagcagctagagagatgttggaggaggaggaggatgacaaacaagtagagactaaggggggaaataaaaaagaaaagggtggaatgtcacttgttgatcttgcttaccgacgggcaaaagcagtgaaggctgtcaagaaggccttagattctggcaagattgtggagaagaataaaaagaaatctaataataattcccgaaaaactccttcaaggacagaagagatgcgggagttattccagactgacatgaaggataaaaagtcaaaaagaagaggtgtgggaggaggaaagaagtcaaagagttcattcaaaagcaagtcaaggtacaagcgcaagtag

SEQ ID NO: 66117 - protein, 758 aa, Glycine max
MSPSFVFDPPSDEEIEHSEHEEEEESEEEPESGSGTGSESESEGEGEEEEGHEEARVPKKKKKKTQSPWDFAKYTESVAEEHARRSTTSVDEKISKALKQRSTPLVAELDHSSESEPDEQEDYRPEEEDEEEGNDGDSKSFFAPSDGTSFHADSFLQLNLSRPLLRACEALGYSKPTPIQAACIPLALSGRDICGSAITGSGKTAAFALPTLERLLFRPKRMRAIRVLILTPTRELAFQVHSMIEKLAQFTDIRCCLVVGGLSTKVQEAALRTMPDIVVATPGRMIDHLRNAMSVDLDDLAVLILDEADRLLELGFSAEIQELVRLCPKKRQTMLFSATMTEEVDELIKLSLSKPLRLSADPSTKRPATLTEEVVRIRRMREVNQEAVLLAMCSKTFTSKVIIFSGTKQAAHRLKIIFGLAGLKAAELHGNLTQAQRLEALEQFRKQQVDFLVATDVAARGLDIIGVQTVINFACPRDLTSYVHRVGRTARAGREGYAVTFVTDNDRSLLKAIAKRAGSKLKSRIVAEQSIHKWSHIIEQMEDQISEVLHEEREGRVLRKAEMEATKAENMIAHREEIFSRPKRTWFVTEKEKKLAAKASKASMDKCKSSGKEVISAEQAEDLRMKEKRKREREKHLPRKKRRKLEAAREMLEEEEDDKQVETKGGNKKEKGGMSLVDLAYRRAKAVKAVKKALDSGKIVEKNKKKSNNNSRKTPSRTEEMRELFQTDMKDKKSKRRGVGGGKKSKSSFKSKSRYKRK

SEQ ID NO: 66118 - DNA, 1806 bp, Glycine max
  CDS (1)..(1806)
atggcggaaacgcacgaagacacaccgaaagaaaccgttcacaaagaagaagaagaagaggaccaaagcttcgaagagctcggcgtggacgctcgtctccttcgcgccctaatcaagaaaagaatcgagaaacctactccaattcagcgcgtcgcgattccactcattctggaaggtaaggacgtggttgcacgtgccaaaacaggttcgggaaagacactcgcgtaccttctcccgttgcttcagaaactgtttactgctaactctgatcggaagaaactcgcgccaaatgcttttgttcttgttcctactcgcgaactaagtcaacaggtatatgcggaagtgaagtctctggttgaattatgcagagttcagctgaaagttgtgcagttgaatagtaacatgcttgctaatgacttgcgggcagcattggctggacctcctgatattttgatctccactcctgcttgtgttgcgaagtgtttgtcctgtggcgtacttcaggcggcatccattaatgcatcgcttgaaactcttgttcttgatgaggcagatcttctattatcatatgggtatgaaaatgatattaaagctttaacacctcacgtacccagaagttgccagtgtcttcttatgtctgcaacatcaagtgctgatgtggacaaactaaagaagttgattctgcacaacccctttattttgactttgcctgaagtgggaaatcataaggatgaggtcattcctaaaaatgttcagcaattctggatctcatgtcctgccagtgataagttactttacatccttgctgtgttgaaattggggttggtccaaaagaaagttctgatattcacaaataccatagacatgagtttcaggttgaaacttttcttggaaaagtttggaatcagctctgctgttttaaatcccgagttgcctcagaattctcgtctccatattcttgaggaattcaatgcgggcctgtttgattatctaattgcaacagatcttagccagtcaaaggaaaaggatgaagtgcctaaggaaagtattgttggatcacggaagtctagaaaacatgctaaaataaaattagattctgaatttggagttgtaaggggaattgactttaaaaatgtatacacggttataaactttgaaatgcctcagagtgttgcaggatatgtacatcgaattggacgtacaggaagagcatacaattctggtgcttctgtctctctggtttccacggatgaaatggatactttagaagaaataagatcttttgttggggatgatgaaaacaaaggcacaaattccattgctgagtttcccctcctcaccaagaatgcagttgaatctttacggtacagggctgaggatgttgcaaagagtgtgactagaattgctgtccgagagtcacgagcccaggatctgaggaatgaaattttgaactctgaaaagttgaaaacccacttcgaaactaatccaaaagacctagatctactgaagcatgacaaaattttgagcaagaatgccccacctcctcacctacgggatgtgcctgagtacctattagacaaaccaacgaaagaggcaagggaaatggtcaagcttgcaagggatgcaatgggaaataataatcgccgcaagggatccaagagaaaattaagaaaagaaggagaccctctgaaggctatctatgctacggcgtcatcaaaaagaccgcacaaagctaggaagactggtggaagcgatagcctaaatagcagtgataggcataaacacaaaaagaataagggtatttga

SEQ ID NO: 66119 - protein, 601 aa, Glycine max
MAETHEDTPKETVHKEEEEEDQSFEELGVDARLLRALIKKRIEKPTPIQRVAIPLILEGKDVVARAKTGSGKTLAYLLPLLQKLFTANSDRKKLAPNAFVLVPTRELSQQVYAEVKSLVELCRVQLKVVQLNSNMLANDLRAALAGPPDILISTPACVAKCLSCGVLQAASINASLETLVLDEADLLLSYGYENDIKALTPHVPRSCQCLLMSATSSADVDKLKKLILHNPFILTLPEVGNHKDEVIPKNVQQFWISCPASDKLLYILAVLKLGLVQKKVLIFTNTIDMSFRLKLFLEKFGISSAVLNPELPQNSRLHILEEFNAGLFDYLIATDLSQSKEKDEVPKESIVGSRKSRKHAKIKLDSEFGVVRGIDFKNVYTVINFEMPQSVAGYVHRIGRTGRAYNSGASVSLVSTDEMDTLEEIRSFVGDDENKGTNSIAEFPLLTKNAVESLRYRAEDVAKSVTRIAVRESRAQDLRNEILNSEKLKTHFETNPKDLDLLKHDKILSKNAPPPHLRDVPEYLLDKPTKEAREMVKLARDAMGNNNRRKGSKRKLRKEGDPLKAIYATASSKRPHKARKTGGSDSLNSSDRHKHKKNKGI

SEQ ID NO: 66120 - DNA, 1242 bp, Glycine max
  CDS (1)..(1242)
atggctgggtcggcacccgaaggatcacaatttgatgctcgtcaatatgatgctaagatgaatgagttacttggaactgatgggcaagatttttttacttcttatgacgaagtttgtgaaagctttgatgctatgggattgcaggagaaccttctgaggggtatttatgcatatggttttgagaagccctctgcaattcaacaaagggggattgttcctttctgcaaggggcttgatgttattcagcaagcacaatctggaactggaaaaactgccaccttttgttctggagttttgcagcagcttgattatagcttagttgaatgccaggcactggttcttgctcccactcgtgaacttgcacaacaaattgaaaaggtcatgcgagcactgggggactatcttggtgtcaaggtccatgtttgtgttggtgggaccattgttcgtgaagatcaacgcatcctctcaagtggggttcatgttgttgttggtactcctggtcgtgtatttgacatgctgtgcagacaatctttgcgccctgataacatcaggatgtttgtattggatgaggcagatgagatgctctctcgaggtttcaaggatcagatctatgatatttttcagctgctgccacctaagatccaggttggggttttctctgccacaatgcctcctgaagccctggaaatcacaaggaagtttatgaacaaacctgtgaggattcttgtaaaacgtgatgagcttaccttggaggggatcaagcaattttttgtcaatgtagacaaggaggactggaagctcgagacactatgtgatctttatgaaactttggcaatcacccagagtgttatctttgtgaacaccagacgcaaggtagattggctgacagacaaaatgcggagtcgtgatcacacagtttcagccactcatggagatatggaccaaaacacaagggatatcatcatgcgggaattccgttctgggtcctcccgtgttcttattaccacagatcttttggcccgtggtattgatgtccaacaagtctcacttgttataaattatgatctgccaactcagccagagaactatctccatcgaattggtcgtagtggacggtttgggagaaagggtgttgctatcaattttgtgactggggatgatgaaaggatgctgtttgacatccaaaagttttataatgtgcagattgaggagctgccagccaatgtagccgatctcatttga

SEQ ID NO: 66121 - protein, 413 aa, Glycine max
MAGSAPEGSQFDARQYDAKMNELLGTDGQDFFTSYDEVCESFDAMGLQENLLRGIYAYGFEKPSAIQQRGIVPFCKGLDVIQQAQSGTGKTATFCSGVLQQLDYSLVECQALVLAPTRELAQQIEKVMRALGDYLGVKVHVCVGGTIVREDQRILSSGVHVVVGTPGRVFDMLCRQSLRPDNIRMFVLDEADEMLSRGFKDQIYDIFQLLPPKIQVGVFSATMPPEALEITRKFMNKPVRILVKRDELTLEGIKQFFVNVDKEDWKLETLCDLYETLAITQSVIFVNTRRKVDWLTDKMRSRDHTVSATHGDMDQNTRDIIMREFRSGSSRVLITTDLLARGIDVQQVSLVINYDLPTQPENYLHRIGRSGRFGRKGVAINFVTGDDERMLFDIQKFYNVQIEELPANVADLI

SEQ ID NO: 66122 - DNA, 2331 bp, Glycine max
  CDS (1)..(2331)
atggctgccacagcaactgcatctttgatgggtccgaggtatgcaccaccagacccaacactccctaaaccatggcggggtcttgtggatggcaagactgggtatctttacttttggaatcctgagactaatgtcacccagtatgagaggccatcctcaagctcaactgcccagccaaagtcttcttcagtgcccaactcttctgtccaggttcaacaatcgtctcaagggtcgcaatgtggtcgtagtcctgatttcagtgataggtatgatagaaatggcagtggtgggtctaacgaagctggatcacggaataatcagagttccaaagggggaagttatgcttctcatgatgtttcaaatggaacacatgttgctggcaatgttgattcttctgtcagaggtcatggggcttcggatgctggagctggactatctcctgagtcttatcgacatcggcatgaaatatctgtgactggagacaatgtacctccaccccttgcatcatttgggtcaactggctttccatctgagcttctgagagaggtacaaaatgctgggttctcagccccaactccaattcaggcacagtcatggcccattgctcttcaaggtagagatatagttgccattgctaaaacaggctcagggaaaaccttggggtatttagttccggcatttattcacctcaagcgctctggcaataactccaaaatgggccccactgcattggtactttcaccaacaagggagttggcaacacagatacaagatgaagctgtgaaatttgggaaatcatctagaatttcatgtgcttgtttgtatggaggagcaccaaagggtcctcaactgagagacattgatcgtggagcagatattgtggtagccactcctggtcgcttgaatgatattcttgagatgagaagaattagtcttaatcaggtttcttacctggtgctagatgaggcagacaggatgctggatatgggttttgaacctcaaattaggaaaattgtgaatgaggtgcccaatcgcaggcaaactctaatgtttactgcaacatggccaaaggaggttaggaaaattgcagctgatctgctagtcaagcctgtacaggtgaacattgggaatgtagatgagcttgttgctaacaagtctattactcagcatgttgaagtattgccaccaatggagaaacaaagacggctggaacatattttgcggtcacaggatcaaggatcaaagataattattttttgttctaccaagaaaatgtgtgatcaacttgctcgtaatctgacacgtcagtttggagctgctgctattcatggggataaatcccaggctgagagggatcatgtgttgaatcagtttcgaactgggaggtctcctgtgcttgtggccacagatgttgctgcccggggactggatatcaaggacattagggtggttgtcaattatgacttccctacaggagtggaagattatgttcataggattggaaggactggaagagctggagccactgggctagcttacactttctttggtgaccaggatgctaaatatgcttcagatctcatcaaagtcttggaaggtgcaaaccagaaggtacctccagaacttcgtgatatgtcatcacggagtggtggtgggatgggtagatccagacgatggggttctgggggacgaggtggacatggtgattctggatatggtggaaggaataatgactctggatatggtggaagaggtaatgatgcaggatatggtggaagaggcagtgattctaattatggagggagggggactgctgcttctggcagaggtggaggccgtgggtttgaccatgactcccagaggaatgataggggtcggagcccagacaagggatctagttggagtgatcgcttcaaaagcgtcaaccgggatcgcagtcgtagtcctgacagggctgcactacctcaacattcccaaggtggcagctttcacaaggcaatgatggaacgtggtggatgggatagtgatcgcaacaagagctttaaccgggaccgaagccgcagtcctagccctcatagacaggtgaagggcccagcagttcgcgaacattccccagtttacagttttcatcgatcaatgatgggacgaggtcaatcatctccgtcatctcaacggcagcgtgcatgcagtcctcaccgaaactcaaccccctcccagggtgatggaagacatggtggatctcattcatcttacaatggagaagtggaggaagggatgattcccgaggaagaaggaatgataggtcaagatgatcctgtaaatgtggattag

SEQ ID NO: 66123 - protein, 776 aa, Glycine max
MAATATASLMGPRYAPPDPTLPKPWRGLVDGKTGYLYFWNPETNVTQYERPSSSSTAQPKSSSVPNSSVQVQQSSQGSQCGRSPDFSDRYDRNGSGGSNEAGSRNNQSSKGGSYASHDVSNGTHVAGNVDSSVRGHGASDAGAGLSPESYRHRHEISVTGDNVPPPLASFGSTGFPSELLREVQNAGFSAPTPIQAQSWPIALQGRDIVAIAKTGSGKTLGYLVPAFIHLKRSGNNSKMGPTALVLSPTRELATQIQDEAVKFGKSSRISCACLYGGAPKGPQLRDIDRGADIVVATPGRLNDILEMRRISLNQVSYLVLDEADRMLDMGFEPQIRKIVNEVPNRRQTLMFTATWPKEVRKIAADLLVKPVQVNIGNVDELVANKSITQHVEVLPPMEKQRRLEHILRSQDQGSKIIIFCSTKKMCDQLARNLTRQFGAAAIHGDKSQAERDHVLNQFRTGRSPVLVATDVAARGLDIKDIRVVVNYDFPTGVEDYVHRIGRTGRAGATGLAYTFFGDQDAKYASDLIKVLEGANQKVPPELRDMSSRSGGGMGRSRRWGSGGRGGHGDSGYGGRNNDSGYGGRGNDAGYGGRGSDSNYGGRGTAASGRGGGRGFDHDSQRNDRGRSPDKGSSWSDRFKSVNRDRSRSPDRAALPQHSQGGSFHKAMMERGGWDSDRNKSFNRDRSRSPSPHRQVKGPAVREHSPVYSFHRSMMGRGQSSPSSQRQRACSPHRNSTPSQGDGRHGGSHSSYNGEVEEGMIPEEEGMIGQDDPVNVD

SEQ ID NO: 66124 - DNA, 1239 bp, Glycine max
  CDS (1)..(1239)
atggcaggtttggctccagaaggatcgcagtttgatgctcggcaatatgactctaagatgaatgaattgctttccgctgatggacaagaatttttcacttcatatgatgaagtctatgatagttttgatgcaatgggccttcaagaaaatcttctcagaggcatatatgcttatggttttgagaggccttctgcaatacagcaaaaggggattgttcctttctgcaagggttgtgatgtattcaccaggctcaatctggaactggaaaacagcaaccatctgttccgcgatttgcaacagcttgactatggatgggtacagtgtcaggctttggttttggcaccaacaagggagcttgcacaacagattgagaaggttatgcgagctctaggtgattaccttggtgtcaaggttcatgcttgtgttggtgggaccagtgttcgtgaggatcagcgcattctccaagctggtgtccatactgttgttggcactcctggacgtgtgtttgacatgctacgaagacaatctcttcgcccagatcacataaaaatgtttgttttggatgaggctgatgaaatgctttcacgtggtttcaaggatcagatctatgacatcttccagctgctgccatccaaaattcaggttggagtgttctctgctacaatgccgccagaagcccttgaaattacaaggaagttcatgaataagccagtgagaatcctggtaaagcgtgatgaactgaccctggagggtataaagcagttttatgtcaatgttgacaaggaagagtggaagctggagacattatgtgacctttatgagactctggctatcactcagagtgtcatttttgtgaataccaggcgcaaggtggactggctcactgacaagatgcgaagcaatgaccacacagtctctgccacccatggtgacatggaccaaaacacacgtgatattatcatgcgtgaattccggtccggctcttctcgagttctcattaccacggaccttctggcccgtggtatcgatgtgcagcaagtgtctctggtcataaactatgatctgccaacccaacctgaaaactatctccaccgcataggacgtagtggtcgatttggaagaaaaggagttgctataaactttgtcacgacagatgattccaggatgctgtctgatattcagaagttctacaatgtgactgtagaggagctgccatcaaatgttgctgatttactctga

SEQ ID NO: 66125 - protein, 412 aa, Glycine max
MAGLAPEGSQFDARQYDSKMNELLSADGQEFFTSYDEVYDSFDAMGLQENLLRGIYAYGFERPSAIQQKGIVPFCKGCDVFTRLNLELENSNHLFRDLQQLDYGWVQCQALVLAPTRELAQQIEKVMRALGDYLGVKVHACVGGTSVREDQRILQAGVHTVVGTPGRVFDMLRRQSLRPDHIKMFVLDEADEMLSRGFKDQIYDIFQLLPSKIQVGVFSATMPPEALEITRKFMNKPVRILVKRDELTLEGIKQFYVNVDKEEWKLETLCDLYETLAITQSVIFVNTRRKVDWLTDKMRSNDHTVSATHGDMDQNTRDIIMREFRSGSSRVLITTDLLARGIDVQQVSLVINYDLPTQPENYLHRIGRSGRFGRKGVAINFVTTDDSRMLSDIQKFYNVTVEELPSNVADLL

SEQ ID NO: 66126 - DNA, 1284 bp, Glycine max
  CDS (1)..(1284)
atgggagaaacaaaggacgaagcatacgaggaagagcttctcgattacgaggaggaagacgaaaaggcccccgactccgccggagctaaagtcaacggcgaagctaccaagaagggctatgttggaattcacagttcgggattcagggacttccttctgaagccagagcttcttcgggctattgtggactcgggatttgagcatccatctgaagtgcaacatgagtgcataccacaagcaattctcgggatggatgtaatttgtcaagcaaaatctggaatgggaaagactgctgtctttgttctctctactctgcagcagattgatcctgttcctggccaagtttctgcacttgttctttgtcatacaagagaattagcataccagatatgccatgagttcgagaggtttagcacctacttgccagatctcaaggttgctgtcttttatggtggggtcaacatcaaagttcacaaggatctgctgaaaaatgagtgccctcatattgttgttggaacaccgggaagaatactggcattgaccagggataaggacctttctttaaagaatgttagacatttcatattggatgaatgcgacaagatgctggaatcattggatatgaggaaagatgttcaagacattttcaagatgactccccatgataagcaagttatgatgttctcagcaacactcagcaaggaaattcgcccagtctgcaagaaatttatgcaagatcctatggaaatttatgttgatgatgaggccaagttgacccttcacgggcttgtgcagcactacatcaaattgaaagaggaagaaaaaaaccggaagttgaatgatcttcttgatgcactggactttaatcaagttgtgatctttgtgaaaagtgttagcagagcagctgagctggacaaactacttgtggagtgcaactttccatctatatgcattcattctggcatgtcccaggaagaaaggttaaagcgctataaaggtttcaaggaggggcatacaaggattcttgttgcaacagatttggttggaagagggattgatattgaacgtgtcaacattgttataaactatgacatgcctgattctgctgacacatacttacacagggttggtcgagctggaagatttggcaccaaaggccttgcaatcacatttgtttcctgttctactgatgttgatgttctcaacaatgttcagtcaaggtttgaggtggatataaagcaacttcctgagcagatcgatacctctacctatatgccatcgtag

SEQ ID NO: 66127 - protein, 427 aa, Glycine max
MGETKDEAYEEELLDYEEEDEKAPDSAGAKVNGEATKKGYVGIHSSGFRDFLLKPELLRAIVDSGFEHPSEVQHECIPQAILGMDVICQAKSGMGKTAVFVLSTLQQIDPVPGQVSALVLCHTRELAYQICHEFERFSTYLPDLKVAVFYGGVNIKVHKDLLKNECPHIVVGTPGRILALTRDKDLSLKNVRHFILDECDKMLESLDMRKDVQDIFKMTPHDKQVMMFSATLSKEIRPVCKKFMQDPMEIYVDDEAKLTLHGLVQHYIKLKEEEKNRKLNDLLDALDFNQVVIFVKSVSRAAELDKLLVECNFPSICIHSGMSQEERLKRYKGFKEGHTRILVATDLVGRGIDIERVNIVINYDMPDSADTYLHRVGRAGRFGTKGLAITFVSCSTDVDVLNNVQSRFEVDIKQLPEQIDTSTYMPS

SEQ ID NO: 66128 - DNA, 1524 bp, Glycine max
  CDS (1)..(1524)
atgagccgctacgacagccgctccggcgacccaacttcctatcgtgaccggaggagcgattctgggctaggtgcacctacagggtttggtggttctgtacaacactcttcatcaaacaggagggattatgatgatggtgggtcaccaaagaggaacctcagtttggatggtttacctcattttgagaaaaacttctacattgagtcaccagctgtaagggcaatgacagatgctgaagttaatgagtaccggcagcagagggaaataactgttgaaggtcgagatatcccgaaacctgtcaagtcctttcatgatgctggttttccagaatatgtaatggaagaaattacaaaagctggctttactgaacctacgcccattcaatctcaaggttggcccatggctttgaaggggcgtgatctgataggaattgcagaaacaggatcagggaagacacttgcttacttgttgccatccattgtgcatgttaatgctcagcctattctaaatcctggagatggaccaattgtgttagttttggctccaactcgtgaacttgctgtccaaatacaacaagaggctactaaatttggtgcatcatctaggattaagagtacatgcatctatggtggggttccaaagggacctcaggtgcgtgatctccagaaaggtgtcgaaattgtaattgccactccaggaaggttaattgatatgcttgagtcaaatcataccaacttgcagagggtcacataccttgtattggatgaagctgataggatgttggatatggggtttgatcctcagctacggaagattgtctcccagattcgtccagatcgtcaaactttgtattggagtgctacctggccaaaggaggtcgaacaattggcaaggaagttcctttataacccatacaaagtaattataggctcttctgatttaaaagctaaccatgcaatacggcaatatgttgacattgtttcggaaaagcagaaatatgataaattggtaaagttgctagaagacatcatggatggcagccgaatactgatatttatggataccaaaaaaggatgtgatcagattactaggcaactccgcatggatggatggcctgcactttcaattcatggagataaaagtcaagcagaaagagattgggtgctctcagaatttaaatcaggaaaaagtcctattatgacggcaacagatgttgcagcccgtggtttagatgtgaaggatgtgaaatatgttgtaaattatgacttcccggggtcacttgaggattatgttcatcgcattgggcggacagggagagctggtgcaaaaggaactgcatacacatacttcacagctgctaatgccagatttgcaaaggaacttatagccatactcgaggaagctggacagaaagtgagtcctgaattagcagcaatggggcgtggtgcaccacctccaccttcaggtccccgaggtttccaagaccgtgggaggggttatggcagttctcgtccatggagctga

SEQ ID NO: 66129 - protein, 507 aa, Glycine max
MSRYDSRSGDPTSYRDRRSDSGLGAPTGFGGSVQHSSSNRRDYDDGGSPKRNLSLDGLPHFEKNFYIESPAVRAMTDAEVNEYRQQREITVEGRDIPKPVKSFHDAGFPEYVMEEITKAGFTEPTPIQSQGWPMALKGRDLIGIAETGSGKTLAYLLPSIVHVNAQPILNPGDGPIVLVLAPTRELAVQIQQEATKFGASSRIKSTCIYGGVPKGPQVRDLQKGVEIVIATPGRLIDMLESNHTNLQRVTYLVLDEADRMLDMGFDPQLRKIVSQIRPDRQTLYWSATWPKEVEQLARKFLYNPYKVIIGSSDLKANHAIRQYVDIVSEKQKYDKLVKLLEDIMDGSRILIFMDTKKGCDQITRQLRMDGWPALSIHGDKSQAERDWVLSEFKSGKSPIMTATDVAARGLDVKDVKYVVNYDFPGSLEDYVHRIGRTGRAGAKGTAYTYFTAANARFAKELIAILEEAGQKVSPELAAMGRGAPPPPSGPRGFQDRGRGYGSSRPWS

SEQ ID NO: 66130 - DNA, 1788 bp, Glycine max
  CDS (1)..(1788)
atgttaaccgcagtcctcagaagaaccagttccaccctctcaaggcgcggtttccccgccgccttaatctctgcctccaccgccaccgccaccgccaccgccggcaaccacttccggctactctccgctgccgtcaattccagaaccttccactccaaccctggccccttgaatttccgcgcctcttcatgtcaccgcgcggaatacgccgtggacgatttcccttacgaagaagggtccaaaggaaacgccgacgaaggcctcgagatcgcgaaggtcggaatttctgaggatattgtctccgctttggccaagaaaggcatcaccaagctcttccccattcagagggctgtgttggaacctgctatgcaaggtcgtgatatgattggtcgagctagaactggaactgggaagactcttgcttttgggatacccatcatggataagatcattcagtttaatgctaagcatgggcgggggagggatcctttggctttggttttggctccgaccagagagcttgctcgacaggttgaaacggagttctgtgagtcggcacctaatttggatacaatttgtgtttatgggggtacacccatctctcggcagatgaggcagcttgattatggggttgatattgctgtggggacgcctggtcggattattgaccttctcaacagaggtgcgctaaatttgaaggatgttcagtttgttgttcttgatgaagctgatcagatgcttcaggtgggctttcaggaagacgtggagaagatcttggagaggttgcccccaaaacgtcagactcttatgttctctgcaacaatgccatcttggataaagcagatttcgcgcaattacttgaataatcccctaaccattgatcttgttggagattctgatcagaaattggcagatggaatttcactgtactccattgcaactgatttgtatgttaaagcgggaattcttgcacctctaataacagaacatgcaaaaggaggaaagtgtattgttttcactcaaacaaaacgtgatgctgatcgattatcgtatgccatggcaagaagtgttaaatgtgaggctttgcatggagacatatcacaagctcaaagggagaaaactcttgctggcttcagaaatggccattttaatgttttagtggcaactgatgttgcctcacgtgggcttgatatacctaatgttgatcttgtaatacattatgatcttcccaacaattcagagatatttgttcatcgttctggacgaacaggtcgtgctggtaagaaaggaactgcaattcttgtgtatacagaagatcaatcgagggctgttaagcttatagagcgtgatgtaggcagtagattttcagagctgccacggattgctgttgatagtgcatcagcggtcatggttgatagcatgggtggcgggcgatttggttcttttggaggtaacagggatcgtcgatacggtgatatgggttttggatctggccattctgggggttacagtaaccctggttctggccgctctagctttggaaattccggtgaaaggtttggtggacagaattataatcgttttggctcatctggtggctttggttctggtcaatcaggaagtagatctggtggatcatccagcaggtctaggtttagtcgctcagatgattttgggggatttggtggttcagatcgttcgggtggttttggagattttggctcaggtcagtctagtggcttcggtggttctcgtggtagtaagcagaacaatagaagacctttttaa

SEQ ID NO: 66131 - protein, 595 aa, Glycine max
MLTAVLRRTSSTLSRRGFPAALISASTATATATAGNHFRLLSAAVNSRTFHSNPGPLNFRASSCHRAEYAVDDFPYEEGSKGNADEGLEIAKVGISEDIVSALAKKGITKLFPIQRAVLEPAMQGRDMIGRARTGTGKTLAFGIPIMDKIIQFNAKHGRGRDPLALVLAPTRELARQVETEFCESAPNLDTICVYGGTPISRQMRQLDYGVDIAVGTPGRIIDLLNRGALNLKDVQFVVLDEADQMLQVGFQEDVEKILERLPPKRQTLMFSATMPSWIKQISRNYLNNPLTIDLVGDSDQKLADGISLYSIATDLYVKAGILAPLITEHAKGGKCIVFTQTKRDADRLSYAMARSVKCEALHGDISQAQREKTLAGFRNGHFNVLVATDVASRGLDIPNVDLVIHYDLPNNSEIFVHRSGRTGRAGKKGTAILVYTEDQSRAVKLIERDVGSRFSELPRIAVDSASAVMVDSMGGGRFGSFGGNRDRRYGDMGFGSGHSGGYSNPGSGRSSFGNSGERFGGQNYNRFGSSGGFGSGQSGSRSGGSSSRSRFSRSDDFGGFGGSDRSGGFGDFGSGQSSGFGGSRGSKQNNRRPF

SEQ ID NO: 66132 - DNA, 2121 bp, Glycine max
  CDS (1)..(2121)
atgaaacgctcaaacgacgacgtcgctgcccccgtccccgcctcaacctccaagccagtgttcctaaccaaagcccaacgcgagcaattggctctccagcgccgccaggaagaagtcgccgaccagaagcgccgccaggagcagctcctctcccgcaaccactcctccgatcccaaaccctcctccgaccgcgacagagacagagaaagagaccgagaccaccaccgagaccgggaccgcgatcgtgacagagacagagaacgcgagcgcgagagggcccgcgatcgggatcgcgaagccgaacggcgcaacagagagagggagcgcgaagaggagagccgggcccgcgaacgcgcccggttggagaaactcgcggagcgtgagcgcgagaaggagcttgagtccatcaaggagcagtacctgggctcgaaaaagccgaagaagcgcgtcatcaagcccagcgagaagttccgtttctccttcgactgggagaacaccgaggacacctcgcgcgacatgaactccctttaccagaacccgcacgaggcccagctcctcttcggccgcgggttccgcgcgggcatggaccgccgcgagcagaagaagctcgccgccaagaacgagaaggacatgcgagaccaaatccggaagaaagacggcctggaggagaggcccgaggaggccgacgcccagcgccgcaaggaggctgccgccgacctatacgacaccttcgacatgcgtgttgaccggcactggagcgagaagaagctggaagagatgacagagagggattggcgtatcttcagagaagactataacatctcctacaagggttccaagattcctcgtcctatgaggagctggaatgagagcaaattgaccaacgagcttctgaaggcggttgagaaggctggctataaaaccccttctcctattcagatggctgccattccacttggtttgcagcagcgtgatgtcattggcattgccgagaccggttccggtaaaaccgccgcctttgtgcttcccatgctgagttacatcacccgccttcctcccataagcgaagacaacgaggctgagggtccctatgctgttgtcatggcccccactcgcgagctcgcgcagcagattgaggatgagactgtcaagtttgctcagtatttgggcatcaaggtcgtctccattgttggtggacagtccattgaggagcaagggtttaagattaggcagggctgtgagattgtcattgccactcctggacgtttgattgattgtttggagcgccgctatgctgtgctcaaccagtgcaactatgttgttcttgatgaggccgatcgtatgattgacatggggtttgagccccaggtgatgggtgtcctcgatgccatgccttccagcaatctcaaaccggagaatgaggatgaggagcttgacgagaagaagatttaccgcaccacctatatgttcagcgccaccatgccacctgctgtggagaggcttgctaggaaatatttgaggaaccctgttgtggtcaccattggcactgctggaaaggcaactgatttgatcagccagcatgtgatcatgatgaaggaggccgagaagttttccaagcttcataggttgcttgatgagcttaacgacaagactgcgattgtgtttgttaacaccaagaagaatgcggatcatgttgccaagaatttggataaggatgggtatcgcgtgactactttgcacggagggaagtcgcaggagcagagggagatcagtcttgaagggtttaggaccaagagatataatgttcttgttgctactgatgttgctggacgtgggattgacatacctgatgtggctcatgtcatcaactatgatatgcctgggaatattgaaatgtacactcaccggattgggcgtactggtcgtgcaggaaagacgggtgtggctaccacattcttgactcttcacgactctgatgtcttctatgacctcaagcagatgcttattcaaagtaacagtcctgttccacctgaactggcaaggcacgaagcttcaaaattcaagccaggaactattccagacagaccacctagacgaaatgacactgtttttgcgcattag

SEQ ID NO: 66133 - protein, 706 aa, Glycine max
MKRSNDDVAAPVPASTSKPVFLTKAQREQLALQRRQEEVADQKRRQEQLLSRNHSSDPKPSSDRDRDRERDRDHHRDRDRDRDRDRERERERARDRDREAERRNREREREEESRARERARLEKLAEREREKELESIKEQYLGSKKPKKRVIKPSEKFRFSFDWENTEDTSRDMNSLYQNPHEAQLLFGRGFRAGMDRREQKKLAAKNEKDMRDQIRKKDGLEERPEEADAQRRKEAAADLYDTFDMRVDRHWSEKKLEEMTERDWRIFREDYNISYKGSKIPRPMRSWNESKLTNELLKAVEKAGYKTPSPIQMAAIPLGLQQRDVIGIAETGSGKTAAFVLPMLSYITRLPPISEDNEAEGPYAVVMAPTRELAQQIEDETVKFAQYLGIKVVSIVGGQSIEEQGFKIRQGCEIVIATPGRLIDCLERRYAVLNQCNYVVLDEADRMIDMGFEPQVMGVLDAMPSSNLKPENEDEELDEKKIYRTTYMFSATMPPAVERLARKYLRNPVVVTIGTAGKATDLISQHVIMMKEAEKFSKLHRLLDELNDKTAIVFVNTKKNADHVAKNLDKDGYRVTTLHGGKSQEQREISLEGFRTKRYNVLVATDVAGRGIDIPDVAHVINYDMPGNIEMYTHRIGRTGRAGKTGVATTFLTLHDSDVFYDLKQMLIQSNSPVPPELARHEASKFKPGTIPDRPPRRNDTVFAH

SEQ ID NO: 66134 - DNA, 1698 bp, Glycine max
  CDS (1)..(1698)
atgtcgtatgtgcctccgcacctcagaaacccgagttccaccaccgtcgccaccgccagaaccccctccgtaaccctagacaaccaccaccaccaccaccacaagctcgcattcgcctccaacaccaccaccaattgctctccatctctctcctccttccacaacaatgcctctcgccggagctccgccgcgcctccctcgccgcggattctcgccaaccccgacaccatcttcccccaatggcaaccctccgaacgcgtttcccgcatgactccggaacagattgaagaggtccggtccaggcttaatcttgatgttgctgtcgcatctgactctcctcctgcacctgctccaatagaatcgtttactgatatgtgtttgcatccgagtatcatgaaggacattgcttaccatgaatacaccaggccaacttcgatccaggcacaggccatgccaattgctctcagtggaagggatctattgggttgtgctgaaaccggtagtggaaagactgcagctttcacaattcctatgatacagcattgcttggcccaacatcccattcggcgcaatgatggtcccctggcattagttttggctcctacgagagaacttgctcaacaaatagaaaaagaggttaaagcttttagcagatctcttgagtcattaaaaactgccatagttgtgggcggaaccaacattgaaaagcagaggtctgaactaagagctggagttgaaatagcagttgccacccctggaagattcattgatcatttacaacaaggcaacacttccctctccagaatttcttttgttgttctagatgaggcagatagaatgcttgatatgggttttgaaccacagataagagaggtaatgagaaatcttccagagaagcatcaaacactgctgtttagtgcgactatgcctgtggagattgaagaattatcaaaagagtacttagctaacccagtgcaagtgaaggtggggaaagtgagtagcccaacaactaatgtttcacaaactcttgtgaaaatttctgaaaatgagaagattgatcggcttctagatttgcttgtagaggaggcatcacaggccgaaaaatgtggtcatccatgtccattaacaattgtgtttgttgagaggaagacaaggtgtgatgaagttgctgaagcattggtagctcaaggattatctgcagtttctcttcatggtggtcgcagtcagagtgaaagagaagctgccttgcatgattttcggagtggctccaccaacattttggttgccactgatgtcgcgtctcgtggcttggatgtcacaggagtgtcacatgtcattaatctagatcttccaaagaccatggaagattatgtacaccggattggaaggacagggcgtgcgggatcaactggcttagctacttcattttacactgatcgcgacatgttcctcgtggcaaatataaggaaagcaatagctgatgcagaatctgggaacacactgacatttgcaaccggaaaggttgctagaaggaaggagaaagaagcagcagctgcacaaaaagaggcaaatattgctttatccaaacagttaggattgggagctgcttcaatgaacattgaagataaatataaattcatgattactgccacaaacactaaaaaagagggagcagcagatagtgcctgggatgattaa

SEQ ID NO: 66135 - protein, 565 aa, Glycine max
MSYVPPHLRNPSSTTVATARTPSVTLDNHHHHHHKLAFASNTTTNCSPSLSSFHNNASRRSSAAPPSPRILANPDTIFPQWQPSERVSRMTPEQIEEVRSRLNLDVAVASDSPPAPAPIESFTDMCLHPSIMKDIAYHEYTRPTSIQAQAMPIALSGRDLLGCAETGSGKTAAFTIPMIQHCLAQHPIRRNDGPLALVLAPTRELAQQIEKEVKAFSRSLESLKTAIVVGGTNIEKQRSELRAGVEIAVATPGRFIDHLQQGNTSLSRISFVVLDEADRMLDMGFEPQIREVMRNLPEKHQTLLFSATMPVEIEELSKEYLANPVQVKVGKVSSPTTNVSQTLVKISENEKIDRLLDLLVEEASQAEKCGHPCPLTIVFVERKTRCDEVAEALVAQGLSAVSLHGGRSQSEREAALHDFRSGSTNILVATDVASRGLDVTGVSHVINLDLPKTMEDYVHRIGRTGRAGSTGLATSFYTDRDMFLVANIRKAIADAESGNTLTFATGKVARRKEKEAAAAQKEANIALSKQLGLGAASMNIEDKYKFMITATNTKKEGAADSAWDD

SEQ ID NO: 66136 - DNA, 1224 bp, Glycine max
  CDS (1)..(1224)
atggcgacgacgtcggtggtgccggcgaatcggcggcgtgcggcggcgaaccccgccgaggatatggacttcgagacgacggagggcgtgaaggccatcgcgagcttcgaggagatggggatcaaggacgatctgctccgcggaatctaccagtacggcttcgagaagccctcagccattcagcagcgggccgtgactccgatcattcagggccgtgacgtcatcgcccaggcccaatccggaacgggcaaaacctccatgattgctctcaccgtttgccaggtcgtcgatacctccgtcagagaggttcaggctttaatattgtcaccaacgagggaactggcctcacagactgagaaagttatattggctattggggatttcattaatatacaagctcatgcatgcgttggtggtaaaagtgtgggagaagatataaggaaacttgagtatggagttcatgtggtgtctggaactcctggccgagtttgtgacatgatcaaaaggagaacattgcgcacgagagctatcaagatgctagttcttgatgaatctgatgaaatgttgagcagagggtttaaagatcaaatttatgatgtgtatagatatctcccacccgaccttcaggtttgcttgatttctgctacccttcctcatgaaatactggagatgacaaacaaattcatgacagatccagtaaggatccttgtaaaacgtgatgaattgacattggagggcatcaaacaattttttgttgcggtcgaaagggaggaatggaagtttgataccctgtgtgatctttatgataccctcactatcactcaagctgttatattctgtaacactaagcgaaaggtggactggttaactgaaaaaatgcgtaacaacaatttcactgtctcatcaatgcacggtgacatgcctcagaaagaaagagatgctattatgggagaatttcgtgctggaacaacccgtgtactaataacaactgatgtttgggcccgtggtcttgatgtacagcaggtttctctagttatcaattatgaccttcccaataatcgtgagctttacattcatcgaattggccgttctggacgttttggaagaaagggtgttgcgataaattttgtgaagagcgatgacatcaagatcttgagagacattgaacaatactacagtactcagattgatgaaatgccaatgaatgttgctgatcttatataa

SEQ ID NO: 66137 - protein, 407 aa, Glycine max
MATTSVVPANRRRAAANPAEDMDFETTEGVKAIASFEEMGIKDDLLRGIYQYGFEKPSAIQQRAVTPIIQGRDVIAQAQSGTGKTSMIALTVCQVVDTSVREVQALILSPTRELASQTEKVILAIGDFINIQAHACVGGKSVGEDIRKLEYGVHVVSGTPGRVCDMIKRRTLRTRAIKMLVLDESDEMLSRGFKDQIYDVYRYLPPDLQVCLISATLPHEILEMTNKFMTDPVRILVKRDELTLEGIKQFFVAVEREEWKFDTLCDLYDTLTITQAVIFCNTKRKVDWLTEKMRNNNFTVSSMHGDMPQKERDAIMGEFRAGTTRVLITTDVWARGLDVQQVSLVINYDLPNNRELYIHRIGRSGRFGRKGVAINFVKSDDIKILRDIEQYYSTQIDEMPMNVADLI

SEQ ID NO: 66138 - DNA, 1242 bp, Glycine max
  CDS (1)..(1242)
atggcaggtttggctccagagggaacacaattcgatggtcgccaatatgatgctaagatgagtgaattgctttccactgatgggcaagaattcttcacctcttatgatgaagtgtatgacagctttgatgcaatgggattgcaagagaatcttctgcgaggcatatatgcttatggttttgagaggccttctgctatacagcaaaggggaattgttcctttctgcaaaggactggatgtgattcaacaggctcagtctggaacaggaaagacagcaacattttgttctggaattttgcagcagcttgattatggattggttcagtgccaggctttggttttggcaccaacaagggagctagcacagcagatcgagaaagttatgcgagctcttggtgattacttgggagttaaggtccatgcttgtgttggtgggacaagtgttcgtgaggatcagcgcattctccaagctggtgtccatactgttgttggcactcctgggcgagtgtttgacatgctgcggaggcagtctcttcgcccagattgcataaagatgtttgttttggatgaggctgatgaaatgctttcacgtggtttcaaggatcagatctatgacatcttccagctgctgccatccaaaattcaggttggagtgttctctgctacaatgccgccagaagcccttgaaattacaaggaagttcatgaataagccagtgagaatcctggtaaagcgtgatgaactgaccctggagggtataaagcagttttatgtcaatgttgacaaggaagagtggaagctggagacattatgtgacctttatgagactctggctatcactcagagtgtcatttttgtgaataccaggcgcaaggtggactggctcactgacaagatgcgaagcaatgaccacacagtctctgccacccatggtgacatggaccaaaacacacgtgatattatcatgcgtgaattccggtccggctcttctcgagttctcattaccacggaccttctggcccgtggtatcgatgtgcagcaagtgtctctggtcataaactatgatctgccaacccaacctgaaaactatctccaccgcataggacgtagtggtcgatttggaagaaaaggagttgctataaactttgtcacgacagatgattccaggatgctgtctgatattcagaagttctacaatgtgactgtagaggagctgccatcaaatgttgctgatttactctga

SEQ ID NO: 66139 - protein, 413 aa, Glycine max
MAGLAPEGTQFDGRQYDAKMSELLSTDGQEFFTSYDEVYDSFDAMGLQENLLRGIYAYGFERPSAIQQRGIVPFCKGLDVIQQAQSGTGKTATFCSGILQQLDYGLVQCQALVLAPTRELAQQIEKVMRALGDYLGVKVHACVGGTSVREDQRILQAGVHTVVGTPGRVFDMLRRQSLRPDCIKMFVLDEADEMLSRGFKDQIYDIFQLLPSKIQVGVFSATMPPEALEITRKFMNKPVRILVKRDELTLEGIKQFYVNVDKEEWKLETLCDLYETLAITQSVIFVNTRRKVDWLTDKMRSNDHTVSATHGDMDQNTRDIIMREFRSGSSRVLITTDLLARGIDVQQVSLVINYDLPTQPENYLHRIGRSGRFGRKGVAINFVTTDDSRMLSDIQKFYNVTVEELPSNVADLL

SEQ ID NO: 66140 - DNA, 1281 bp, Glycine max
  CDS (1)..(1281)
atgggagaattgaaggacactgaggcttacgaggaagagctcatcgactacgaagaagaagaagaaaaagctcccgattccgctaaacccgttactgaatctggcaagaagggttatgttggcatccatagttcgggatttcgagacttcctgttgaaaccagagcttcttcgagccattgtagattcaggatttgagcatccttcagaagtgcaacacgaatgcatccctcaagcaatcttaggaatggatgtcatttgccaagcgaaatctgggatgggaaagactgctgtttttgttttgtctacacttcagcaagttgatcctgttcctggtcaagttgcagctcttgttctttgccacacaagagaactggcttatcagatttgccacgaatttgagaggttcagcacatatcttcctgatataaaggctgctgttttctatggtggtgtcaacatcaaggttcacaaagaattgctcaagaatgaatgcccacacattgttgttggaacacctgggaggattcttgctctggctagagataaggaccttggtttaaagaacgtgaggcattttatacttgatgagtgtgacaagatgctcgaatcacttgatatgagaagagatgtgcaagagatcttcaaactgactccccatgataagcaagtgatgatgttttcagctacactcagtaaagagatccgaccagtttgcaagaaatttatgcaagatcccatggaaatttatgtcgacgatgaggccaaattgactcttcatggtcttgtccagcactatatcaaattgcaagagacagaaaagaatcgtaagctgaatgatcttcttgatgctctggatttcaaccaagtagttatttttgtcaaaagtgtcagcagagctgccgagttgaacaagttgcttgtggagtgtaacttcccatctatctgcatacattctgcaatgtcacaggaagagagattgaaacggtacaagggcttcaaagaagggaagcaaaggattctcgtggcaacagatttagttggaagggggattgacatagaacgtgttaatatagttattaactatgacatgcctgattctgctgatacttacttgcacagggtgggaagagctggcagatttggcacgaagggacttgcaattactttcgtgtcctctactgctgactctgaggttcttaatcaggtgcaatctaggtttgaggttgacataaaggagcttcctgaacaaattgacacttcaacatatatgccaaactga

SEQ ID NO: 66141 - protein, 426 aa, Glycine max
MGELKDTEAYEEELIDYEEEEEKAPDSAKPVTESGKKGYVGIHSSGFRDFLLKPELLRAIVDSGFEHPSEVQHECIPQAILGMDVICQAKSGMGKTAVFVLSTLQQVDPVPGQVAALVLCHTRELAYQICHEFERFSTYLPDIKAAVFYGGVNIKVHKELLKNECPHIVVGTPGRILALARDKDLGLKNVRHFILDECDKMLESLDMRRDVQEIFKLTPHDKQVMMFSATLSKEIRPVCKKFMQDPMEIYVDDEAKLTLHGLVQHYIKLQETEKNRKLNDLLDALDFNQVVIFVKSVSRAAELNKLLVECNFPSICIHSAMSQEERLKRYKGFKEGKQRILVATDLVGRGIDIERVNIVINYDMPDSADTYLHRVGRAGRFGTKGLAITFVSSTADSEVLNQVQSRFEVDIKELPEQIDTSTYMPN

SEQ ID NO: 66142 - DNA, 1467 bp, Glycine max
  CDS (1)..(1467)
atgaatcacaacaacagcaacaacaatagagcgaggtaccctcctgggatgggacttgggcgcgggggtttcaatccgaacctgagccagaacccgaaccagaaccagaatcatcacgcgttccaggctcggccgccgtaccaccaacagcaacaggcgcaatatgtgcagaggcatttgttgcagcagcagcagcagcagcagcagcaacagcagcaacagcagcagtggctgagaagggatgccaacgccgtcgacgaggttgagaagaccgtgcagtctgaagccgtggattcgagttcccaagattggaaagcaagactaaagattccacctgctgatactcgctataagacatatgatgtaacggcaactaaaggaaatgagtttgaggattactttttgaagcgtgagctgctaatgggaatatatgagaagggttttgaaaggccttctcccatccaagaagaaagcattccaattgctcttactggtagtgacattcttgctagggctaaaaatggaactggcaaaacagctgcattttgcattcctgcattggaaaaaattgatcaggacaataatgttattcaagttgttatactggtcccaacccgagaattggcattgcaaacttctcaagtgtgcaaagagcttggaaagcacttgaaaattcaagttatggttacaacaggtggtaccagcctgaaagatgatatactgcgcttatatcaaccggttcatttactagttggaactccaggaagaatattagatcttaccaagaaaggtgtttgtattctgaaagattgcgctatgcttgttatggatgaggccgataagcttctgtccccagagtttcaaccatctatagagcagctgattcattttcttcctacaacccgtcaaatcttgatgttttcagccacatttcctgttactgtaaaggatttcaaagacaggtatcttcaaaagccttatgtcatcaatcttatggatgagctaactttgaagggtattacacaattttatgcattcgtggaagagagacagaaagtccactgcctaaatactctattttctaagctgcaaataaaccagtctatcatcttctgcaattcagtgaatcgggttgaactacttgccaagaaaatcacagaacttgggtattcatgtttctacattcatgcaaagatgttgcaagaccatcgtaacagagtgtttcatgacttccgcaatggtgcatgtcgaaatcttgtttgtactgatctttttactagaggaatagacattcaagcagctaatgttgttattaattttgattttccaaagaatgcagagacttatttgcacagggttggtcgttcctataggtttcgctttcatctatataggattgaacaagaacttggaactgaaataaagcagattcccccacaaattgatcaggcaatttattgtcggtga

SEQ ID NO: 66143 - protein, 488 aa, Glycine max
MNHNNSNNNRARYPPGMGLGRGGFNPNLSQNPNQNQNHHAFQARPPYHQQQQAQYVQRHLLQQQQQQQQQQQQQQQWLRRDANAVDEVEKTVQSEAVDSSSQDWKARLKIPPADTRYKTYDVTATKGNEFEDYFLKRELLMGIYEKGFERPSPIQEESIPIALTGSDILARAKNGTGKTAAFCIPALEKIDQDNNVIQVVILVPTRELALQTSQVCKELGKHLKIQVMVTTGGTSLKDDILRLYQPVHLLVGTPGRILDLTKKGVCILKDCAMLVMDEADKLLSPEFQPSIEQLIHFLPTTRQILMFSATFPVTVKDFKDRYLQKPYVINLMDELTLKGITQFYAFVEERQKVHCLNTLFSKLQINQSIIFCNSVNRVELLAKKITELGYSCFYIHAKMLQDHRNRVFHDFRNGACRNLVCTDLFTRGIDIQAANVVINFDFPKNAETYLHRVGRSYRFRFHLYRIEQELGTEIKQIPPQIDQAIYCR

SEQ ID NO: 66144 - DNA, 1290 bp, Helianthus annuus
  CDS (1)..(1290)
atgggcgaaacagagattaaggataacgaatacgaggaagagcttctagactacgaagaggaggaagagaaggccactgactccaccgccgttaaagtcaacggcgaagccgtcaaaaaaggctatgtaggaattcacagctccggattcagagattttcttttgaagccagagctacttcgtgctattgtggattcaggatttgaacatccttctgaagtgcaacacgaatgtattccccaagctattctgggcatggatgtaatttgtcaagcaaaatccggtatgggcaaaaccgcggttttcgttttatcaacattgcaacagatcgaacctgtttctggtcaagttgcagcacttgttttgtgtcacacaagagagttagcttatcagatctgccatgagtttgaaagattcagcacatacctaactgacatcaaggttgcagtcttttatggtggcgttaacatcaaaattcacaaagagcttctgaaaaatgaatgccctcacattgttgttgggacacccggaaggattctcgcacttgctagagacaaagaccttgcgttgaagagtgtgaggcatttcatactagacgagtgtgacaagatgcttgagtcacttgacatgaggagagacgtgcaagaaatcttcaagatgactcctcatgataaacaagtaatgatgttttcggctacactcagcaaggagatccgccctgtctgcaaaaagtttatgcaagatccaatggaaatttatgttgacgatgaagccaagttgactctgcacggtcttgtacagcattatatcaaactgagtgagctggagaaaaaccgtaaattgaatgacctgcttgatgcgttagattttaatcaagttgtgatatttgttaaaagtgtaagcagagcagcagaactgaataaattgcttgtcgagtgtaattttccgtctatttgcatccactctggcatgtcccaagaagaaaggttgacaagatataagaatttcaaggaaggccacaagaggattctagttgcaactgatttggttggcagaggtatcgatattgaacgtgtcaatattgtcatcaattacgacatgccagattctgctgacacttatctccaccgtgtcggtagagccggtaggtttgggaccaagggtcttgctatcacatttgtgtcatcatcatctgactcagatgtgcttaatcaggttcaagagggatttgaagtggatatcaaagaacttcctgagcagattgatacttcaacatacatgccttcttag

SEQ ID NO: 66145 - protein, 429 aa, Helianthus annuus
MGETEIKDNEYEEELLDYEEEEEKATDSTAVKVNGEAVKKGYVGIHSSGFRDFLLKPELLRAIVDSGFEHPSEVQHECIPQAILGMDVICQAKSGMGKTAVFVLSTLQQIEPVSGQVAALVLCHTRELAYQICHEFERFSTYLTDIKVAVFYGGVNIKIHKELLKNECPHIVVGTPGRILALARDKDLALKSVRHFILDECDKMLESLDMRRDVQEIFKMTPHDKQVMMFSATLSKEIRPVCKKFMQDPMEIYVDDEAKLTLHGLVQHYIKLSELEKNRKLNDLLDALDFNQVVIFVKSVSRAAELNKLLVECNFPSICIHSGMSQEERLTRYKNFKEGHKRILVATDLVGRGIDIERVNIVINYDMPDSADTYLHRVGRAGRFGTKGLAITFVSSSSDSDVLNQVQEGFEVDIKELPEQIDTSTYMPS

SEQ ID NO: 66146 - DNA, 1593 bp, Hordeum vulgare
  CDS (1)..(1593)
atggaccccgaactcctctctatgcaggaggaactatcaaacgatagaaagaaggatacaaagagcaagaaggcgaagaagccgaagccagcggccgaggaggcagcggcggaagaggatgacctatccaacaagagaaagaaggataaaaagagcaagaaggacaagaagcggaagctagcggcagagaacgaggaggcagcgacggaagaagagggcaagagcagcaagaagagaggggtgaccaaagaggaaccggaccaagtaggggccgtcgagaagagcgtggcggtgactgggaaggggttcgccgaccccaagtatgcgccgctcaagtccttcgccgccgcggcgctgccaacccaggtgctcgactgctgcaaggggttcgaccggccgtcgcccatccaggcgctagcctggccgtatctcctcgatggccgcgatttcattggcatcgctgccaccggatctgggaagactattgcgtttggtgtgccggcgctgatgcacgtcaggaagaagctgagtgaaaaaggcgccaagaaggggttgccgcgatgcctcatgctggctccaacgagggagcttgctcagcagatcgcagatgtacttactgaagctggtgcgccatgcgggataaattcagtgtgcctctatggtggaacatcaaagggaccccaaatatcttcccttaaatctggagttgaaatagtcataggaactcctggtcgtatgaaagacctcattgaaatgggtgtttgtcgtcttaacgaggtttcttttgtggttcttgatgaagcagatcgcatgctggatatgggttttgagcccgaggtcagggcgattttaagccaaacatcatcggtgcgtcagatggttatgttcagtgcaacatggccttttgctgtccaccagctagcccaagagtttatggatccgaatccaataaaggttgttgttggatcggaagatcttgcagctaaccatgatgtgatgcaaattgttgaagtattggatgatagagcacgggattcaagattggttgctttgcttgacaagtatcatcgagcacagagcaaccgcgttttagtttttgtgttgtacaagaaagaagcagggcgagtagaagcaatgcttaataaaagggggtggaaagctgtttctgttcatggagacaaggctcagcatgatagaacaaaagccttatcattatttaaagaaggaaaatgtcctttaatgattgcgacggatgtggcttcacgcggacttgatattcctgatgttgaagttgtcatcaattatagttttcctttgaccacggaggattatgtacacaggattgggaggacaggtcgtgcaggcaagaaaggtgttgcacatacattcttcactcaagcggacaagggacttgctggtgagcttgtcaatgttttacgggaggctgatcaggttgttcctccagcccttacgaaatttggcacacatgtgaagaaaaaggaatcaaagatctatggttcccacttcaaggaaatcacagccgatgctcctaaatcaacaaagatcacattcggtgattcggacgaggagtaa

SEQ ID NO: 66147 - protein, 530 aa, Hordeum vulgare
MDPELLSMQEELSNDRKKDTKSKKAKKPKPAAEEAAAEEDDLSNKRKKDKKSKKDKKRKLAAENEEAATEEEGKSSKKRGVTKEEPDQVGAVEKSVAVTGKGFADPKYAPLKSFAAAALPTQVLDCCKGFDRPSPIQALAWPYLLDGRDFIGIAATGSGKTIAFGVPALMHVRKKLSEKGAKKGLPRCLMLAPTRELAQQIADVLTEAGAPCGINSVCLYGGTSKGPQISSLKSGVEIVIGTPGRMKDLIEMGVCRLNEVSFVVLDEADRMLDMGFEPEVRAILSQTSSVRQMVMFSATWPFAVHQLAQEFMDPNPIKVVVGSEDLAANHDVMQIVEVLDDRARDSRLVALLDKYHRAQSNRVLVFVLYKKEAGRVEAMLNKRGWKAVSVHGDKAQHDRTKALSLFKEGKCPLMIATDVASRGLDIPDVEVVINYSFPLTTEDYVHRIGRTGRAGKKGVAHTFFTQADKGLAGELVNVLREADQVVPPALTKFGTHVKKKESKIYGSHFKEITADAPKSTKITFGDSDEE

SEQ ID NO: 66148 - DNA, 1731 bp, Hordeum vulgare
  CDS (1)..(1731)
atgggctccgccaagtcctccaagtcctccaagaagcggaaacccgtcgccccgccgccagagtcggactccgagccggagcagacggttgacgagaccgccgctgccgaggaattcaaccaagaggagcagccgcagtcggacgcgggagacgagcgccatgaacatgacaaggaggtgcaggagacgggaaaggagaagaagaagaagaaggacaaggagggctcgggtatcctcaccagcatgctcttctcggagctccccatctccgagctcaccgccaaggccatcagggagatgaactacacccacctcgcccagattcaagctcggtcgatacctcatctgttggaaggaagggatgtgatgggagctgccaagactggctcagggaagacacttgcgttcctcataccggcaatcgagctcctctataacttgcatttctcaccgaggaatggcacaggagttattgttgtttgccctacaagggagcttgccatacagacacacaatgttgccaaggaattgatgaagtatcactcacaaacccttggatatgtaattggtggcaatggccggagaactgaagctgaccagcttgcaaagggggtcaatttgttagtagcaacaccaggcaggctgttggaccatctgcaaaacaccaagggtttcatatataagagactaaagtgtcttataattgatgaagctgatcgcattcttgagcagaactttgaggaagatatgaaacaaatatttaaacgccttccccagaatcggcagacagctcttttttctgcgacaccaactaaagaggttgaagattttgccaagttgtcatttgagaaaaacgaagaaaggaaagaaaaacctgtttatatctcagccgatgatggtaaatcaaatgctaccgtggaaggcttacagcagggctattgtgttattcctagcgacaagaggcttttggttctgtatgctttcctaaaaaagaaacagtctaagaaggtcatggtgttcttttcatcatgtagctcagtaaagttccatgcagaacttctaaattttctccagatagagtgtgaagatatccatgggaaacagaaacagcagaaacgaactacaacattctttaacttctgtaaggcagacaagggcatcttattatgcactaatgtggcagcacgtggacttgatattcctgatgtggattatattgtgcaatatgaccctccagatgaaccaaaggattacattcacagagttggtcgtactgcacgtggtgaaaaaggcaaaggaagcgccttattgttcttgttgccacaagaactgaagtttcttatttacctgaaggcagccaagatttctctcacagaatacgagttcaataataagaatgtgccaaatttacaatcgcaccttgagaacatcgttggcgagaattacttcctaaaccagtcagctaaagaagcctacagatcctacatcctggcatacaactcacacgccatgaaggacatttttaatgttcatgatcttgacatgaaggctgtagcagcatcattttgttttaagaaccctccaaaagtgaaccttgatttggagagcagcgcttctaaacgtcgtaagacgaggaaagtggatggtggggcgaggaggcatggtatcaatgccgcaaatccttatggaaggaagggtggtgatgataacaggcaatttgcaagattctag

SEQ ID NO: 66149 - protein, 576 aa, Hordeum vulgare
MGSAKSSKSSKKRKPVAPPPESDSEPEQTVDETAAAEEFNQEEQPQSDAGDERHEHDKEVQETGKEKKKKKDKEGSGILTSMLFSELPISELTAKAIREMNYTHLAQIQARSIPHLLEGRDVMGAAKTGSGKTLAFLIPAIELLYNLHFSPRNGTGVIVVCPTRELAIQTHNVAKELMKYHSQTLGYVIGGNGRRTEADQLAKGVNLLVATPGRLLDHLQNTKGFIYKRLKCLIIDEADRILEQNFEEDMKQIFKRLPQNRQTALFSATPTKEVEDFAKLSFEKNEERKEKPVYISADDGKSNATVEGLQQGYCVIPSDKRLLVLYAFLKKKQSKKVMVFFSSCSSVKFHAELLNFLQIECEDIHGKQKQQKRTTTFFNFCKADKGILLCTNVAARGLDIPDVDYIVQYDPPDEPKDYIHRVGRTARGEKGKGSALLFLLPQELKFLIYLKAAKISLTEYEFNNKNVPNLQSHLENIVGENYFLNQSAKEAYRSYILAYNSHAMKDIFNVHDLDMKAVAASFCFKNPPKVNLDLESSASKRRKTRKVDGGARRHGINAANPYGRKGGDDNRQFARF

SEQ ID NO: 66150 - DNA, 1287 bp, Hordeum vulgare
  CDS (1)..(1287)
atgggagaagccaaggacaacgaggtgtacgaggaggatcttgtcgactacgatgaggaggtggagaacgccgtcgacggcgcagccgccaacccttccgttgacgtcgtcaagaaggggtacgtgggaatccacagctcagggttcagggacttcctgctcaagccagagctgctccgtgcgatccaggactgtgggtttgagcatccttccgaagtgcaacatgaatgcatccctcaagccattcttggaatggatgtcatctgtcaagcaaaatctgggatgggcaagactgctgtttttgtcctctcaactctccagcagatcgatccggttgctggtcaagtagctgcacttgtgttatgccatacacgagagttggcataccagatttgccatgaattcgagaggtttagcaagtacctgtcagaaactaaagttgctgtcttctatggtggtgttcacataaaaaaacacaaggatttattgaagaatgaatgccctcacattgtggttggcacacctggaaggatcctagctctggctagagacaaggacctttcattgaagaatgtgaggcatttcattcttgatgaatgtgacaagatgcttgattcacttgacatgcgtcgagatgtccaggagatcttcaagatgacaccccatgataaacaagtgatgatgttttcagcaacactcagcaaggagattcgcccggtttgcaagaaatttatgcaagatcccatggaaatttatgttgatgacgaggctaaactgacccttcatggtctagttcagcactatattaaactaagtgaggcggagaagaatcgaaaattgaatgatctcttagatgcgctcgacttcaaccaaattgtgatatttgttaaaagtgttggtagggcttcagaacttaacaggctgctctgtgaatgcaattttcctgcaatctgcatacattctggaatgacacaggaggagaggctgacccggtataagaacttcaaggaggggcacaagaggatccttgtggctacggatttagttggcagggggattgatattgagcgtgtcaatattgtcataaactatgacatgcccgattctgctgatacatacttgcacagggttggaagggctgggcgttttggaaccaaagggcttgcaataacatttgttgcttctgcctctgactctgacgttctcaatcaggtgcaagaaaggtttgaggttgacatcaaggagctgcctgagcagatcgacacttcaacatacatgccatcttga

SEQ ID NO: 66151 - protein, 428 aa, Hordeum vulgare
MGEAKDNEVYEEDLVDYDEEVENAVDGAAANPSVDVVKKGYVGIHSSGFRDFLLKPELLRAIQDCGFEHPSEVQHECIPQAILGMDVICQAKSGMGKTAVFVLSTLQQIDPVAGQVAALVLCHTRELAYQICHEFERFSKYLSETKVAVFYGGVHIKKHKDLLKNECPHIVVGTPGRILALARDKDLSLKNVRHFILDECDKMLDSLDMRRDVQEIFKMTPHDKQVMMFSATLSKEIRPVCKKFMQDPMEIYVDDEAKLTLHGLVQHYIKLSEAEKNRKLNDLLDALDFNQIVIFVKSVGRASELNRLLCECNFPAICIHSGMTQEERLTRYKNFKEGHKRILVATDLVGRGIDIERVNIVINYDMPDSADTYLHRVGRAGRFGTKGLAITFVASASDSDVLNQVQERFEVDIKELPEQIDTSTYMPS

SEQ ID NO: 66152 - DNA, 1293 bp, Hordeum vulgare
  CDS (1)..(1293)
atggccgagtccaggacgggggagaacgacgtgtacgaggatgagctgctcgactacgaggaggacgacgacaaggtggtcctcgaagcctccgctgccaagcccgccgccgacgccaagaagggctacgtcggcatccacagctccggattccgcgacttcctcctcaagcccgagctgctacgggccatccaggactgcggattcgagcacccttccgaagtgcaacatgagtgcatccctcaagcaatcctcggaatggatgtcatctgccaagcaaaatccgggatgggcaagactgctgtctttgtcctgtcttctctccagcagatcgatcctactgctggtcaggtggcagcacttgtattgtgccacaccagagagctggcttaccagatttgcagcgagttcgagaggttcagcagatttctgcctgaattaaaggttgctgtattctatggaggtgttcacatcaagaaacacaaggatttgctcaagaatgactgcccccatattgtggtgggcacacccggaaggattctagctctagctagagacaaggacctttctttgaagaatgtcaggcatttcattcttgacgagtgtgacaagatgctcgagtcactggacatgaggagggatgtccaggagatcttcaagatgacacctcatgataagcaggtcatgatgttttcggcaactctcagcaaggagatccgtccgatttgcaagaaatttatgcaagatccgatggaaatttatgttgacgatgaggcgaagctgacccttcacggtctagttcagcactatataaaattgactgagtcggagaagaacagaaaattgaacgatctcttggatgcccttgatttcaaccaagttgtgatatttgtgaagagtgttagccgggctgcagagctgaacaagttgctgtgtgaatgcaacttcccttcaatctgcatccattctggcatgacccaggaagagaggctgacccgatacaagaacttcaaggaagggcacaagaggattcttgtggcgacggatctggttggcagaggaatcgacattgagcgtgtgaacattgtgataaactatgacatgcctgattcagctgatacctacttgcacagggttggaagagctgggcgttttggcaccaaggggcttgccataacttttgtttcgtcggcctcggactcggacgttcttaaccaagtgcaagaacggtttgaggtggacatcaaggagctgcctgagcagattgacacttcaacatacatgccgtcgtag

SEQ ID NO: 66153 - protein, 430 aa, Hordeum vulgare
MAESRTGENDVYEDELLDYEEDDDKVVLEASAAKPAADAKKGYVGIHSSGFRDFLLKPELLRAIQDCGFEHPSEVQHECIPQAILGMDVICQAKSGMGKTAVFVLSSLQQIDPTAGQVAALVLCHTRELAYQICSEFERFSRFLPELKVAVFYGGVHIKKHKDLLKNDCPHIVVGTPGRILALARDKDLSLKNVRHFILDECDKMLESLDMRRDVQEIFKMTPHDKQVMMFSATLSKEIRPICKKFMQDPMEIYVDDEAKLTLHGLVQHYIKLTESEKNRKLNDLLDALDFNQVVIFVKSVSRAAELNKLLCECNFPSICIHSGMTQEERLTRYKNFKEGHKRILVATDLVGRGIDIERVNIVINYDMPDSADTYLHRVGRAGRFGTKGLAITFVSSASDSDVLNQVQERFEVDIKELPEQIDTSTYMPS

SEQ ID NO: 66154 - DNA, 1242 bp, Glycine max
  CDS (1)..(1242)
atggctggactagcacctgaggggtcacagttcgatgctcgtcaatatgattccaaaatgagtgacttactttcatctgatggacaggacttcttcacatcctatgacgaggtttatgatagttttgacgctatgggtttgcaggagaatcttctcaggggaatttacgcatacggttttgagaagccatcagccattcagcaaagggggatagttcccttctgcaagggacttgatgttattcaacaggctcaatctggaactgggaagacggctactttctgctctggtattctgcagcaacttgactatagcttgactcaatgccaggccttggttttggcaccaactcgtgagcttgctcagcagattgagaaagttatgcgggcacttggagattatcaaggtgtgaaggttcatgcttgtgtgggaggtaccagtgtgcgtgaggaccagcgcattctatctagtggtgttcatgttgtggttggtacccctggtcgtgtgtttgatatgctgcgccgacagtcacttcagccagaccacatcaagatgtttgtattggatgaggctgatgaaatgctttcccgaggtttcaaggatcagatctacgatatatttcagctgcttccatctaagattcaagtgggagttttctctgccacaatgcctcctgaggcccttgagatcaccaggaagtttatgaacaaacctgtgaggatccttgtgaagcgtgatgagctcaccttggagggtattaagcaattttatgtcaatgttgaaaaggaggaatggaagctggacacactctgcgatctttatgagacattagctatcactcagagtgtcatttttgttaacaccagaaggaaagttgattggttgactgacaagatgagaagccgtgaccacacagtctcagcaacccacggagacatggaccagaataccagggacattattatgcgtgaattccgttctgggtcttcccgtgtcttgataaccactgatcttttggctcgtggtattgatgtccaacaagtgtctctagttataaattttgatctcccaacacagcctgagaactatctccatcgtattggtcgtagtgggaggttcggaaggaagggtgttgcgatcaactttgtcacaaaggatgacgagaaaatgctgtttgacatccagaagttttacaacgtgcaagttgaggagctgccttcaaatgttgctgagctcctttga

SEQ ID NO: 66155 - protein, 413 aa, Glycine max
MAGLAPEGSQFDARQYDSKMSDLLSSDGQDFFTSYDEVYDSFDAMGLQENLLRGIYAYGFEKPSAIQQRGIVPFCKGLDVIQQAQSGTGKTATFCSGILQQLDYSLTQCQALVLAPTRELAQQIEKVMRALGDYQGVKVHACVGGTSVREDQRILSSGVHVVVGTPGRVFDMLRRQSLQPDHIKMFVLDEADEMLSRGFKDQIYDIFQLLPSKIQVGVFSATMPPEALEITRKFMNKPVRILVKRDELTLEGIKQFYVNVEKEEWKLDTLCDLYETLAITQSVIFVNTRRKVDWLTDKMRSRDHTVSATHGDMDQNTRDIIMREFRSGSSRVLITTDLLARGIDVQQVSLVINFDLPTQPENYLHRIGRSGRFGRKGVAINFVTKDDEKMLFDIQKFYNVQVEELPSNVAELL

SEQ ID NO: 66156 - DNA, 1485 bp, Zea mays
  CDS (1)..(1485)
atgagccgctacgacggccgcgctgcggacgcgggctcctaccgcgaccgccgcagcgagggggcgttcggaggcgggtcgagggcgttctcggcgccgagcaaggcggacgcttccgcggcggcctcggagctggatgggctgccacgcttcgagaagaacttctacgtggagtcacccgcggtggccggcatgacggaggaagaggtggaggcgtaccgccgccgccgggagatcaccgtcgacggccgcgacgtgcccaagccggtgcttgagttccgtgatgtgggcttcccagaatatgtgttgcaagagatcacaaaagctggttttgtggaacctacccctatccaatcgcaaggttggccgatggcattgagaggccgcgaccttattggcattgcagagacaggatcagggaaaactcttgcttaccttttacctgccattgttcatgtgaatgcgcagcctattctttcccctggcgatggtccaattgtcttggtgttagctcctacacgtgaacttgctgttcagatacagcaagaagcaaccaagtttggtgcatcatcaaagataaaaagtacttgcatatatggtggtgtgccaaaaggtccacaagttcgtgatcttcaaaaaggtgttgaaattgttatagctacaccaggacgactaattgatatgattgaatcacatcatacaaacttgcgaagggtcacatatcttgttttagatgaagcagaccggatgctagacatgggatttgaacctcagattaagaaaattgtttctcagattcgtccagatcgccaaacactttactggagtgctacctggccgaaggaagttgagcagctagcaaggaatttcctttttgacccatacaaggtcactattggttctgaagacttgaaggctaatcatgccattgttcagcatgtggagatattatctgagagtcagaagtataacaagctggttaatctactggaggatataatggatggtagccgaattttaatatttatggacaccaagaaggggtgcgatcagactactagacagcttcgaatggatggttggcctgctttgtctatccatggtgacaagagccaagcagaacgggattgggtcctttctgaatttaagtcaggcaaaagtcctattatgacggccactgatgttgctgctcgaggcttagatgtcaaggatgtgaagtatgtcattaactatgactttccggggtcactcgaggattatgttcatcgtataggtcgaactggcagagcaggcgcaaaaggaacagcgtacacctttttcactgcagctaatgccagatttgccaaggaacttattaatattctggaagaagctggacaaaaggtcagctctgaattagctgctatgggtcgtggtgcacctcctccatcttcaggttaccgtgatagatatagggggtatgggggtggccgatcgtggagttga

SEQ ID NO: 66157 - protein, 494 aa, Zea mays
MSRYDGRAADAGSYRDRRSEGAFGGGSRAFSAPSKADASAAASELDGLPRFEKNFYVESPAVAGMTEEEVEAYRRRREITVDGRDVPKPVLEFRDVGFPEYVLQEITKAGFVEPTPIQSQGWPMALRGRDLIGIAETGSGKTLAYLLPAIVHVNAQPILSPGDGPIVLVLAPTRELAVQIQQEATKFGASSKIKSTCIYGGVPKGPQVRDLQKGVEIVIATPGRLIDMIESHHTNLRRVTYLVLDEADRMLDMGFEPQIKKIVSQIRPDRQTLYWSATWPKEVEQLARNFLFDPYKVTIGSEDLKANHAIVQHVEILSESQKYNKLVNLLEDIMDGSRILIFMDTKKGCDQTTRQLRMDGWPALSIHGDKSQAERDWVLSEFKSGKSPIMTATDVAARGLDVKDVKYVINYDFPGSLEDYVHRIGRTGRAGAKGTAYTFFTAANARFAKELINILEEAGQKVSSELAAMGRGAPPPSSGYRDRYRGYGGGRSWS

SEQ ID NO: 66158 - DNA, 1845 bp, Triticum aestivum
  CDS (1)..(1845)
atgtacgccatgatccgccgcgcggatcccctccggaggcgcgccgcgtcggccatcctggccgcgctgctgcagcacccggcgggcccctccgccgccggggcgtcggcgtcggtcctgcccccaaggtcgccgctcccgccgccggcgatgtggttccactccaggccggccccgctcgggttccgggagacgggggccgcgcgggccggggcgcacgctcagttcgcggcggacgaggggtggaactacgacgataagaggaagcccgcggggggcgtggctggggccggcgccggcgccaaggaggaggggcttgagatcgcaaagctcgggatctcgtccgagatcgtcgacaagctctccgccaagggcatcaccaagctgttccccatccagagagctgtccttgagccagcaatgcaaggcaaggatatggttggccgtgccaaaacggggacagggaaaactttggcatttggaatccccataatggatgcaattattcgccataacgcagctaacaaacctggaatacatcccctggcgatatgtttggcaccaacacgggaacttgcaaaacaagttgagaaagaatttgttgattcttcccggctggatacactctgtgtatatggaggcactccaattcagcaacaaatgagagttcttagccagggtgttgatgtagttgttgggacacctggacgggtaattgatctgctaaatagacgtgctctgaatttgtcaagtgtccagtttgttgttctcgatgaggcagaccagatgctgtcagtgggttttgatgaagccgttgagacaattttgcaaaatgtgcctgcaaaacgtcaaaccttgatgttctccgcaacaatgccaccctggatacgcaagctgatgcagaaatacctcaaagatcctgtcatagtcgatcttgtgggtgaagatgaccagaagctagcagaagggattagtctgttgtctattgctacagagaatcatgcaaaacctgctgtccttggacaattgattcaggaccatgctaaaggtggcaagtgcattgtatttacgcaaacaaaaagggatgctgatcggttgtcatacactatgggtcgaagtgtccagtgtcaggctcttcatggagatattacacaacaacaaagagagaggacacttcaaggatttcgtgaagggcgctttaatactttgattgccactgatgttgctgctcgtggtttggatattccaaatgttgatctggtgatacactatgaattgccaaacaattcagagatattcgttcacaggtctggccgtactggccgtgctgggaagaagggcactgcaattgtgatgtacagctacaaccaaagtagagctgtcaggggcatcgagaatgatgttggaggcaagtttaaggagcttccaaagatcaacgttgaaggttctgacttgacaatgtctagtggttttgattcgtttggaggtggaggtggaggtgggcgctcacgtggtggtggttttggtggccgcggtggtggttttggcaactcttccagcagaggtggcgggtttggtgattccggttttggtcgttcaggtggtgggtttggtcgttcaggcggcggcggcggatttggcgattcagggtttggccgatcaggtggtggtggtggattcggcgattcagggtttggccgatcaggtggtggtggaggtggatttggctcaagtggtgggtttggggattctggttcagggcggtctggtgggtttggtagcggctctggtagctctggctctagctggggtggattcggcagctttggaggcaaaagctcttga

SEQ ID NO: 66159 - protein, 614 aa, Triticum aestivum
MYAMIRRADPLRRRAASAILAALLQHPAGPSAAGASASVLPPRSPLPPPAMWFHSRPAPLGFRETGAARAGAHAQFAADEGWNYDDKRKPAGGVAGAGAGAKEEGLEIAKLGISSEIVDKLSAKGITKLFPIQRAVLEPAMQGKDMVGRAKTGTGKTLAFGIPIMDAIIRHNAANKPGIHPLAICLAPTRELAKQVEKEFVDSSRLDTLCVYGGTPIQQQMRVLSQGVDVVVGTPGRVIDLLNRRALNLSSVQFVVLDEADQMLSVGFDEAVETILQNVPAKRQTLMFSATMPPWIRKLMQKYLKDPVIVDLVGEDDQKLAEGISLLSIATENHAKPAVLGQLIQDHAKGGKCIVFTQTKRDADRLSYTMGRSVQCQALHGDITQQQRERTLQGFREGRFNTLIATDVAARGLDIPNVDLVIHYELPNNSEIFVHRSGRTGRAGKKGTAIVMYSYNQSRAVRGIENDVGGKFKELPKINVEGSDLTMSSGFDSFGGGGGGGRSRGGGFGGRGGGFGNSSSRGGGFGDSGFGRSGGGFGRSGGGGGFGDSGFGRSGGGGGFGDSGFGRSGGGGGGFGSSGGFGDSGSGRSGGFGSGSGSSGSSWGGFGSFGGKSS

SEQ ID NO: 66160 - DNA, 1578 bp, Triticum aestivum
  CDS (1)..(1578)
atgcaccacccgagggcccggtacccgcccggctacgactacggcggcggtggccgcggtggtaacggcggcggcggcggcggcggtggaggaggtggcggcgggaaccaaaactactacggcggccgaaacccgcatccccagcaccacgattaccagcagcagcagcagcagcacgcgcagaggaactcgttcccgcagcagcagcagcagcagcacgcgcagaggaactcgttctcgcagcaacagcagcagcagcatcagcaacaacagcatcagcagtggctgcggcgggaccaggccgcggcccaggcttcaggagagggtgcggccaggacggtggcgcgactcgacgcggtggacacgagctctcaagattggaaggcacagttgaatattccagctccagatactcgttttaggacagaggatgttactgcaacgaaaggcaatgagtttgaagattattttttgaaacgtgagctacttatgggaatatatgagaagggatttgaaaggccatctcctattcaagaagaaagcattccaattgctctaactggaagtgatattcttgcaagagcgaaaaacggcaccgggaagactgctgcattttgcattccagcactcgaaaagattgacccagagaaaaatgccatacaagttgttatattggtaccaacaagggaactagctctgcagacttcacaagtttgcaaagagcttggaaaatacctgaatattgaagttatggttagtactggaggaaccagcttgaaggacgacatcatgcgtttgtaccaacctgttcatttactcgccgggacacctggccgtatactagatcttaccaagaagggcatttgtatgctgaacgaatgttcaatgctcatcatggacgaggcagacaagctgttagctcctgagtttcagccttccgtggagcaactcattcgttaccttccagctagtcggcaactattgctgttttctgcaacctttcctgtaactgtcaaggattttaagcagaagtacctacctagaccttatgttattaatctgatggatgaactaacactgaaaggaatcacacaatactatgccttcgtagaagaaaggcaaaaggttcattgtctgaacacgcttttttcaaagcttcaaataaatcagtctattatattctgcaactctgttaatagagtcgagctactggcaaagaaaatcactgagcttggctattcgtgcttctacattcatgctaaaatgttgcaagaccaccgaaaccgggtgtttcatgattttcggaatggtgcttgcagaaaccttgtttgcacagatctttttactagaggaattgacattcaagctgttaatgttgtcatcaattttgacttccccaagactgctgaaacatatttgcatagggttggtcgttctggaagatttggacaccttggtttggcggtgaacttaatcacttatgaggaccgtttcaacatgtataggattgagcaagaacttgggacagaaataaaaacaatacctccacagattgacctggcggagtattgccaatga

SEQ ID NO: 66161 - protein, 525 aa, Triticum aestivum
MHHPRARYPPGYDYGGGGRGGNGGGGGGGGGGGGGNQNYYGGRNPHPQHHDYQQQQQQHAQRNSFPQQQQQQHAQRNSFSQQQQQQHQQQQHQQWLRRDQAAAQASGEGAARTVARLDAVDTSSQDWKAQLNIPAPDTRFRTEDVTATKGNEFEDYFLKRELLMGIYEKGFERPSPIQEESIPIALTGSDILARAKNGTGKTAAFCIPALEKIDPEKNAIQVVILVPTRELALQTSQVCKELGKYLNIEVMVSTGGTSLKDDIMRLYQPVHLLAGTPGRILDLTKKGICMLNECSMLIMDEADKLLAPEFQPSVEQLIRYLPASRQLLLFSATFPVTVKDFKQKYLPRPYVINLMDELTLKGITQYYAFVEERQKVHCLNTLFSKLQINQSIIFCNSVNRVELLAKKITELGYSCFYIHAKMLQDHRNRVFHDFRNGACRNLVCTDLFTRGIDIQAVNVVINFDFPKTAETYLHRVGRSGRFGHLGLAVNLITYEDRFNMYRIEQELGTEIKTIPPQIDLAEYCQ

SEQ ID NO: 66162 - DNA, 1191 bp, Triticum aestivum
  CDS (1)..(1191)
atggcaggaatggcaccagagggttcccagtttgatgctaagcagtatgacagcaagatgaccgagttactgaaccaaggtgacactggggagtttttcacctcgtatgatgaggtgcacgaaagttttgatgacatgggcctccaagagaaccttcttagaggcatctacgcttatggttttgagaagccatcagccattcagcaaagaggaattgttcccttctgtaagggtcttgatgtgattcagcaagctcagtctggaacaggaaaaactgccaccttctgttctggaatcttgcagcagcttgactatggattggttgagtgccaggcattggtccttgctccaacccgtgagcttgcacagcagattgagaaggtcatgcgtgctcttggtgactacttaggcgtcaaggtgcatgcatgtgttggtggaacttctgttcgtgaggaccaaaggattcttgccagtggtgtgcatgttgttgtcggcacacctggtcgtgtgtttgatatgttgcgcaggcaatccctccgcccagataacatcaagatgtttgtgttggatgaagctgatgagatgctttcacgtggtttcaaggatcagatctatgatatcttccagcttcttccatcaaagattcaggttggggtggtctcagcaaccatgcctcctgaggcccttgagattacccgcaagttcatgaacaagcccgtgaggattcttgtcaagagagatgagcttacccttgagggtatcaaacaattctatgtcaatgtggagaaggaagagtggaagctggatacactctgtgacctgtacgagaccctggcaattacccagagtgtcatctttgtgaacacccgccgcaaggtggactggctcaccgacaagatgagggacatcatcatgagggagttcagatctggatcttctcgtgtgctcatcaccactgacctgctggcccgtggtattgatgtgcagcaagtctcccttgtcatcaactacgacctgccaactcagcccgagaactacctccatcgcattggtcgtagtggtcggttcgggaggaagggagttgccatcaactttgtcacccgtgaagatgagaggatgctgttcgacatccagaagttctacaacgtggtcattgaggagctcccggccaatgtcgctgacctgctctag

SEQ ID NO: 66163 - protein, 396 aa, Triticum aestivum
MAGMAPEGSQFDAKQYDSKMTELLNQGDTGEFFTSYDEVHESFDDMGLQENLLRGIYAYGFEKPSAIQQRGIVPFCKGLDVIQQAQSGTGKTATFCSGILQQLDYGLVECQALVLAPTRELAQQIEKVMRALGDYLGVKVHACVGGTSVREDQRILASGVHVVVGTPGRVFDMLRRQSLRPDNIKMFVLDEADEMLSRGFKDQIYDIFQLLPSKIQVGVVSATMPPEALEITRKFMNKPVRILVKRDELTLEGIKQFYVNVEKEEWKLDTLCDLYETLAITQSVIFVNTRRKVDWLTDKMRDIIMREFRSGSSRVLITTDLLARGIDVQQVSLVINYDLPTQPENYLHRIGRSGRFGRKGVAINFVTREDERMLFDIQKFYNVVIEELPANVADLL

SEQ ID NO: 66164 - DNA, 1608 bp, Triticum aestivum
  CDS (1)..(1608)
atggaccccaaactccgctctatgcaggaggaaccatccaacgagagaaagaaggataaaaagagcaagaagaaggagaagaagccgaagtcagcggccgaggccgaggccgaggaggtagcggcggaacaggaggaactatccaacaagagaaagaaggataaaaagagcaagaaggacaagaagcggaagctagcggcagaggccgaggaggcagcggcggaagaagaggccaagagcagcaacaagagaggggtggccacagaggaaccggatcaaggagggtccgtggagaagagcgtggcggtgactgggaaggggttcgcggaccccaagtatgcgccgctcaagtccttcgccgccgcggcgctgccaacccaggtgctcgactgctgcaaggggttcgaccggccgtcgcccatccaggcgctagcctggccgtatctcctcgatggccgcgatctcattggcatcgctgccaccggatctgggaagactattgcgtttggtgtgccggcgctgatgcacgtcaggaagaagctgagtgaaaaaggcgccaagaaggggttgccgcgatgcctcatgctggctccaacaagggagcttgctcaacagatcgcagatgtacttactgaagctggtgcgccatgcgggataaattcagtgtgcctctatggtggaacatcaaaaggaccccaaatatcttcccttaaatctggagttgaaatagtcataggaactcctggtcgtatgaaagacctcattgaaatgggtgtttgtcgtcttaacgaggtttcttttgtggttcttgatgaagcagatcggatgctggatatgggttttgaacctgaggtcagggcgattttaagccaaacatcatcggtgcgtcagatggttatgttcagtgcaacatggccttttgctgtccaccagctagctcaagagtttatggatccgaatccaataaaggttgttgttggatcggaagatctcgcagctaatcatgatgtgatgcaaattgttgaagtattggatgatagagcacgggattcaagattagttgctttgctcgacaagtatcatcgagcacagagcaaccgggttttagtttttgtgttgtacaagaaagaagctgggcgagtagaagcaatgcttaataaaagggggtggaaagctgtttctgtccatggagacaaggctcagcatgatagaacaaaagccttatctttatttaaagaaggaaaatgtcctttaatgattgcgacggatgtggcttcacgaggacttgacattcctgatgttgaagttgtcatcaattatagttttcctttgaccacggaggattatgtacacaggattggaaggacaggtcgtgcaggcaagaaaggtgttgcacatacattcttcactcaagcggacaagggacttgctggtgagcttgtcaatgttttacgggaggctgatcaggttgttcctccagcccttacgaaatttggcacacatgtgaagaaaaaggaatcaaagatctatggttcccacttcaaggaaatcacagcagatgctcctaaatcaacaaagatcacattcggtgattcagacgaggagtaa

SEQ ID NO: 66165 - protein, 535 aa, Triticum aestivum
MDPKLRSMQEEPSNERKKDKKSKKKEKKPKSAAEAEAEEVAAEQEELSNKRKKDKKSKKDKKRKLAAEAEEAAAEEEAKSSNKRGVATEEPDQGGSVEKSVAVTGKGFADPKYAPLKSFAAAALPTQVLDCCKGFDRPSPIQALAWPYLLDGRDLIGIAATGSGKTIAFGVPALMHVRKKLSEKGAKKGLPRCLMLAPTRELAQQIADVLTEAGAPCGINSVCLYGGTSKGPQISSLKSGVEIVIGTPGRMKDLIEMGVCRLNEVSFVVLDEADRMLDMGFEPEVRAILSQTSSVRQMVMFSATWPFAVHQLAQEFMDPNPIKVVVGSEDLAANHDVMQIVEVLDDRARDSRLVALLDKYHRAQSNRVLVFVLYKKEAGRVEAMLNKRGWKAVSVHGDKAQHDRTKALSLFKEGKCPLMIATDVASRGLDIPDVEVVINYSFPLTTEDYVHRIGRTGRAGKKGVAHTFFTQADKGLAGELVNVLREADQVVPPALTKFGTHVKKKESKIYGSHFKEITADAPKSTKITFGDSDEE

SEQ ID NO: 66166 - DNA, 1911 bp, Triticum aestivum
  CDS (1)..(1911)
atgcgatcttcatgggctgattcagttgcgaacgccgaggaatcggcgcccgcgactggtgctgctcccgcccctgttgccaatcaccagaactcgcgtcccactcgcagctcttacgtccctcctcacctccgtggcggtggccgctcaccagagaatcaagtgccagctgctgctccaacaccagctggcgcatacccctcaggtgctgtgcagccttctggtgggtacgcagctgctgttggtggtactcgctgggctgcccctcctggtgctcctagcgctggcgtaggcgttgtccgccagggtggtggtggacgtggtgctgttggtggcggtggtggcggctggaactcccgccctggtgggtggggggaccgcagggaccgtgaaccaaacccttttggcgatagtgagccggcggctgtggatgttgactttgagagtcaacagaacacaggcatcaattttgacgcctatgaggacattcctgtggagacaagtggccacgatgtgcctccagcagtcaacacgtttgcagagattgacttgggtgatgcactgaatgagaatatacggaggtgcaagtatgtgaggcctacacctgtgcagcggcatgccattccgattgtcattggaggcagggatctgatggcctgcgctcagactgggtctgggaagacagctgctttttgtttcccgatcatcagtgggatccttaagtcaaggccaccacagaggcctagagctaggactgcatttcctcttgctctgatattatctcctactcgcgagctatcagtccaaattcatgaagaagcaaagaaatttgcataccagactggtgttaaggcttgtgttgcatatggtggagcaccaattcatcagcagttgagagaactggaaagaggtgttgatatactagtggcaactcctggtcgtttgatggatctgctggagagagctagagtatcactgcaaatggtgaattacttggctcttgatgaagctgaccggatgctcgatatggggtttgagccacagatacgcaagattgttgagcagatggacatgccccctcgtggtgtgagacagaccatgctgttcagtgctacttttccaaaggagatacaacgcctggcatcagatttccttgcagactacatcttccttgctgttggaagagttggttcaagtaccgatttgattgctcaaagggtggagtttgtccttgaagcggataaaagaagttacctcatggaccttattcatgcgcagaaggctaatgatgttcctggaaagaattctcttactttggtcttcgtggagacaaagaggggtgctgatgctctggagaactggctgtatacaaatgggttccctgcaacaagtattcatggagatcgtacacaacaggaaagggagtatgcgctgagatccttcaagagtggagcaactcccatcctggttgcaactgacgttgctgctcgtgggcttgacattccagatgtcgcccacgtcatcaattttgatctgccaaatgacattgatgactatgttcaccgcattggaagaactggaagagctgggaagtctggtctggcaactgcatttttcaatgagggcaacatgtcactggccaggccgttatgtgaactgatgcaggaagccaatcaggaggttcctcagtggctggagcgctattctgcccgttcctcattcggaggcggcggaggaggcagaaaccgcaggtcaggaggcggcggtggtgctcgatttggtggacgtgacttccgtcgcgacacgaggggcggtggcggtggaggaggtggcggttacggcggtggtggtggtggcgggtacggtggtggtggaggttatggtggaggtgcgtctagctcgtgggactga

SEQ ID NO: 66167 - protein, 636 aa, Triticum aestivum
MRSSWADSVANAEESAPATGAAPAPVANHQNSRPTRSSYVPPHLRGGGRSPENQVPAAAPTPAGAYPSGAVQPSGGYAAAVGGTRWAAPPGAPSAGVGVVRQGGGGRGAVGGGGGGWNSRPGGWGDRRDREPNPFGDSEPAAVDVDFESQQNTGINFDAYEDIPVETSGHDVPPAVNTFAEIDLGDALNENIRRCKYVRPTPVQRHAIPIVIGGRDLMACAQTGSGKTAAFCFPIISGILKSRPPQRPRARTAFPLALILSPTRELSVQIHEEAKKFAYQTGVKACVAYGGAPIHQQLRELERGVDILVATPGRLMDLLERARVSLQMVNYLALDEADRMLDMGFEPQIRKIVEQMDMPPRGVRQTMLFSATFPKEIQRLASDFLADYIFLAVGRVGSSTDLIAQRVEFVLEADKRSYLMDLIHAQKANDVPGKNSLTLVFVETKRGADALENWLYTNGFPATSIHGDRTQQEREYALRSFKSGATPILVATDVAARGLDIPDVAHVINFDLPNDIDDYVHRIGRTGRAGKSGLATAFFNEGNMSLARPLCELMQEANQEVPQWLERYSARSSFGGGGGGRNRRSGGGGGARFGGRDFRRDTRGGGGGGGGGYGGGGGGGYGGGGGYGGGASSSWD

SEQ ID NO: 66168 - DNA, 1239 bp, Triticum aestivum
  CDS (1)..(1239)
atggcggcggcgggcggcgcgacgacctcgacgaggcgcgggccgggcggcgggggccggccgatggacgacgagaacctgaccttcgagacctcggcgggggtggaggtggtcggcagcttcgacgccatggggatccgggaggacctcctccgcggcatctacggctacggcttcgagaagccctccgccatccagcagcgggccgtcatccccatcatcaccggccgcgacgtcatcgcgcaggcccagtccggcaccggcaagacctccatgatctccctctccgtctgccaggtcatcgagaccaacgtccacgaggtgcaggcgctgatactgtcgccaactagggaacttgcgacgcaaacagagagggtgatgcaggctgttggtaacttcatgagcgtctctgtgcatgcctgtgttggtggcaaaagtatcggcgaggacattaggaagctcgagtctggagtgcatgttgtttcaggaacccccggcagagtatgcgatatgatcaagagaaggaccttgcgcacaagagccatcaagctcctagtcctggacgaagccgatgagatgttgagcagaggtttcaaggatcagatatatgatgtctacagatatcttcccccagaacttcaggttgttttgatctctgcaactctgccccatgacatcttggagataactagcaagttcatgactgatccagtcaggatccttgtaaaacgtgatgagttgaccctagagggcatcaaacaattctttgttgctgttgagaaagaggaatggaagtttgatacactatgtgatctttatgatacactgaccatcacccaagcagtcattttctgcaacactaagagaaaggtggattggcttactgaaaggatgcgcaccaacaacttcacggtgtcagctatgcacggtgacatgcctcagaaggaaagggatgcgatcatgagtgagttcaggggtggcacgacccgtgttctgatcacaaccgatgtttgggctcgagggctggatgtccagcaggtctctcttgtcattaattacgatctccccaacaaccgtgagctttacatccatcgtattggtcgctctgggcgttttgggcgcaagggtgtggccatcaactttgtgcgcaaggacgacatccgtatccttcgggacatcgagcagtactacagcacgcagatcgacgagatgcccatgaacgtcgctgatcttatctga

SEQ ID NO: 66169 - protein, 412 aa, Triticum aestivum
MAAAGGATTSTRRGPGGGGRPMDDENLTFETSAGVEVVGSFDAMGIREDLLRGIYGYGFEKPSAIQQRAVIPIITGRDVIAQAQSGTGKTSMISLSVCQVIETNVHEVQALILSPTRELATQTERVMQAVGNFMSVSVHACVGGKSIGEDIRKLESGVHVVSGTPGRVCDMIKRRTLRTRAIKLLVLDEADEMLSRGFKDQIYDVYRYLPPELQVVLISATLPHDILEITSKFMTDPVRILVKRDELTLEGIKQFFVAVEKEEWKFDTLCDLYDTLTITQAVIFCNTKRKVDWLTERMRTNNFTVSAMHGDMPQKERDAIMSEFRGGTTRVLITTDVWARGLDVQQVSLVINYDLPNNRELYIHRIGRSGRFGRKGVAINFVRKDDIRILRDIEQYYSTQIDEMPMNVADLI

SEQ ID NO: 66170 - DNA, 1245 bp, Triticum aestivum
  CDS (1)..(1245)
atggcaggaatggcaccggaaggttcccagtttgacgctaagaactatgattctaagatgcaggagctgctgaaccaaggtgagactgaggagttcttcacctcttatgatgaagttcacgagagctttgatgacatgggtctccaagagaacctcctgaggggaatttatgcttatggttttgagaagccttctgccatccagcaaaggggaatcgttcctttctgcaagggccttgatgttatccagcaagcacaatctggaacaggaaagactgctactttctgttctggaatcctccaacagcttgactatggtttggttgagtgccaggccttggtccttgctcccacccgtgagcttgcacagcaaattgagaaggtcatgcgtgcacttggtgactacttgggtgtgaaggttcatgcatgtgttggaggaacttcagttcgtgaggaccaaaggattcttgcaagtggagtgcatgtcgttgttggtactcctggtcgtgtgtttgacatgctccgcaggcagtctctgcgccctgacaacatcaagatgtttgtcctcgatgaagctgatgagatgctttcccgtggtttcaaggatcagatttatgacatcttccagctgctcccagggaagattcaagttggtgtcttctctgctaccatgccccctgaagcccttgagattacccgcaagttcatgaacaagccagtgaggatccttgtcaagagggatgagctcacccttgagggtatcaagcagttctatgtcaatgtggagaaggaagagtggaagctcgacacactgtgtgacctgtacgagactcttgccatcacccagagtgtcatctttgtgaacacccgccgcaaggtggactggctcaccgacaagatgaggggcagggaccacaccgtctccgccactcacggagacatggaccagaacactagggacatcatcatgagggagttcagatcaggttcttcacgtgtgctcatcaccactgacctgcttgctcgtggtattgatgtccagcaagtgtcccttgtcatcaactatgacctcccaacccagccagagaactacctgcatcgcatcgggcgtagtggtcggttcgggaggaagggtgtggccatcaactttgtgacccgtgaagatgagaggatgctgtttgacatccagaagttctacaacgtggtgattgaagagctcccagccaacgttgccgaccttctgtga

SEQ ID NO: 66171 - protein, 414 aa, Triticum aestivum
MAGMAPEGSQFDAKNYDSKMQELLNQGETEEFFTSYDEVHESFDDMGLQENLLRGIYAYGFEKPSAIQQRGIVPFCKGLDVIQQAQSGTGKTATFCSGILQQLDYGLVECQALVLAPTRELAQQIEKVMRALGDYLGVKVHACVGGTSVREDQRILASGVHVVVGTPGRVFDMLRRQSLRPDNIKMFVLDEADEMLSRGFKDQIYDIFQLLPGKIQVGVFSATMPPEALEITRKFMNKPVRILVKRDELTLEGIKQFYVNVEKEEWKLDTLCDLYETLAITQSVIFVNTRRKVDWLTDKMRGRDHTVSATHGDMDQNTRDIIMREFRSGSSRVLITTDLLARGIDVQQVSLVINYDLPTQPENYLHRIGRSGRFGRKGVAINFVTREDERMLFDIQKFYNVVIEELPANVADLL

SEQ ID NO: 66172 - DNA, 1305 bp, Triticum aestivum
  CDS (1)..(1305)
atgatgggggaggccaaggagaacgacgtgtacgaggaggagctgctcgactacgaggaggacgacgacaaggccctcgacgcctcctccaccgccaacgccaagcccgccgccgacgccgcccaggccaagaagggctacgtcggcatccacagctccggattccgcgacttcctcctcaagcccgagctgctccgggccatccaggactgcggattcgagcacccctccgaagtgcaacatgagtgcatccctcaagcaatcctcggaatggatgtcatctgccaagcaaaatctgggatggggaagactgctgtctttgtcctgtcgtctctccagcagatcgatcctactgctggtcaggtggcagcgctcgtattgtgccacaccagagagctggcttaccagatttgcaacgagttcgagaggttcagcaaatttctgcccgaattaaaggttgctgtattctatggaggtgttcacatcaagaaacaccaggatttgctcaagaacgactgcccccacattgttgtgggcacacctgggaggattctagctctagctagagacaaggacctttctttgaagaatgtgaggcatttcattcttgacgagtgtgacaagatgcttgagtcactggacatgcggagggatgtccaggagattttcaagatgacacctcatgataagcaggtcatgatgttttcggcaactctcagcaaggagatccgtcccatttgcaagaaatttatgcaagatcctatggaaatttatgttgatgatgaggcaaagttgacccttcatggtcttgttcagcactatataaaattgacagagtcagagaagaatcgaaaattgaacgatctcttggatgctcttgatttcaaccaagttgtgatatttgtgaagagcgttagcagggctgcagagctgaacaagttgctgtgtgaatgcaacttcccttcaatctgcatccattctggcatgacccaggaagagaggctgacccgatacaagaacttcaaggaagggcacaagaggattcttgtggcgacggatttggttggcagaggaatcgacattgagcgtgtcaacattgtgataaactatgacatgcctgattcagctgatacctacttgcacagggttggaagggctgggcgttttggcaccaaggggctcgccataacttttgtttcgtcggcctcggactcggacgtccttaaccaggtgcaagaacggtttgaggtggacatcaaggagctgcctgagcagattgacacttcaacatacatgccttcgtag

SEQ ID NO: 66173 - protein, 434 aa, Triticum aestivum
MMGEAKENDVYEEELLDYEEDDDKALDASSTANAKPAADAAQAKKGYVGIHSSGFRDFLLKPELLRAIQDCGFEHPSEVQHECIPQAILGMDVICQAKSGMGKTAVFVLSSLQQIDPTAGQVAALVLCHTRELAYQICNEFERFSKFLPELKVAVFYGGVHIKKHQDLLKNDCPHIVVGTPGRILALARDKDLSLKNVRHFILDECDKMLESLDMRRDVQEIFKMTPHDKQVMMFSATLSKEIRPICKKFMQDPMEIYVDDEAKLTLHGLVQHYIKLTESEKNRKLNDLLDALDFNQVVIFVKSVSRAAELNKLLCECNFPSICIHSGMTQEERLTRYKNFKEGHKRILVATDLVGRGIDIERVNIVINYDMPDSADTYLHRVGRAGRFGTKGLAITFVSSASDSDVLNQVQERFEVDIKELPEQIDTSTYMPS

SEQ ID NO: 66174 - DNA, 1506 bp, Zea mays
  CDS (1)..(1506)
atgcgcgtggcggagcggaagcgcgcgaggcgacgcggcaacaggaggaggaggccaaggctaaggcgaccgcggcagccgaagcggtggcggcggctcgacgcggcgtcctcttcctcctccatcaccgagccggcggtggaggagcaggccaagcagatcgaggcgctctccctcgccccgtcggtggacgacgccgcaggcgaagagggcccgcccctcctcgatgactccgacgactcgcaaatccaagccgtgatttcgggtggcacggtgtacgagtcggccaccacgttcgaggatctgaagctgtcgcccgagctgcttaaggggctgcacgacgagatggggttcagccgcccgagcaagatccaggcgatcaccctgcccatgatcctcacgccgccctacaaggacctcgtcgcgcaggcgcacaacggctctggcaagaccacctgtttcgtcctcggcatgctcagccgcgtcgacccgcaacgcaagataccccaggctatctgcatttgccccaccagggagcttgcgcagcagaataaggcagttctcatgaggatgggcaagtttactggcattacatgcgcctgtgcaatcccgccagctcaaaaagactacatgccgatctcgaaaatggctccgattactgaccagatcgttatcggcacatctggtacgctcatcaaatggattacccataagaagctggccacaagggacatcaagatacttgtgtttgatgaggcagatcatatgcttgctgaggatggctttaggagtgattctgaaaggatgatgagggatatacaaagaagcgctggtggttgtcaggtgcttctcttttctgcgaccttcaatgatagggtgaaggattttgttacaaaggtcattagggatggaaatcagatatttgtgaagaaggaagagcttactttggaaaaagttaagcagtacaaagttcaggtacctgatgaatcggcaaaaatagaggttataagggacaagatatttgaatttggacagaaagttggccaggttatcatatttgttagaacaaagcaaagtactaagaatgttcacaatgctttgacgagggaggactatgtgtgctcctcaatccaaggatcccttgaccaatcagagagggaaaagataatacaggaattcaaagatggctacaccaaggttcttatatcaactgatgttcttgctcgaggttttgaccaagcacaggttaacctcgtcatcaactacgacatgccaatcaaatttggtacaagagatgaacctgattatgaggtgtacttgcacagaattggcagagctgggcgctttggccggaaaggtgctgtgttcaacttgctgtgtggtcaaaccgataatgttgtgatgaagaagatcgaggactatttccagcacagtgtgcctgaggttcggaattggcaacgtgaagaagattttgaggctgctctcaaggatgcaggtttactttaa

SEQ ID NO: 66175 - protein, 501 aa, Zea mays
MRVAERKRARRRGNRRRRPRLRRPRQPKRWRRLDAASSSSSITEPAVEEQAKQIEALSLAPSVDDAAGEEGPPLLDDSDDSQIQAVISGGTVYESATTFEDLKLSPELLKGLHDEMGFSRPSKIQAITLPMILTPPYKDLVAQAHNGSGKTTCFVLGMLSRVDPQRKIPQAICICPTRELAQQNKAVLMRMGKFTGITCACAIPPAQKDYMPISKMAPITDQIVIGTSGTLIKWITHKKLATRDIKILVFDEADHMLAEDGFRSDSERMMRDIQRSAGGCQVLLFSATFNDRVKDFVTKVIRDGNQIFVKKEELTLEKVKQYKVQVPDESAKIEVIRDKIFEFGQKVGQVIIFVRTKQSTKNVHNALTREDYVCSSIQGSLDQSEREKIIQEFKDGYTKVLISTDVLARGFDQAQVNLVINYDMPIKFGTRDEPDYEVYLHRIGRAGRFGRKGAVFNLLCGQTDNVVMKKIEDYFQHSVPEVRNWQREEDFEAALKDAGLL

SEQ ID NO: 66176 - DNA, 1857 bp, Zea mays
  CDS (1)..(1857)
atgtccgccatcgcggcctcctcggccgccgccgccgcggcgtcgaactccgatgaggaagaaaactatgaggagtacatcccagtcgccaagcgccgggccatggaggccgagcgcctccgccagctccgcctctccaagtcggcgccggcctctgccgtctcatcactcccgatgccacctcccccgcctcttttgccagcgcagacctccgttcccgacgccgccgcgaagcccagccttctcgtcaaggccacgcagcttaagcgcgcggccccggaggtgaccgccacggagcagcgcatccagcaggagaaggaagtgattgaaaatctctcagacaacaaatcgctcaggtcagtccgcgagatcgccaagggcatcatctacacggaaccgatccagaccgggtggaagccgcccctccgcctccgccgcatgccgctcgccaaagccaacgagttccggcgcaagtggcacatcatcgtcgacggtgacgatataccgccgcctgcgcgtgatttccgggatctccgcctcccggagcccatgctccggaagctgcgcgagaggggtatcgtccagcccacgccgattcaggtgcaggggctgcccgttgtgctctctgggcgtgacatgataggcatcgctttcacggggtcggggaagactctggtgttcgtgctgccgcttatcatggtggcgctgcaggaggaatcattgatgccgatcgtgcctggcgagggcccgtttgggatgatcatatgcccgtcgcgggaactggccaagcagacatatgatgtgattgagcagtttctcattccacttaaggaggccggttatccggagataaggcatttgctttgtattgggggtgtggatatgaggacacagctcgatgtgttgaagaagggcgtgcacattgtggtggcaacgcctggtcggctcaaggatttgcttgccaagaagaagatgaaccttgacaactgcaggtacttaaccttagatgaagcggataggctggttgacctaggatttgaagatgacatcaaggaggttttcgaccatttcaaggatcaaaggcaaactcttctcttttctgctactatgcctcagaagattcaaaattttgcgaagaacgcccttgtgaaaccagttactgtcaatgtgggaagagctggagcagcaaatctagacgtcattcaagaagtcgaatatgtaaaggaagatgctagaattatatacctccttgaatgcctccaaaagactccacctcctgttctcattttctgtgaaaacaaggctgatgtcgactacatccatgagtaccttcttctaaagggagtggaggctgttgctatccatggaggaaaagatcaagaggagagacagaacgcaattgactccttcaagactggtaggaaggatgttctggtggctactgatgttgcatcgaagggtcttgattttcctgacattcagcatgtcattaactatgacatgcccgccgaaatagagaactatgtccaccgaatcggtcgaactggtcgatgtgggaagactggcatagcaactaccttcatcaacaagaaccaaactgagaccacgcttctcgatctcaagcacctgctgaaggaggcaaagcagaggattccaccggtgttggcggagctcaacgatccattggatgatgaggaaataattgccaaggagagtggtgtcaaaggttgtgcgtattgtggtgggcttggccatcgtgtcagtgactgtccgaagttggagcaccaaaagtccatggcaattgctggctcgagaaaagactactttggcggcgggggttaccgaggagaaatatga

SEQ ID NO: 66177 - protein, 618 aa, Zea mays
MSAIAASSAAAAAASNSDEEENYEEYIPVAKRRAMEAERLRQLRLSKSAPASAVSSLPMPPPPPLLPAQTSVPDAAAKPSLLVKATQLKRAAPEVTATEQRIQQEKEVIENLSDNKSLRSVREIAKGIIYTEPIQTGWKPPLRLRRMPLAKANEFRRKWHIIVDGDDIPPPARDFRDLRLPEPMLRKLRERGIVQPTPIQVQGLPVVLSGRDMIGIAFTGSGKTLVFVLPLIMVALQEESLMPIVPGEGPFGMIICPSRELAKQTYDVIEQFLIPLKEAGYPEIRHLLCIGGVDMRTQLDVLKKGVHIVVATPGRLKDLLAKKKMNLDNCRYLTLDEADRLVDLGFEDDIKEVFDHFKDQRQTLLFSATMPQKIQNFAKNALVKPVTVNVGRAGAANLDVIQEVEYVKEDARIIYLLECLQKTPPPVLIFCENKADVDYIHEYLLLKGVEAVAIHGGKDQEERQNAIDSFKTGRKDVLVATDVASKGLDFPDIQHVINYDMPAEIENYVHRIGRTGRCGKTGIATTFINKNQTETTLLDLKHLLKEAKQRIPPVLAELNDPLDDEEIIAKESGVKGCAYCGGLGHRVSDCPKLEHQKSMAIAGSRKDYFGGGGYRGEI

SEQ ID NO: 66178 - DNA, 1722 bp, Zea mays
  CDS (1)..(1722)
atgaggctaagtattgggcaagtccatcgaaatgttcttgcgctggcatcttctcggtcatgttttgttctgggagatcgtgtttcgttcaggatgctgtcccaaccacgggtagctggatttcatcagactgcttggcgtggtagtcaaattttggaagataacaggggaggaccattgactcttgctagcctagaagtgcaaagcagggttgaatatggaaaaaaggggaaaatggaacgaactggaggtccaaagccaagttcaagagcttcttccctctatgtgaaaccaaaggtttcttcaaatgtcaaaccagcaaagagtgccttgatgaagccagctgggataaagaagacactgaaggtagatgaggctctgttttcggccaagtcatttgaagaacttggtttgccacctttgcttgttgaccagttgaacaaggaaggtctgactgccccaactgaggtccaatccgcagcaattcctataatagcacaaaagcatgatgttgtgatccagtcatatactggctcagggaaaactcttgcttatcttcttccaattctttctgatataggccctctgaagaggactatggaacaagaccattctgagaaaagatcaggtatagaagcagtcatcgttgctccttcgagagaattaggaatgcagattgtgcgagaagtggagaagattttgggtcctaatgacaaaagactggtccagcaacttgttggcggagctaatcgttccaggcaggaagaagcattgaagaagaacaaaccaatcattgttgtcggaacacctggccgtatttctgaaatttctgcagcaggtaagctacacactcatggctgccgttttcttgtactggatgaagtcgaccagcttctgtcttttaattaccgtgaagatatgcatagaattttggagcatgttggaaggagacctggaggcacatctagggatattcttggcccacttgcgagacgatctgagcgtcagactatcctggtttctgcaacaataccattttcagttatacgagcagcaaggagttggggtcatgatccagttctcattagagctaaaagtgtagttccacttgattcaatcactgtgccaagacctgcgttatcccaaagtgacgctaaccccagttcgtcatcgcagtcagtgaaccaagctgctgttggcagcttgccgccatctttggaacactactattgtacggccaaggcgcagcacaaggttgacacattacggaggtgcatccatgctctggaagcacagacagtgattgcatttatgaacaacaccaagccactgaaggatgttgtgtttaagttggaggcccgtggtatcaaagccactgagctacatggagaccttggaaagcttgcaaggtcgacagttttgaaaaagttcaaggatggtgaattcagagttctcgttacgaatgagctgtctgccagaggactggacgtgccagaatgtgaccttgtggttaatctggaccttccaactgactccacacattatgctcacagagctggaagaactggacgtcttgggcggaaagggatcgtggtcacaatatgcgaagaaagcgagggatttgttgtaagaaaaatgcgcaagcagttagatgtggccatcaagccatgcgagttcactgaaggcgagcttgttgtccacaaggaggaagatgtggaataa

SEQ ID NO: 66179 - protein, 573 aa, Zea mays
MRLSIGQVHRNVLALASSRSCFVLGDRVSFRMLSQPRVAGFHQTAWRGSQILEDNRGGPLTLASLEVQSRVEYGKKGKMERTGGPKPSSRASSLYVKPKVSSNVKPAKSALMKPAGIKKTLKVDEALFSAKSFEELGLPPLLVDQLNKEGLTAPTEVQSAAIPIIAQKHDVVIQSYTGSGKTLAYLLPILSDIGPLKRTMEQDHSEKRSGIEAVIVAPSRELGMQIVREVEKILGPNDKRLVQQLVGGANRSRQEEALKKNKPIIVVGTPGRISEISAAGKLHTHGCRFLVLDEVDQLLSFNYREDMHRILEHVGRRPGGTSRDILGPLARRSERQTILVSATIPFSVIRAARSWGHDPVLIRAKSVVPLDSITVPRPALSQSDANPSSSSQSVNQAAVGSLPPSLEHYYCTAKAQHKVDTLRRCIHALEAQTVIAFMNNTKPLKDVVFKLEARGIKATELHGDLGKLARSTVLKKFKDGEFRVLVTNELSARGLDVPECDLVVNLDLPTDSTHYAHRAGRTGRLGRKGIVVTICEESEGFVVRKMRKQLDVAIKPCEFTEGELVVHKEEDVE

SEQ ID NO: 66180 - DNA, 1209 bp, Zea mays
  CDS (1)..(1209)
atggatcaaatgggatcaagcgcccaaggtgacgaaaaagaagatgcatccataatagacacagggctacttccaaattccgaggaagttggtgtctatgacagtttcagtgagatgggtcttcaggagaatctactcaagggaatatatcaatatggtctggagaagccttccgcggtccaccaaagaggaatcgtcccactatgcaagggctttgatgtgctccatcgatctctgtctggaacaactgagacgatctgctccggcgtacttcagcgagttgactacggatctgcagaatgccaggctttgatccttgtaccgacacccgacttggcacaagagactctgaaagttcttgaggcacttggtgagttccttggtgttacagctcaaacttgcacaggaggaactagtgcccatgcagaccagcaagccctgctaagtggagctcaggttctagttggcacccctgattgcattcttgacatgttgcaaaagcatgcactatgcccagaccatgttagaatgcttttcttggatgaagcagatgaactactcacaggaggttccaaggatcagatctataagatcatcgtgcatctcccagacaagattcaggttgggctcttctccgctacctactccaccgaagctatagagagcagccgcagactcatggataagcccgtggcggtcattgtcccgagagacgaagagctaaagaacgtcaagcagtactatctggcagtcgaaaacgaaggactgaagctacgaaaactgttggctcttttcaagaccacagggacggagcagctcgtcatcttcgcgaacacgcgggacaaggtgctgtccctcgcagaagacgtcggcaagcgttacgccgtctcggcaagccatgacggcatggaccagcgcgccagggacgcggccgtccagaagttcaggtctgggtcgtccagcatcctcatcgccactgaccacggaggcaccaccaacgcgatgccgcaggttcccatcatcatcaactatgatcttccgacagagtccatgcggtacgtccgtcgtctccagcagcagaacaggcagttcaggaggtcggtcagtgtggccatcagtttcgtgactcctgctgaccgacgcaccctctccgccatcacgagcttttgcaagtgctacatgggggagctgcccaccgacttgaaatga

SEQ ID NO: 66181 - protein, 402 aa, Zea mays
MDQMGSSAQGDEKEDASIIDTGLLPNSEEVGVYDSFSEMGLQENLLKGIYQYGLEKPSAVHQRGIVPLCKGFDVLHRSLSGTTETICSGVLQRVDYGSAECQALILVPTPDLAQETLKVLEALGEFLGVTAQTCTGGTSAHADQQALLSGAQVLVGTPDCILDMLQKHALCPDHVRMLFLDEADELLTGGSKDQIYKIIVHLPDKIQVGLFSATYSTEAIESSRRLMDKPVAVIVPRDEELKNVKQYYLAVENEGLKLRKLLALFKTTGTEQLVIFANTRDKVLSLAEDVGKRYAVSASHDGMDQRARDAAVQKFRSGSSSILIATDHGGTTNAMPQVPIIINYDLPTESMRYVRRLQQQNRQFRRSVSVAISFVTPADRRTLSAITSFCKCYMGELPTDLK

SEQ ID NO: 66182 - DNA, 1926 bp, Zea mays
  CDS (1)..(1926)
atggcagcatccacggcggcggcggccgcgcggaagggagcgctgacggatcagaggttctcggagctttcccccgcgctatccccggaggtggtggaggcactggaccgcggcggcttccagcggtgcacgcccgtgcaggcggcggccatcccgcacctgctgtcgcacaaggacgtcgccgtcgacgccgccacaggctccgggaagacccttgccttcatcgtccccgtcgttgagatcctccgccgccgctcctccccgcccaagtcacacgaggtccttgctctgattatctctcccacgagagaattgtcctcgcaaatattcaatgtggcccagcccttcttcgcgaccctgaatggcgtgtcgtccatgctcctggtgggtgggctggatatcaaagcagagctcaagaaggtagaggaagagggcgcaaacatattggtgggcactcccgggaagctgtttgatataatgcacactgatgctctagagtacaagaatcttgagattttgatcctagatgaggctgataggctcttggatatgggattccagaaacatattaacttcatactttcaatgttgccaaagctgaggaggactgggcttttctcagctacccagacgaaagctgttgcggacctatccaaagcagggttgagaaatcctataagggttgaggttaagacagaggcaaagtccacaagcaaagatgctggacagcaagagcttggtccatccataacaccattagggcttcggttggagtatatgatatgtgaagcatcaaagaagtcatctcagcttgttgatttccttgtgcagaatagtgggaagaaaataatggtatattttgcaacatgtgcttgtgtagattattgggctgttgttcttccactaattaagtcgcttaaaggttctccaataattgcttaccatgggaagatgaaacagagccttcgagagaaagctttggcatcattttctgctctttcaagtggcgttctagtctgcactgatgttgcagcaaggggtcttgacataccaagtgttgatctgattgtgcagtatgatccacctcaagatcccaacgttttcatacatagagctggccgtacagcacgctatgatcaagaaggggatgctattgtttttctcttaccaaaggaggatacttatgttgagttcttgaagcttcgaggtgttcctctcacagaaagggaatgcctcgcaaacactgatgatgtcataccgcagattagaagtgctgcgctcgaagatcgtaatgtcatggagaaaggacttagagcgtttgtttcgtttgtccgagcatacaaggagcaccactgctcttacatttttaggtggaaagatctcgagattggaaaactagctatggagtatggtttactccagatcccatccatgccagaagtgaagcatcattctctttcactagagggatttatttctgttgatgatgttgatattacacaaatcaagtacaaggataaagctcgagaaaaacaacgcaagaaggcgctgaaaaggaaagcagaagaggaggctcaaaatccaaagccggagaggaagagacctccagagaagccggagaagccaaagcggaagaagacgggcaagcagcgtcagtcaatccaaactaaggaggacctggatgagctggcgcacgagtaccggcttctgaagaagctcaaacgtggagacatcgatgaagaggagtacgagaagctcactgggttcggagattctgatggcgaagcttccgatggggatgggagcaacttggacgaaaggaagaagggcaacaaggcgcagaaaaagcccaagcagagaggaaaatgcaaaagtgggtctaagaagttcgaagggaggagtaaattgaggagcaaaagaagatag

SEQ ID NO: 66183 - protein, 641 aa, Zea mays
MAASTAAAAARKGALTDQRFSELSPALSPEVVEALDRGGFQRCTPVQAAAIPHLLSHKDVAVDAATGSGKTLAFIVPVVEILRRRSSPPKSHEVLALIISPTRELSSQIFNVAQPFFATLNGVSSMLLVGGLDIKAELKKVEEEGANILVGTPGKLFDIMHTDALEYKNLEILILDEADRLLDMGFQKHINFILSMLPKLRRTGLFSATQTKAVADLSKAGLRNPIRVEVKTEAKSTSKDAGQQELGPSITPLGLRLEYMICEASKKSSQLVDFLVQNSGKKIMVYFATCACVDYWAVVLPLIKSLKGSPIIAYHGKMKQSLREKALASFSALSSGVLVCTDVAARGLDIPSVDLIVQYDPPQDPNVFIHRAGRTARYDQEGDAIVFLLPKEDTYVEFLKLRGVPLTERECLANTDDVIPQIRSAALEDRNVMEKGLRAFVSFVRAYKEHHCSYIFRWKDLEIGKLAMEYGLLQIPSMPEVKHHSLSLEGFISVDDVDITQIKYKDKAREKQRKKALKRKAEEEAQNPKPERKRPPEKPEKPKRKKTGKQRQSIQTKEDLDELAHEYRLLKKLKRGDIDEEEYEKLTGFGDSDGEASDGDGSNLDERKKGNKAQKKPKQRGKCKSGSKKFEGRSKLRSKRR

SEQ ID NO: 66184 - DNA, 1224 bp, Zea mays
  CDS (1)..(1224)
atggcggcgcccaccacctcccgccgcggccccggcggcgcgcgcaacatggacgacgaaaacctaaccttccagacctccccgggggtcgaggtcgtcagcagcttcgaccagatgggcatcaaggacgacctcctccgcggcatctacggctacggtttcgagaagccctccgccatccagcagcgcgccgtgctccccatcatcaacggccgcgacgtcatcgcgcaggcccagtccggtaccggcaagacgtccatgatctccctcaccgtctgccagatcgtcgacaccgccgtgcgcgaggtgcaggctttgattctctcgcctactagggagcttgcttaccaaacagagagagttatgccggctattggcgaccacctcaacgtccaagtgcacgcttgcattggtggaaagagtattgatgaggacatcaggaggctcgagaatggggtgcatgtcgtctcaggaactccaggcagagtctgtgatatgatcaagaggaggacactgcgaacaagagccatcaagcttctagttctggatgaagctgatgagatgttgagtagaggctttaaggatcagatttacgatgtctacagatatctccctccagaacttcaggtggttttgatctctgcaactcttcctcatgagatcttggagatgactagtaagttcatgaccgaaccggttaggatccttgtgaagcgtgatgagctgaccctggagggcatcaaacaattctttgttgctgttgagaaagaggagtggaagtttgatacactttgtgatctttatgatacactcaccatcacccaagctgttattttctgcaatactaagagaaaggtggattggctcactgaaaaaatgcgtacaaataacttcaccgtatcagctatgcacggtgacatgccccaacaagaaagggatgccattatgggtgagttcaggtctggcgcaactcgtgtgctaataactacagatgtttgggctcgaggactggacgttcagcaggtttcacttgtcataaattatgatctcccaaataatcgtgagctttacatccatcgcattggtcgttctggtcgttttgggcgcaagggtgtggcgatcaatttcgtgcgcaaggatgacatccgtatactgagagatatagagcagtactacagcacacaaattgacgagatgccaatgaatgttgctgatcttatttga

SEQ ID NO: 66185 - protein, 407 aa, Zea mays
MAAPTTSRRGPGGARNMDDENLTFQTSPGVEVVSSFDQMGIKDDLLRGIYGYGFEKPSAIQQRAVLPIINGRDVIAQAQSGTGKTSMISLTVCQIVDTAVREVQALILSPTRELAYQTERVMPAIGDHLNVQVHACIGGKSIDEDIRRLENGVHVVSGTPGRVCDMIKRRTLRTRAIKLLVLDEADEMLSRGFKDQIYDVYRYLPPELQVVLISATLPHEILEMTSKFMTEPVRILVKRDELTLEGIKQFFVAVEKEEWKFDTLCDLYDTLTITQAVIFCNTKRKVDWLTEKMRTNNFTVSAMHGDMPQQERDAIMGEFRSGATRVLITTDVWARGLDVQQVSLVINYDLPNNRELYIHRIGRSGRFGRKGVAINFVRKDDIRILRDIEQYYSTQIDEMPMNVADLI

SEQ ID NO: 66186 - DNA, 1554 bp, Zea mays
  CDS (1)..(1554)
atggatccacgcgccaggtatccttcgggcatgggcaacggccgcggtgggacccctaactactacggccgcggcccaccgccgcaacagccgcatcagcaccaccaccagcagcagcagcagacatcgggggcgcatcaccaccagcagtacgcgcagaggcagcagcaacagcaccgccacagccacaaccaccagcagcaacagcagcagcaccagagtcagcagcagcagcagcagtggctgcggcggaatcagattgcccgcgaggccgcgggcgcagccgtgaccagcgagccgaaggccctggcgccatccacggccgccgacggcgtcaattcgagttcgcaagattggaagacccaattgaagcttccgcctcctgatacacgctacaggacagaggatgttacagccaccaagggaaatgagtttgaagactattttctcaagcgtgaactcctaatgggtatttacgaaaagggatttgaaagaccctctcctattcaagaggaaagcattcctattgctttaactggtagtgacattcttgcaagagcgaagaatggaactggcaagactgctgcattttgtattcctgcactggaaaagattgatcaagaaaaaaatgctattcaagttgttatattggttcccacaagggaattggctctacaaacatcacaagtttgtaaagagcttggtaaacatttgaagatccaagttatggtcaccactggtggaaccagcttgaaggatgatattgttcgtctgtaccaacctgtgcacttaattgttggaacacctggccgtatttgggatcttacaaagaaaggtgtttgcattttgaaggactgttcaacgcttattatggatgaggcagacaagcttctctctcctgagtttcaaccttccatagaacagttgattcgctacctccctgctagtcgacagattttgatgttctcagcgacattccctgtgactgttaaggagttcaaggacaaatatcttcctaaaccttatgtgattaaccttatggatgaacttacactgaagggaattacacagttctatgcttttgttgaagaacgacagaaagttcactgtctcaacaccctcttttccaagcttcaaatcaatcagtcaataatattctgtaactctgtaaatcgtgttgaactattggcgaagaagatcacagagcttggttattcttgcttctatattcatgcaaagatgctacaggaccaccgcaatagagttttccatgatttccgtaatggagcgtgcaggaatcttgtttgtactgatctttttacaaggggaatagatattcaagctgtgaatgttgttatcaattttgatttccccaagaactctgaaacatatctccacagggttggtagatctgggagatttggccaccttggtctggccgttaatttgatcacctatgaggatcggtttaacttgtataggattgaacaagagcttgggactgaaataaaaccaattcctcctcagatagaccaggctatatattgccaatga

SEQ ID NO: 66187 - protein, 517 aa, Zea mays
MDPRARYPSGMGNGRGGTPNYYGRGPPPQQPHQHHHQQQQQTSGAHHHQQYAQRQQQQHRHSHNHQQQQQQHQSQQQQQQWLRRNQIAREAAGAAVTSEPKALAPSTAADGVNSSSQDWKTQLKLPPPDTRYRTEDVTATKGNEFEDYFLKRELLMGIYEKGFERPSPIQEESIPIALTGSDILARAKNGTGKTAAFCIPALEKIDQEKNAIQVVILVPTRELALQTSQVCKELGKHLKIQVMVTTGGTSLKDDIVRLYQPVHLIVGTPGRIWDLTKKGVCILKDCSTLIMDEADKLLSPEFQPSIEQLIRYLPASRQILMFSATFPVTVKEFKDKYLPKPYVINLMDELTLKGITQFYAFVEERQKVHCLNTLFSKLQINQSIIFCNSVNRVELLAKKITELGYSCFYIHAKMLQDHRNRVFHDFRNGACRNLVCTDLFTRGIDIQAVNVVINFDFPKNSETYLHRVGRSGRFGHLGLAVNLITYEDRFNLYRIEQELGTEIKPIPPQIDQAIYCQ

SEQ ID NO: 66188 - DNA, 2301 bp, Zea mays
  CDS (1)..(2301)
atgtcgaagcggccgaagctcgagggtttcagcatcccgcggcccacctcctacaacttcgagcgctcgcagtccgtgcagcggctctaccgtccgaccgatgacccagacctcgacgacatcgccttctccgacgacgccccctcagatgcccaagccagcaccgcggtagaaggaaaggccgagaatgaggaggagatggacccgctcgacgccttcatggccgagatccaggaggagatccgtgcgccgcccccgccgcccaagcccgaggcgcttcgccgcacggattccgacgatgacgaggatgaccccgtcgagagcttcctgcgggccaagaaggacgctggcctcacgctggccgccgacgtcatgcgcgctggttacgactccgatgaggaggtctacgccgctgccaaggccgtcgacgccggcatgatggaatacgactctgatgacaaccccatagtcatcgacaagaagaaaatagagcccataccagcactcgatcactcgaccattgagtatgacgccttcacaaaagatttctacgaggagaagccatcgatttcaggtatgagtgaccaagaggtaacagattatatgaaaagtttgtcaattcgtgtttctggttttgatgtgccgaggccaataaaaaactttgaagattgtgggtttcatgtacctctaatgaatgctattgccaaacaagcttatgaaaaaccaactacaattcagtgccaggctttacctattgtactttcagggagagatatcattggtattgcaaaaactggctctggtaaaactgcagcttttgtgctccctatgattgttcatattatggatcagcctgagcttgagaaagaagaaggtccaataggagtcatttgtgctccaacaagagaattggcacatcagatatatctcgaagctaagaagtttgcaaagccttacaaccttcgagttgctgctatatatggtggtgtttccaaatttgaccagtttaaagaactgaaagcaggttgtgaaatagtcattgcaactccagggagattaatagacttgctgaagatgaaggcattgaagatgttcagggcaacttatctggttcttgatgaagctgatcgaatgttcgatcttggatttgagccacaaatacgatccattgttggtcaaattagaccagatcgacaaactttacttttttctgcaacaatgccatacaaagtagagcgtttggcaagagaaatattaactgatcctattagagttacagttggtcaagttggcggtgctaatgaagacattaaacaagttgttaatgtactcccttctgatgttgagaaaatgccttggcttttggagaaattgcctggaatgattgatgatggagatgttcttgcattcgcatctaaaaaggctagagtggacgagatagagaaagagttgaatcagagaggattcagaattgcagcacttcatggcgacaaggatcaagcttctcgtatggagaccctgcagaagttcaaatctgggacataccatgttctggttgcaactgatgttgccgcacgaggtcttgacatcaaatcgattaaaacagttgtcaactttgatatcgcaaaagagatggatatgcatattcaccgaattggaagaactagtcgtgctggcgataaagatggcactgcatatactctgattacacagaaggaggcacactttgccggtgaactggttcaaagtttgattgctgctggccaggatgtacccaatgaactcatggatctggctatgaaggatggaagattcagagcaaaacgagactccaggaaaggtgggaagaaaggtggcaaaggaaaaggtggtgttggcggtgctgggcgcgggcgcggtgtgcgtggagttgattttggcctcggcataggttacaatgccgaatctggttcacaagtgcctgctgcaagatctgctgctgtaaattctctgaagacagggatgttgcaacgatttaagagcagctttgtctctggatcttcaaatacaccaagcagcagtgcaccttcctttgtaagaccagcactccgtggctttgtgtctggcggcaccattggaggagacacacggcctgcacaggcagcccccactttcatccctgcatcccggcctgcacagcctgcccccgcggtccctgcatcccagcctgcaggaaataacaacgaaaatgggaacccgaatccagaaagttcacgggatcagttcagggagagaaaacgaccatcaggttgggatcgctag

SEQ ID NO: 66189 - protein, 766 aa, Zea mays
MSKRPKLEGFSIPRPTSYNFERSQSVQRLYRPTDDPDLDDIAFSDDAPSDAQASTAVEGKAENEEEMDPLDAFMAEIQEEIRAPPPPPKPEALRRTDSDDDEDDPVESFLRAKKDAGLTLAADVMRAGYDSDEEVYAAAKAVDAGMMEYDSDDNPIVIDKKKIEPIPALDHSTIEYDAFTKDFYEEKPSISGMSDQEVTDYMKSLSIRVSGFDVPRPIKNFEDCGFHVPLMNAIAKQAYEKPTTIQCQALPIVLSGRDIIGIAKTGSGKTAAFVLPMIVHIMDQPELEKEEGPIGVICAPTRELAHQIYLEAKKFAKPYNLRVAAIYGGVSKFDQFKELKAGCEIVIATPGRLIDLLKMKALKMFRATYLVLDEADRMFDLGFEPQIRSIVGQIRPDRQTLLFSATMPYKVERLAREILTDPIRVTVGQVGGANEDIKQVVNVLPSDVEKMPWLLEKLPGMIDDGDVLAFASKKARVDEIEKELNQRGFRIAALHGDKDQASRMETLQKFKSGTYHVLVATDVAARGLDIKSIKTVVNFDIAKEMDMHIHRIGRTSRAGDKDGTAYTLITQKEAHFAGELVQSLIAAGQDVPNELMDLAMKDGRFRAKRDSRKGGKKGGKGKGGVGGAGRGRGVRGVDFGLGIGYNAESGSQVPAARSAAVNSLKTGMLQRFKSSFVSGSSNTPSSSAPSFVRPALRGFVSGGTIGGDTRPAQAAPTFIPASRPAQPAPAVPASQPAGNNNENGNPNPESSRDQFRERKRPSGWDR

SEQ ID NO: 66190 - DNA, 2019 bp, Zea mays
  CDS (1)..(2019)
atgacgtcgtcggcgtccgcgccggcgtccaatggaccgcgctacgcgccgccggatccaacgctgcccaagccgtggagggggctcatcgacggcaacacggggtacctctacttctggaaccctgagaccaaggttacgcagtacgagcgccccgtcgcggccgtgcccaactccccgccgcagccgcctggctactccaggcccgaggagaggccgagaagcagcacaccttccgagcggagctcggaaaccacggtgagccgcccgcagtatgcacctctctcggataacagggcaaggaatgaccactcggagccacattatgcatctggagtgaacccttcacaaagtgctccttccactaatcaagtttctcaggctgccagtggaaaccaaatgtcgacagaagcatatcgtgctaagcatgagattaccatcatcggcaacgagtcacctgcaccattcatgacatttcagtccacatgcttcccatcagatattctaagggaggttctgcaagcaggattctctgcaccaactcctatccaagctcagtcatggccaattgctatgaagggtagggatatagtagctgtggcaaagacaggttcaggaaaaacactgggctatctcctcccagggtttattcttctgaagcgcctgcatcataattcaagggaaggtccaacagtattagttttgtccccaaccagggaattggcaacacaaattcaagatgaagcaatcaagtttggcagatcttcaagaatatcttctacttgcttatatggaggtgctccaaaaggtcctcagctaagggagttggagcgtggtgccgatgttgttgttgcaactcctgggagattgaacgacattttggaaatgaataaagtgagcctgcgccaagtatcatatcttgtccttgatgaagctgaccgtatgcttgatatgggatttgagccacaaataagaaaaattgtgaaacaaataccacctagacggcaaactcttatgtacactgccacatggccaaaagaggttagaaaaatagcgtcggatttactgaataacccagttcaagttaacattggaaacactgatcagctggttgcaaataaatcaattactcagcatgtggaagttatcccacatatggagaaatcaagacgacttgatcagatcttgcgttcacaagatcctggatcaaaaatcataatattttgctccaccaagaggatgtgtgatcagttggctagaaacctatcacggcagtatggtgcttctgctattcatggtgataaatcacaggctgagagggattctgtgttgaatgacttccgaagcggcaggtgtccagtactcgtagccactgatgtggccgctcgaggcttggacataaaggacatcaggatcgtggttaattatgatttcccaactggtgtggaggactatgtccatcgaattgggagaacaggtagggctggcgcaacaggatctgcctacacattctttggtgaccaggattcaaagtacgcttcagaacttgtgaagattttggagggtgcaaaccagtctgtgccaccacaattaaaagaaatggcccttcgtggaggatatggtggaagatcacgtcgatgggcatcttctgatgactcttatggtagtcagggatatggtgctaaaagatcaactgatagtttcaagaacagcagcttcggcaaccaggccgggggtggttcaagctttcactcgagcttccataacagctctagtggcaatcagttcggtgatactacaagctttcatgccagctatggtaacagcagccagaacaatcagacgggtgacaatccgagcttcccacccagctccagcaacaatcagtccggggatggtctcagttttcatgaaaggttctatggatcacgcggaagggacgagagcagatcaaacaatgatggattccgtgctaggagcagaagtcctggcaagcctgtggaagtttccaactggtga

SEQ ID NO: 66191 - protein, 672 aa, Zea mays
MTSSASAPASNGPRYAPPDPTLPKPWRGLIDGNTGYLYFWNPETKVTQYERPVAAVPNSPPQPPGYSRPEERPRSSTPSERSSETTVSRPQYAPLSDNRARNDHSEPHYASGVNPSQSAPSTNQVSQAASGNQMSTEAYRAKHEITIIGNESPAPFMTFQSTCFPSDILREVLQAGFSAPTPIQAQSWPIAMKGRDIVAVAKTGSGKTLGYLLPGFILLKRLHHNSREGPTVLVLSPTRELATQIQDEAIKFGRSSRISSTCLYGGAPKGPQLRELERGADVVVATPGRLNDILEMNKVSLRQVSYLVLDEADRMLDMGFEPQIRKIVKQIPPRRQTLMYTATWPKEVRKIASDLLNNPVQVNIGNTDQLVANKSITQHVEVIPHMEKSRRLDQILRSQDPGSKIIIFCSTKRMCDQLARNLSRQYGASAIHGDKSQAERDSVLNDFRSGRCPVLVATDVAARGLDIKDIRIVVNYDFPTGVEDYVHRIGRTGRAGATGSAYTFFGDQDSKYASELVKILEGANQSVPPQLKEMALRGGYGGRSRRWASSDDSYGSQGYGAKRSTDSFKNSSFGNQAGGGSSFHSSFHNSSSGNQFGDTTSFHASYGNSSQNNQTGDNPSFPPSSSNNQSGDGLSFHERFYGSRGRDESRSNNDGFRARSRSPGKPVEVSNW

SEQ ID NO: 66192 - DNA, 1500 bp, Zea mays
  CDS (1)..(1500)
atgcaccagcctagagctcgctacccacccggctatggctccggcggtggaggcggagccggacgtggcggtggaggcggaaatggaggaggtggcggaaaccacaactactacggccgaaacccgcagcaacaccactaccaccagcagcagcagtcgcagcactctcataggaactcttcgtaccagcaacagtggctgcggcgagaccaggcccccgccgttgcgggggcagcgtccggaaacgctgtggccaagacggcgtctcagcttgacgccgtaggctcgagctcccaagactggaaggctcaactaaatataccagctccagatacacgctacaggacagaggatgtcactgcaacaaaaggcaatgagtttgaagattatttcttgaaacgtgaactgcttatgggaatctacgaaaagggatttgaaagaccatctcctattcaagaagaaagcattcctattgcgctgactggaagtgatattcttgcaagggcaaaaaatggcactggaaagactgctgccttttgcattccggcacttgaaaaaattgatcctgaaaaaaatgctattcaagttgttatactagtaccaacaagggaactggctctgcaaacttcgcaagtctgtaaagagctcgggaagtaccttaacattcaagttatggttagcactggaggaactagcttgaaggatgacatcatgcgtttataccaacctgttcatttacttgttgggactcctggccgaatacttgatcttaccaggaagggcatttgtgtgttgaaagactgttcaatgcttgtcatggatgaggcagacaagctattagctccagagttccagccttctgtggaggcacttattcatttccttccacctagtcggcagctgttgatgttttcagcaacctttcctgtaactgtcaaggaattcaaagataaatatctgcctagaccttatgtgattaatctaatggatgaactgaccctgaaaggaatcacacaatattatgcttttgtcgaagaaaggcaaaaagttcattgcctgaatacacttttctcaaagcttcaaattaatcaatccattatattctgcaactctgttaatagagttgagctactggctaagaaaataactgaactcggttattcatgcttctacattcatgctaagatgttgcaagaccacagaaaccgagtgtttcatgattttcgtaatggtgcttgcagaaaccttgtgtgcacagatctgtttaccagaggaattgatatccaggctgttaatgtggtcattaattttgacttccctaagacatctgagacatacttacacagggttggccgttctgggagatatggacaccttggtttggcagtgaacttgatcacttatgaagaccgtttcaacttatataggattgagcaagaacttggaacggaaattaagacaatacccccacagattgacctgtccatatactgccaatga

SEQ ID NO: 66193 - protein, 499 aa, Zea mays
MHQPRARYPPGYGSGGGGGAGRGGGGGNGGGGGNHNYYGRNPQQHHYHQQQQSQHSHRNSSYQQQWLRRDQAPAVAGAASGNAVAKTASQLDAVGSSSQDWKAQLNIPAPDTRYRTEDVTATKGNEFEDYFLKRELLMGIYEKGFERPSPIQEESIPIALTGSDILARAKNGTGKTAAFCIPALEKIDPEKNAIQVVILVPTRELALQTSQVCKELGKYLNIQVMVSTGGTSLKDDIMRLYQPVHLLVGTPGRILDLTRKGICVLKDCSMLVMDEADKLLAPEFQPSVEALIHFLPPSRQLLMFSATFPVTVKEFKDKYLPRPYVINLMDELTLKGITQYYAFVEERQKVHCLNTLFSKLQINQSIIFCNSVNRVELLAKKITELGYSCFYIHAKMLQDHRNRVFHDFRNGACRNLVCTDLFTRGIDIQAVNVVINFDFPKTSETYLHRVGRSGRYGHLGLAVNLITYEDRFNLYRIEQELGTEIKTIPPQIDLSIYCQ

SEQ ID NO: 66194 - DNA, 2241 bp, Zea mays
  CDS (1)..(2241)
atggcgtccctcgtcacgctccccgccatcgccttctctaaccccgccacagcctccggcgctgtccgcctacgcgccgcggccttccgctgctgggcgctccggcggcgcgggtgggcggtggcgggtgccgtggcctcgcccaactccgtgcttagcgagcatgccttcaagcggctccagctcgggagtgacgacgaggacggggaagggccgtacgggagcgacgccgacgaggggttcgaggcgggggagggggacgaggaggagctcgccattgccaggctcggcctgcccgacgagctcgtcgccacgctcgagaagcgcgggattacgcacctgttccccatccagagggctgtgttgattcccgctctcgagggccgtgacctgattgctagagcaaagactggaactggaaagacactggcctttggcatacccatgatcaagcaattaatcgagcaagacgatggtcggagtacaaggagaggtcgtactcctcgggttctggttctagcacctaccagagagttagccaaacaagtcgagaaggaaataaaggaatcagcacccaagctcggcacagtgtgtgtttatggcggtgtctcatataatgtccagcagaatgcactctctcgtggtgtcgatgttgttgttggaacacctggccgcataatcgatttgataaatggcggaagcctccagttgggagaagttcagtatttggtcctggatgaggctgaccaaatgctcgcagtggggtttgaggaagatgtggaaacaatattacaacagcttcctgcaggcaggcaaagcatgttgttctctgcgacgatgcctagctgggtgaagaaactgtccagacggtacttgaacaaccctttgacgattgacttggttggcgatcaagatgaaaagcttgctgaaggaatcaaactccatgctatcccactcacaacaacatcaaagcgtaccattcttagtgatctaatcacggtttatgcaaagggtgggaaaaccatagttttcactcgcacaaagaaagatgcagatgaggtatcattggcactgacaaacagtattgcttctgaggcacttcatggtgatatttcacagcatcagcgtgaaaggacactaaatggattccgtcaagggaaatttactgttctagtagcaacagatgttgctgcccgtggtcttgatataccaaatgttgatctgattatccattacgaattgccaaatgatccagaaacttttgtccatcgttctggacgcactggacgtgctgggaaagcaggaactgcaatcttgatgtttaccagcagccagaaaaggacagttaagtcacttgagcgtgatgttggttgcaactttgagtttataagccctccgtccatagaagaagtgctggagtcatctgctgagcatgtcattgctacattgcgaggggtgcacccagagtcaactaaatactttcttggagcagctgagaaattaacagaagaactaggacctcatgcccttgcttctgcactggcacatctgagtggattttctcagccaccttcgtcacgttctctcatcagtcatgagcagggatgggtgacgttgcaactaactagagaacagggatttggcagaggcttcttttctcctagatctgttactggttttctatctgatgtttgttcagctgctgcagatgaagttggcaaaatatacctaacagcagatgagaacgtccaaggagcagtcttcgatttacctgaggaaattgcaaaggacctgcttactatggagctccccccaggaaacacattaaccaaaatttccaagctgcctgcgttgcaagacgatggccctgctactgatagctacggtcgcttttcaaacgaccgaggttccaggaacaacaggcgttctaggggtggcggcgcttcaagaggccggggtggttgggacactgacggcgaggaccgattccgccgtggtggtaggagcttgaggtctgacaatgacagttggtcagatgatgactggtcaggcggtgggagaaaatcaaaccgttcctcatcattcggtagccgctcatcatcctacagcagccgtggctcaccatccttcggtggccgctcatcatccttcggcggtagggagagcaacagaagcttcagcggtgcttgtttcaactgcggcgaatccggccaccgcgcaacggactgcccaaacaagtag

SEQ ID NO: 66195 - protein, 746 aa, Zea mays
MASLVTLPAIAFSNPATASGAVRLRAAAFRCWALRRRGWAVAGAVASPNSVLSEHAFKRLQLGSDDEDGEGPYGSDADEGFEAGEGDEEELAIARLGLPDELVATLEKRGITHLFPIQRAVLIPALEGRDLIARAKTGTGKTLAFGIPMIKQLIEQDDGRSTRRGRTPRVLVLAPTRELAKQVEKEIKESAPKLGTVCVYGGVSYNVQQNALSRGVDVVVGTPGRIIDLINGGSLQLGEVQYLVLDEADQMLAVGFEEDVETILQQLPAGRQSMLFSATMPSWVKKLSRRYLNNPLTIDLVGDQDEKLAEGIKLHAIPLTTTSKRTILSDLITVYAKGGKTIVFTRTKKDADEVSLALTNSIASEALHGDISQHQRERTLNGFRQGKFTVLVATDVAARGLDIPNVDLIIHYELPNDPETFVHRSGRTGRAGKAGTAILMFTSSQKRTVKSLERDVGCNFEFISPPSIEEVLESSAEHVIATLRGVHPESTKYFLGAAEKLTEELGPHALASALAHLSGFSQPPSSRSLISHEQGWVTLQLTREQGFGRGFFSPRSVTGFLSDVCSAAADEVGKIYLTADENVQGAVFDLPEEIAKDLLTMELPPGNTLTKISKLPALQDDGPATDSYGRFSNDRGSRNNRRSRGGGASRGRGGWDTDGEDRFRRGGRSLRSDNDSWSDDDWSGGGRKSNRSSSFGSRSSSYSSRGSPSFGGRSSSFGGRESNRSFSGACFNCGESGHRATDCPNK

SEQ ID NO: 66196 - DNA, 1842 bp, Zea mays
  CDS (1)..(1842)
atggcgatggccggcgccgccgccgccgccgccggtcgctgcctcctcctctcccgcccgtcccccctccggctccgcctcctccacgctgccctctccaccgccgcccccaccctcggccccacctccactccggctccccctccgcggcacgagctcctcctcgagcgcctccgcctccgccacctaaaggacgcctcctcccccggcgccccgaggcctacctcgaggagctcggagcggagctcgcagcaggggaaggggaagagggtcgaggccgcggagagcttcgaggagctcggtctcggggaggaggtgatgtccgcgctgggggagatgggcatctccaagcccacggagatccagtgcgttggcgtgccggaggtgctggccgcaaccagcgacgtgctcgactcccacaccggatccgggaagacgctcgcctacttactccctatagtgcagcgaattaggcgtgatgaggcaatgcttgggatgtcaatgaagccaaggcgtccaagagcagtagtactctgccccaccagggagctaactgagcaggcttatcgagtagcaaagtctatcagccatcatgcacgttttcggtcaacgatggatagcggaggcacccgtctaagaccccaggaagattctttgaacatgcccgttgacatggtcgttggcactcctggaaggattcttgatcatatcaaggatggtaacatggtttatggtgatattaagtatctggttctggatgaggcagatacaatgtttgatcaaggctttggaccagacatacggaagtttcttgctccggtgaagaatcgtgctgcaaagcctgatgatcaaggtttccaaacagtattagtcactgctactatgacaaaagctgtgcaaaagttgattgatgaggaatttgaaggtattgtccatttgcggacatcatcatttcaaaagagagtttcaacagcacggcatgaccttatcaaactttctggagcagaaaacaaacttgaggctcttctgcaggttcttgagccaagcttggcaaagggaaacaaagttatggtgttctgtaatactttaaattcaagtcgtgcagtggatcattttttaactgaaaatcatatatccactgttaactatcatggagaggttccagctgaagagagagttgagaacctgaacaagttccgcaatgaagagggggattgtccaacattagtatgcactgatctggcagctagaggcctggacctggatgttgaccatgtcatcatgtttgacttcccatcgaattctattgattaccttcacagaaccgggagaactgcacgcatgggagccaaagggaaagttacaagcattgtggctaagaaggacgtagctttagctacacggattgaagaggccatgaagaaaaatgagagcttggaagctctcacgactaacaatgtcagaaggccaaccagctcgcagagtgtgaacacgaaagggaggccctcaaggttggttaagacttcaaatgctcttaaagttgtcagtcagaagggtagaaggggagtatcgctatctagcaggtcatcccgggctcccaaggatacaacttcaacccgaaggcgctcgccaccgaagagccaggcaaaggcaacaaaatcgtcagcccctcggaaagccaagccggtgaaacccactcagagcagcgcaaaggtctcgaagagcaaagcaaaacctgaggggcgaagatcaaagagtgacactctgaacaagctgggaactaagctcagtgtggttggatttagagggcgcagctcaggcaaatcagcacaatcttcataa

SEQ ID NO: 66197 - protein, 613 aa, Zea mays
MAMAGAAAAAAGRCLLLSRPSPLRLRLLHAALSTAAPTLGPTSTPAPPPRHELLLERLRLRHLKDASSPGAPRPTSRSSERSSQQGKGKRVEAAESFEELGLGEEVMSALGEMGISKPTEIQCVGVPEVLAATSDVLDSHTGSGKTLAYLLPIVQRIRRDEAMLGMSMKPRRPRAVVLCPTRELTEQAYRVAKSISHHARFRSTMDSGGTRLRPQEDSLNMPVDMVVGTPGRILDHIKDGNMVYGDIKYLVLDEADTMFDQGFGPDIRKFLAPVKNRAAKPDDQGFQTVLVTATMTKAVQKLIDEEFEGIVHLRTSSFQKRVSTARHDLIKLSGAENKLEALLQVLEPSLAKGNKVMVFCNTLNSSRAVDHFLTENHISTVNYHGEVPAEERVENLNKFRNEEGDCPTLVCTDLAARGLDLDVDHVIMFDFPSNSIDYLHRTGRTARMGAKGKVTSIVAKKDVALATRIEEAMKKNESLEALTTNNVRRPTSSQSVNTKGRPSRLVKTSNALKVVSQKGRRGVSLSSRSSRAPKDTTSTRRRSPPKSQAKATKSSAPRKAKPVKPTQSSAKVSKSKAKPEGRRSKSDTLNKLGTKLSVVGFRGRSSGKSAQSS

SEQ ID NO: 66198 - DNA, 1290 bp, Zea mays
  CDS (1)..(1290)
atgatgggagaggccaaggagaacgacgtttatgaggaggagctcctggactacgaggaggacgacgacaagacggtcgatggctccgctgctaagcccaccggagaggtcgcaaagaagggctacgtcgggatccacagttccggtttcagagacttcctgctcaagccagagctgctccgtgctatccaggattgtggttttgagcatccttccgaagtgcaacacgagtgtatccctcaagccattcttggaatggatgtcatctgtcaagctaaatctgggatggggaaaactgctgtttttgtcctttcatccctccaacaaattgaccctgttgcgggtcaggtagcagcacttgtactgtgccacacaagggaactggcttatcagatatgccacgaatttgagaggttcagcaaatatcttactgaagttaaagttgctgtcttctatggaggtgttcacatcaggaagcataaagatttgttgaagaatgaatgccctcatattgtggttggcacgcctggtaggatacttgctcttgccagggataaggatctctccttgaagaatgtgaggcacttcattcttgatgaatgtgacaaaatgctggaatcacttgacatgcggagagatgttcaggagatcttcaaaatgactcctcatgataagcaagtcatgatgttttcagcaacgctcagcaaggagatccgtcctgtatgcaagaaatttatgcaagatccgatggaaatatatgttgatgatgaggcaaagttgaccctccatggtcttgtacagcactatataaaacttagcgaggcagagaagaaccggaaactgaatgatctcttggacgctcttgatttcaaccaagttgtgatattcgtgaagagtgttagcagagctgccgaactgaataagttactttgtgaatgcaacttcccatcaatctgcattcattctggaatgactcaggaagaaaggctaacaagatataagaacttcaaggaaggccacaagagaattcttgtggctacagatttagttggcaggggcattgacattgagcgtgtcaacattgtgataaactatgacatgccagactcagctgatacttatttgcacagggttggaagggctggacgttttggcacgaagggacttgcaattacctttgtttcctctgcttcggattctgatgttcttaaccaggtgcaagaaaggtttgaggtagacataaaggaactgcctgagcaaattgacacctcgacctacatgccatcataa

SEQ ID NO: 66199 - protein, 429 aa, Zea mays
MMGEAKENDVYEEELLDYEEDDDKTVDGSAAKPTGEVAKKGYVGIHSSGFRDFLLKPELLRAIQDCGFEHPSEVQHECIPQAILGMDVICQAKSGMGKTAVFVLSSLQQIDPVAGQVAALVLCHTRELAYQICHEFERFSKYLTEVKVAVFYGGVHIRKHKDLLKNECPHIVVGTPGRILALARDKDLSLKNVRHFILDECDKMLESLDMRRDVQEIFKMTPHDKQVMMFSATLSKEIRPVCKKFMQDPMEIYVDDEAKLTLHGLVQHYIKLSEAEKNRKLNDLLDALDFNQVVIFVKSVSRAAELNKLLCECNFPSICIHSGMTQEERLTRYKNFKEGHKRILVATDLVGRGIDIERVNIVINYDMPDSADTYLHRVGRAGRFGTKGLAITFVSSASDSDVLNQVQERFEVDIKELPEQIDTSTYMPS

SEQ ID NO: 66200 - DNA, 1284 bp, Zea mays
  CDS (1)..(1284)
atgggtgaggcgaaggacaacgaggtgcacgaggaggacctagtcgactatgaggaggaggtggagaatgtcattgatggcgcccccaccaacggcccctcagatgtcgtcaagaaggggtacgtagggatccacagctcggggttcagagacttcctgctcaagccagagcttcttcgcgccattcaggattgcgggtttgagcatccttctgaagtgcaacatgagtgcatccctcaagctattcttggaatggatgtcatctgtcaagcaaaatctggaatgggtaagactgcagtttttgtcctgtcaactcttcagcagattgatcctgttgctggccaagtagctgcacttgtgttgtgccacacaagagaattagcttaccagatttgccatgaatttgagaggtttagcaaatacctgcctgaattaagagtagctgttttctatggtggtgttcacataaaaaaccacaaggatctgctgaagaatgaatgcccccatattgtggttggcacgcctggaaggatactagctctagctagagataaggaccttcccttgaagaatgtgcggcatttcattcttgatgaatgtgacaagatgctcgaatcacttgacatgcgcagagatgtccaggagatcttcaaaatgactccgcatgataagcaagtgatgatgttttcagcaacactcagcaaggagattcgacctgtttgcaagaggttcatgcaagatcctatggaaatttatgttgatgatgaggctaaactgacccttcatggtctagttcagcactatatcaaattaagtgaggcagagaagaaccgaaagttgaacgatcttttagatgcactcgacttcaaccaagttgtgatatttgttaaaagtgttagtagagctgcagaactcaacaaattgctctgcgagtgcaatttcccctcaatctgtatacattctggaatgacacaggaagagaggttgacacggtacaagaacttcaaggaaggacacaagaggattcttgtggctactgatttggttggtaggggaatcgacattgaacgtgtcaacattgtcgtaaactatgatatgcctgattccgctgatacatacctgcatagggttggtcgggctggacgttttggtaccaagggacttgcaataacatttgtttcttcatctgattctgatgttctcaatcaagtgcaggagaggtttgaggttgacataaaggagctgcctgagcagattgacacgtcgacctacatgccatcttga

SEQ ID NO: 66201 - protein, 427 aa, Zea mays
MGEAKDNEVHEEDLVDYEEEVENVIDGAPTNGPSDVVKKGYVGIHSSGFRDFLLKPELLRAIQDCGFEHPSEVQHECIPQAILGMDVICQAKSGMGKTAVFVLSTLQQIDPVAGQVAALVLCHTRELAYQICHEFERFSKYLPELRVAVFYGGVHIKNHKDLLKNECPHIVVGTPGRILALARDKDLPLKNVRHFILDECDKMLESLDMRRDVQEIFKMTPHDKQVMMFSATLSKEIRPVCKRFMQDPMEIYVDDEAKLTLHGLVQHYIKLSEAEKNRKLNDLLDALDFNQVVIFVKSVSRAAELNKLLCECNFPSICIHSGMTQEERLTRYKNFKEGHKRILVATDLVGRGIDIERVNIVVNYDMPDSADTYLHRVGRAGRFGTKGLAITFVSSSDSDVLNQVQERFEVDIKELPEQIDTSTYMPS

SEQ ID NO: 66202 - DNA, 2124 bp, Zea mays
  CDS (1)..(2124)
atgtctcccgcccttgccgctggcgtggagcccatggccgtcgacgattccgcctccaagaaggccaagcgcaagcagctcaaggccgccgccgccgccgcggaggcagaggcggaggccgcttcggtcaagaagaaagagaagaaagagaagaagcgaaaggtgaaggagccgtcccctccgctcccatcggccgcgtcctctgatgaggaagagaaaagcagcaccagctccgaggagacagcacccgcggcgaaaaaagcgaaggagaagacgaagaagaatgttgatgtctcgtcttcagcctcagatgacgatggcgagatcacagccagcagcgatgaggaccccgcggacccgaacgcgctgacgaacttcaggatatcggagtcgctgaggcagagcctcaggtccaaggggatcaagtcactgttccccattcaggccaccactttcgatctcgtactcgatggcagcgacttggttggccgagcgcgcaccggtcagggaaaaactttggcttttgtcttgcccatattggagtctttggttaatggggcaaacaaggcatctagacggactgaacatggcaggaccccaagtgttctcgttctactaccaacaagagagctggccaatcaggtgcacgctgactttgagttttatggtgcaacatttgggctctctgcatgttgtgtgtatgggggatcaccttatcgtcctcaagaaatggcattgagaagaggtgtggatattgttgttggaactcctggtcgtgtcaaggatttcattgttaaaggaactctcaatttgaaatgcttgaaattccgtgtccttgatgaagctgatgagatgctaaacatgggttttgttgatgatgtcgagctcattcttggcaaggtagaagatgctaccaaagtacagacgcttctgttcagtgccactctgccagagtgggtgaataagctctctatgaggtttctgaaagttgacaggaaaacagttgatcttgtcggtaatgagaaactgaaggccagtgcatctgttaagcaccttgctcttccttgtaacaaggcagcaagggcacaagttattccagacattatccgatgttatagccatggaggtcgaaccatcatcttcactgagacgaaggattctgcatcagagctttctggtttgattcatggatcccgtgccttgcatggagatgtagcgcaagcgcagcgtgaagtaattcttgctggattccgtagcgggaagttccaagttttggttgcgacaaatgtggcggcgcgtggtctggatattaatgatgtgcagcttatcattcagtgtgaacctccccgggatgttgaagcttacatacaccggtcaggtcggacagggagagcaggtaatactggtgttgctgtcatgctttatgagcccagatataagcacagtgtcagcagactagaaagggagtctggggttaaatttgagcatatctctgcgccacaacccactgatgtagcacaatctgctggcagtgaagctgcagatgcaattgcgagtgtgtcagacagtgttattcctatcttcaggcagcaagcagagcagttgctaagctcttccagtctgtctgcagctgacttgcttgccaaagcacttgcaaaggcagttggttacacggacataaagaaaagatcattgttatcttccttggaggattacagtacactacatcttcaaactggcagaccgatgtggtcacctgggtttgcttttactatattgaaaaggttcatgccagaagataaacttgcagatgtaaagggtgccaccctcaccgctgatggaacaggagttgtatttgatgttcctgcagcagatgttgaagattacattcaagcttcggagagtgccgcacaggtgacaattgatgaagtcaagcaactgccacccttgcaagagaaggaccagtcgagaggcaactctgggggaggaagatttggccatggaggtggccggagattttctggtggtggtggcggcggcagagggttttctggccggggaggtggcggcagagggttttctggcagaggaggcggcggcagtagatttaacaggaggaattag

SEQ ID NO: 66203 - protein, 707 aa, Zea mays
MSPALAAGVEPMAVDDSASKKAKRKQLKAAAAAAEAEAEAASVKKKEKKEKKRKVKEPSPPLPSAASSDEEEKSSTSSEETAPAAKKAKEKTKKNVDVSSSASDDDGEITASSDEDPADPNALTNFRISESLRQSLRSKGIKSLFPIQATTFDLVLDGSDLVGRARTGQGKTLAFVLPILESLVNGANKASRRTEHGRTPSVLVLLPTRELANQVHADFEFYGATFGLSACCVYGGSPYRPQEMALRRGVDIVVGTPGRVKDFIVKGTLNLKCLKFRVLDEADEMLNMGFVDDVELILGKVEDATKVQTLLFSATLPEWVNKLSMRFLKVDRKTVDLVGNEKLKASASVKHLALPCNKAARAQVIPDIIRCYSHGGRTIIFTETKDSASELSGLIHGSRALHGDVAQAQREVILAGFRSGKFQVLVATNVAARGLDINDVQLIIQCEPPRDVEAYIHRSGRTGRAGNTGVAVMLYEPRYKHSVSRLERESGVKFEHISAPQPTDVAQSAGSEAADAIASVSDSVIPIFRQQAEQLLSSSSLSAADLLAKALAKAVGYTDIKKRSLLSSLEDYSTLHLQTGRPMWSPGFAFTILKRFMPEDKLADVKGATLTADGTGVVFDVPAADVEDYIQASESAAQVTIDEVKQLPPLQEKDQSRGNSGGGRFGHGGGRRFSGGGGGGRGFSGRGGGGRGFSGRGGGGSRFNRRN

SEQ ID NO: 66204 - DNA, 1845 bp, Zea mays
  CDS (1)..(1845)
atggcgtcctcccgcacctcctgggccgacgtcgccgacgccgagcccgccccgcctcccccggtcgccgcccccgccgccgcatccaacggccccgcgcgttcctcctacgttccgccccacctccgcaaccgcccaccagccgccgccgccgccgcgcccgcctccgccgccccgccgccgcgctccaccgccggcctcctcacccgcaccggcggcggcagcagcttcggtgcgggcggcggcggaggattcggcgggggccgcgcccgcggcggtgcccggtgggaccgcgagccggacccgttcgcggactccgccgccgacgccgaggtcccgttcgacgagcaccagaacacggggatcaacttcgacgcgtacgaggacatcccggtcgagatgtccggccgcgacatcccgccccccgtctccaccttcgccgacattgacctcggcgacgcgctcaacgaaaacatccgccggtgcaagtacgtccgccccacccccgtgcagcgccacgccatcccgatctcgctcgccggccgcgacctcatggcctgcgcgcagacgggctccgggaagaccgccgccctctgcttccccatcatcagcggcatcatgaaggccccgtccgcgggaaggccgcagcggggcggcggcatggggatgaggaccgcttacccgtccgcgctcatcctctccccgactagagagctctctatgcagattcatgaagaggcgaggaagttttcgtatcagactggtgttagggtagttgtcgcttatggaggagcgccaattactcagcagttaagagagcttgagagaggtgttgacattcttgtggctacacctggccgattggttgatttattggaaagggcaagagtatctttacagtcaattagataccttgctcttgatgaggcagatagaatgcttgatatggggtttgaaccacaagttagaagaattgttgagcaaatggacatgccacttccaggtgccaggcagacaatgctgtttagtgcgacgttcccaaaagagatccagaaaatggcatcggatttcctggataactacatcttcctggctgttggaagagttgggtcaagtactgatttgattgcccagcgagttgagtttgtgcaggaggcagataaaagaagccacctgatggatcttcttcatgcacaaagagatacaggaaagcaaactctcacgcttgtctttgtggaaaccaagaggggcgctgattcattggaaagctggttgtgcatgaatgggtttccagctacttctattcatggagatagaaaccagcaggaaagagaatatgctctgaggtccttcaagagtgggcaaactcctattttagttgcaactgatgtggcagctcggggcctcgacattcctcatgttgctcatgttgtcaactttgatctccccaatgatattgatgactacgtacacaggattggaagaactggaagagctgggaagagcggacttgccactgccttcttcaatgataataactcatcactggcaagatctcttgctgacctaatgcaagaatctaaccaagaggtacctgcatggctattgcgctatgcagctcgtccttcttatggtggtggtggtggtgggaggaaccggcgatcagggggagggagccgctttggtggccgtgacttccgcaatgattcttcgtcatttggcaaggggggatcccgtggtggtggtgactactatggtggaggcagcagtggtggttatggtggtggctcctcatatggtggtggcggacacggtggagctggggctccgagtgcctgggattga

SEQ ID NO: 66205 - protein, 614 aa, Zea mays
MASSRTSWADVADAEPAPPPPVAAPAAASNGPARSSYVPPHLRNRPPAAAAAAPASAAPPPRSTAGLLTRTGGGSSFGAGGGGGFGGGRARGGARWDREPDPFADSAADAEVPFDEHQNTGINFDAYEDIPVEMSGRDIPPPVSTFADIDLGDALNENIRRCKYVRPTPVQRHAIPISLAGRDLMACAQTGSGKTAALCFPIISGIMKAPSAGRPQRGGGMGMRTAYPSALILSPTRELSMQIHEEARKFSYQTGVRVVVAYGGAPITQQLRELERGVDILVATPGRLVDLLERARVSLQSIRYLALDEADRMLDMGFEPQVRRIVEQMDMPLPGARQTMLFSATFPKEIQKMASDFLDNYIFLAVGRVGSSTDLIAQRVEFVQEADKRSHLMDLLHAQRDTGKQTLTLVFVETKRGADSLESWLCMNGFPATSIHGDRNQQEREYALRSFKSGQTPILVATDVAARGLDIPHVAHVVNFDLPNDIDDYVHRIGRTGRAGKSGLATAFFNDNNSSLARSLADLMQESNQEVPAWLLRYAARPSYGGGGGGRNRRSGGGSRFGGRDFRNDSSSFGKGGSRGGGDYYGGGSSGGYGGGSSYGGGGHGGAGAPSAWD

SEQ ID NO: 66206 - DNA, 2397 bp, Zea mays
  CDS (1)..(2397)
atgtcgggagggagtggctcatccgggcgcgcggccccgcggtacgccccggatgacccgacgctgcccaagccgtggcgcggcctcgtcgacggcaccaccggctacctctactactggaacccggagacgaacgtcacgcagtacgagcggcctgtgccccccgagagccagctcctcccgcctccgcctccgttgccacccccgcctccacggagccgcgaccgccgcgacaggtccagatcccgatcccgcaccccaccccggcgcgaccacagggaccgcgaccgtgaccgtgacaggcgccacgacgagcacgcgtcctccaagacggcgtcttcccaccaccatccggctccggtagccgtcgccgacgatccttccaccgaggcataccgccgccgccatgagatcaccgtcacgggggataatgtgccgactccaataacttcatttgaggctggtggcttcccgtcagaaattctgaaggagatacaacgtgctggattcgcaagcccaacacctatccaagcccagtcatggccaattgctatgcaaaatcaagatgtagtagctattgcaaagactggatcaggcaaaactcttgggtatctacttcctgggtttatgcatatcaagcgcctgcagaacagcactaggaatggcccaacagtgctagttttggccccaacaagggaacttgcaacacagattctggatgaagctgtgaaatttggaagatcttcaagaatttcttgcacgtgcctatatggtggtgctcctaaaggtcctcagttgagagatttagatagaggggttgatgttgttgttgcaacacctggaaggttaaatgacatcttggagatgcgaaaggtaagtcttaagcaagtgtcatatcttgttctggatgaggctgatcgcatgctggacatgggctttgagccacaaatacggaagatagtgaaagagatacctcaccgtcggcaaacccttatgtacaccgctacatggcccaaggaagtccgaaggattgcagatgatcttcttgttcatcctgtacaggtgacaattggaagtgttgattcacttgttgctaatagttctattactcagcatatagagatcataacaccctcagaaaaacaacggcgcctggagcagatattacgatcccaggattcaggttcaaagatattaatattttgtaccaccaagaggatgtgtgaccaacttgcaaggacactcaccaggcagtttggagcttcggccattcatggtgacaagtcccaaagtgaaagggagaaggttctgaatcagtttcgatctgggcggtctcccattttagtggcaactgatgttgctgcgcgaggtttggacatcaaagatatcagggtagtgatcaactatgacttccccactggtgttgaagactacgttcacaggattggcaggacaggaagggctggtgccactggtgttgcatatacatttttttgtgatcaggattcaaaatatgctgctgacctaatcaaaattctggaaggggcaaaccaacgagtgccccgtgatttagaggatatggcttctcgtggcggtggacgaggtaggaagaggaaccattgggcatcccgccctgacaggggtggttcacgttctgaactggattcaaggtacagcagcagagatggactagcatcttctgggaaatcagagagtggtcgtggcagtcgtggaagggatgataatggtagccgtggcaggtacgaccctggtgaaaccgatgggcgatctcgtaggtctactagaggccgcagtagaagccgtagcaaaagtgacagtagaagccgtagcccaagtcccaagaagtcacgtcgtcatgaaggtagacgtagcaggactaagagcaggagcaggagcaggagccgtagaaatcatggtgctagccacagcaagagtcgcagccctgtcgctagccgtaggtatgaaaagactgcttcaggatctgcccggcctaactcggggcatgcagagcacaaaagccctccaagatctcactctagggatgaccatgtgaaccactctgaccacaaggatgaccacatggaagatgggaagatggaaagggttgatcttgatcgctcgcccagcccacacgatgacaagtctgctccatatagtcctgtgtacaatggcaaagccagtggctcaatgagccccaacggtcagccagaggcaggtgccaaatttgttgaaccttctgggaaacctgagcctgcatctccagtgcgctgcagcaaaggcagagatgatgatgaggaaggtatcatagacgaggatggagagattggtgaggatgatccgcgtgcaaatgcagctgtgcagaatggtaataactga

SEQ ID NO: 66207 - protein, 798 aa, Zea mays
MSGGSGSSGRAAPRYAPDDPTLPKPWRGLVDGTTGYLYYWNPETNVTQYERPVPPESQLLPPPPPLPPPPPRSRDRRDRSRSRSRTPPRRDHRDRDRDRDRRHDEHASSKTASSHHHPAPVAVADDPSTEAYRRRHEITVTGDNVPTPITSFEAGGFPSEILKEIQRAGFASPTPIQAQSWPIAMQNQDVVAIAKTGSGKTLGYLLPGFMHIKRLQNSTRNGPTVLVLAPTRELATQILDEAVKFGRSSRISCTCLYGGAPKGPQLRDLDRGVDVVVATPGRLNDILEMRKVSLKQVSYLVLDEADRMLDMGFEPQIRKIVKEIPHRRQTLMYTATWPKEVRRIADDLLVHPVQVTIGSVDSLVANSSITQHIEIITPSEKQRRLEQILRSQDSGSKILIFCTTKRMCDQLARTLTRQFGASAIHGDKSQSEREKVLNQFRSGRSPILVATDVAARGLDIKDIRVVINYDFPTGVEDYVHRIGRTGRAGATGVAYTFFCDQDSKYAADLIKILEGANQRVPRDLEDMASRGGGRGRKRNHWASRPDRGGSRSELDSRYSSRDGLASSGKSESGRGSRGRDDNGSRGRYDPGETDGRSRRSTRGRSRSRSKSDSRSRSPSPKKSRRHEGRRSRTKSRSRSRSRRNHGASHSKSRSPVASRRYEKTASGSARPNSGHAEHKSPPRSHSRDDHVNHSDHKDDHMEDGKMERVDLDRSPSPHDDKSAPYSPVYNGKASGSMSPNGQPEAGAKFVEPSGKPEPASPVRCSKGRDDDEEGIIDEDGEIGEDDPRANAAVQNGNN

SEQ ID NO: 66208 - DNA, 1998 bp, Zea mays
  CDS (1)..(1998)
atggcgtcgtcggcgtccgcgccagcgtccacgggcccgcgctacgccccgccggatccgacgctgcccaagccgtggagggggctaatcgacggcaacacggggtacctctacttctggaacccggagacaaaggttacgcagtacgagcgtcccgtcgctgccgtgcccgccccccaatcgcagccgcttgtctactccaggcccgatgatgtgccgagaagcagcgcacctgccgagcagcgctcggaagctgcggtgagccgcccgcaatttgtgcctccctccgataacaggacaaggattgatcactcagagtcaagctctgcatctggagtgaacctttcacaaagtgctctgtccaccaatcaagtttctcagtatgccaatgggagccaaatgtcaacagaagcatatcgtgccaagcatgagattactatcgtcggcaatgaggcacctgcaccattcatgacatttcaatccacaggcttcccatcagagattctaagggaggttctgcaagcaggattctctgcaccaactcctatccaagctcaatcatggccaattgctctaaggggtcgtgatatagtagctgtggcgaagacaggttcaggaaaaacactaggctatcttctcccaggttttattcttttgaagcgcctgcagcataattcaagggaaggtccaacagtattagttttgtctccaaccagggaattggcgacacaaattcaagatgaaacaatcaagtttggcagatcttcaagaatatcttctacttgcttatatggaggtgctccaaaaggccctcagctaagagagttggagcgtggtgctgacattgttgtcgcaactcctgggagattaaatgacattttggaaatgaatagagtgagcctgcaccaagtatcatatcttgtccttgatgaagccgaccgtatgcttgatatgggatttgagccacaaataaggaaaattgtgaaacaaataccaccgaaacggcaaactcttatgtatactgccacatggccaagagaggttagaaaaatagcgtctgatttactggctaacccagttcaagttaacattggaaacactgatcagctagttgcaaataagtcaattacacagcatgtggaagttatcccacatatggagaaatcaagacgacttgatcagatcttgcgctcacaagatcctggatcaaaaagcataatattttgctccactaagaggatgtgtgatcagttagctcgaaacctatcacggcagtatcgtgcttctgctattcatggtgataaatcacaggctgagagggattctgtgttgaatgactttcgaagcggcaggtgtccagtacttgtagccactgatgtggccgctcgaggcttggacataaaggacatcagggtcgtggttaactatgatttcccaactggtgtggaggactatgtccatagaattgggaggacaggtagggctggtgcaacaggatctgcctacacattcttcggtgaccaggattcaaagtacgcttcagaccttgtgaagattttggagggtgcaaaccaatctgtgccgccacagttgaaagaaatggctcttcgtggaggatatggtggaagatcacgtcggtgggcatcttctgatgactcttatggtggtcagggatatggtgctaaaagatcaactgatagcttcaataataacaacttcggcaaccaggctggaggtggttcaagctttcactcgagctccagtggcggtcagtttggtgatactacgagcttccatggcagtgtccgcaacaatcagacgggggacaatgcgagctttccacccagctccagcaacaatcaggctggcgatggtctcagttttcatgaaaggttctatggatcacgtggaagggaccagagcagaacaagcaatgatggattccgtgccaggagcagaagtcctcctggcaagcccgtggaagtttccaactggtga

SEQ ID NO: 66209 - protein, 665 aa, Zea mays
MASSASAPASTGPRYAPPDPTLPKPWRGLIDGNTGYLYFWNPETKVTQYERPVAAVPAPQSQPLVYSRPDDVPRSSAPAEQRSEAAVSRPQFVPPSDNRTRIDHSESSSASGVNLSQSALSTNQVSQYANGSQMSTEAYRAKHEITIVGNEAPAPFMTFQSTGFPSEILREVLQAGFSAPTPIQAQSWPIALRGRDIVAVAKTGSGKTLGYLLPGFILLKRLQHNSREGPTVLVLSPTRELATQIQDETIKFGRSSRISSTCLYGGAPKGPQLRELERGADIVVATPGRLNDILEMNRVSLHQVSYLVLDEADRMLDMGFEPQIRKIVKQIPPKRQTLMYTATWPREVRKIASDLLANPVQVNIGNTDQLVANKSITQHVEVIPHMEKSRRLDQILRSQDPGSKSIIFCSTKRMCDQLARNLSRQYRASAIHGDKSQAERDSVLNDFRSGRCPVLVATDVAARGLDIKDIRVVVNYDFPTGVEDYVHRIGRTGRAGATGSAYTFFGDQDSKYASDLVKILEGANQSVPPQLKEMALRGGYGGRSRRWASSDDSYGGQGYGAKRSTDSFNNNNFGNQAGGGSSFHSSSSGGQFGDTTSFHGSVRNNQTGDNASFPPSSSNNQAGDGLSFHERFYGSRGRDQSRTSNDGFRARSRSPPGKPVEVSNW

SEQ ID NO: 66210 - DNA, 2205 bp, Zea mays
  CDS (1)..(2205)
atgaagcgctccgccgacgcgatgactgagccggtgaagcctgtgttcctcaccaaggcggagcgggagcgcctcgcgcttgagcgccgccaggccgccgtctccgaccagcgccgcaccgcgctcgacctcatccagtccctgccccggccccctccgccgccgacttccggtggtcctcccccgtccggctccaaccccgcacgtcgcgactcctccaactccaaccgcgactccgaccgggacagggaccgggaccaagaccgggaacgccgccgcgacgacgactcccgccgcgaccgatatcgggatcgagatcgagatagggaccgcgaccgagatgactcctcccgccgcgacagggaccgcgaccggcgcgaccgtgatagggaccgggaccgggaccgcgacagggatcgcggggaccgggagagggaccggctggagaagattgcggagcgggagcgtgagaaggagctcgacgcgatcaaggagcagtacctcgggtccaagaagcccaagaagcgggttatcaagccctctgagaagttccgcttctccttcgactgggaaaacaccgaggacaccagccgggacatgaatgcactctaccagtcgccgcacgaggcccggctgctctttggccggggcttccttgccggcattgaccgacgtgagcagaagaaggcggcagctgtgcacgagaaggagacccgtgcagagctgcggcgcaaggctggtgtggaggaccgtccggaggatgatgcggtagataagaagaaggctgctgctgctgaaatttatgatgctttcgatatgcgtgtggacaggcactggtccgaaaagacactcgaggagatgactgagcgggattggcgaattttccgtgaggatttcaatatctcctataagggttctcgcataccccgaccgatgcgaaagtggagtgaaagcaagcttggcaccgagttgcttcgtgctattgacaaggctggatatgaaaaaccgtcaccaatccagatggctgccattccgctaggtctacagcagcgtgatgttattggtattgctgagacaggttctggaaagactgcagcttttgtactccccatgttgtcttacattacccgattgccacccataagcgaggagaatgaggccgagggtccctatgccgttgttatggcacctactcgtgagcttgctcaacagattgaggaggagactgtgaaatttgcaacctatctaggccttaaagttgtctcaattgttggtggccagtcaattgaggagcagggtttcaagattaggcagggctgtgagattgtaattgccacacctggtcggcttcttgattgcttggaaaggaggtatgctgttctcaaccagtgcaactatgttgtgctcgatgaggctgataggatgattgatatgggctttgagccacaagttgttggtgtccttgacgcgatgccatcgagtaacttgaaacctgaaaatgaggatgaggaacttgatgagaaaaggatttacagaactacttatatgttcagtgccaccatgcctcctgctgtggaacgtcttgctaggaagtatctccgaaacccagttgttgtgacaattggtacggctggcaaggccactgatctgatcacccagaatgtgatcatggtgaaggagtctgagaagatgccacggctccagaagatactcacggatcttggagacaagactgccattgtgttctgcaatactaagaagacagcggacatgcgcgccaaggatctggacaaggcaggcttccgcgtcacaaccctacatggtgggaagtcacaagaccagagagagattagccttgatggatttagaaaccgtcggttcaatgttcttgtggctactgatgttgcaggacgtggtattgatattcctgatgttgcacacgtgattaactatgagatgcctagttcaatcgacacatacacacatcgcattggaaggacaggtcgtgctggaaagaagggagtagcaagttcatttttaacttacgagaacactgatattttctttgatctgaaacagatgcttatgcagagcaacagtcccgtaccacctgaacttgcaaggcatgaggcatcaaaatttaagccaggctcaattcctgatagacctccaaggcgaaatgatacagtctttgcaaatcattga

SEQ ID NO: 66211 - protein, 734 aa, Zea mays
MKRSADAMTEPVKPVFLTKAERERLALERRQAAVSDQRRTALDLIQSLPRPPPPPTSGGPPPSGSNPARRDSSNSNRDSDRDRDRDQDRERRRDDDSRRDRYRDRDRDRDRDRDDSSRRDRDRDRRDRDRDRDRDRDRDRGDRERDRLEKIAEREREKELDAIKEQYLGSKKPKKRVIKPSEKFRFSFDWENTEDTSRDMNALYQSPHEARLLFGRGFLAGIDRREQKKAAAVHEKETRAELRRKAGVEDRPEDDAVDKKKAAAAEIYDAFDMRVDRHWSEKTLEEMTERDWRIFREDFNISYKGSRIPRPMRKWSESKLGTELLRAIDKAGYEKPSPIQMAAIPLGLQQRDVIGIAETGSGKTAAFVLPMLSYITRLPPISEENEAEGPYAVVMAPTRELAQQIEEETVKFATYLGLKVVSIVGGQSIEEQGFKIRQGCEIVIATPGRLLDCLERRYAVLNQCNYVVLDEADRMIDMGFEPQVVGVLDAMPSSNLKPENEDEELDEKRIYRTTYMFSATMPPAVERLARKYLRNPVVVTIGTAGKATDLITQNVIMVKESEKMPRLQKILTDLGDKTAIVFCNTKKTADMRAKDLDKAGFRVTTLHGGKSQDQREISLDGFRNRRFNVLVATDVAGRGIDIPDVAHVINYEMPSSIDTYTHRIGRTGRAGKKGVASSFLTYENTDIFFDLKQMLMQSNSPVPPELARHEASKFKPGSIPDRPPRRNDTVFANH

SEQ ID NO: 66212 - DNA, 1944 bp, Zea mays
  CDS (1)..(1944)
atgcgatcttcatgggctgactcagttgcgaacgccgaggaatcggcgcccgcgactgctgctgctaatggctctgttgcaactcatagcacctcgcgccctacgcgcagctcctacgtgcctccacatcttcgtggccgctcagctggtgctgctgttgaagctcaagcaggcttagtagcaccagcacaaggtggaccactgccattggctgctgcacaaccttctggtcagggtgctgctgttggtggccctcgctgggctggcattgtgaatggtggtggtggtggtggcagcattggtgctcctcgccagggccatggtggcggaggcgggggccgtggtgcttggaactcccgtcctggtggttgggaccgcagagaccgggagccagatccgtttgcgaaagccgaggctgaagaaattgatttcgacggccaggagaatactggcatcaattttgatgcctatgaagacatccctgttgagaccagtggccatgatgtgcctgcaccagtcaacacatttgcagagattgatttgggtgatgcattgaatgacaatatccggaggtgcaagtatgtgaaaccaacaccagtgcagcgttacgccatcccaatctccattgctgggcgggatctcatggcctgcgcacagactggatccggaaaaaccgccgcattctgttttccaatcatcagtgggatcttgaagtcaccaaagccacaccagaggtcacggagtacaaggaccgcttgccctctagctctgatcttatcacccactcgtgagctttcagtccaaatccatgaagaagcaaggaagtttgcataccagactggtgtcagagttgtggttgcatatggtggcgcaccaataactaaccagctgagggagttagagagaggtgtggaaatcctggtggcaactcctggtcgcttgatggatctgttggagagggctagagtctcacttcaaatgataaagtatttagctcttgatgaagctgatcggatgcttgatatgggttttgagccacagatacgtaaaattgttgagggcatggacatgcctcaacgtggtgagaggcagacaatgttgttcagtgcaacattcccaaaagagatacagaggatggccgcagatttccttgctgattacatctttcttgctgttgggagagttggttcaagcaccgatttgattgttcagagggtggagtttgtcctcgcttcagacaaacgaagctacctcatggatcttctgcatgcacaaaaggctaatggcacacatggaaagcacgctcttacattggtctttgtggagacaaagaggggggctgatgccttggaagacgggttttttagaaatggacatccatggactagcattcatggagacaggacacaacaggaaagggagcatgcccttaggtccttcaagagcggagcaactcccatccttgtggcgactgatgttgctgctcgtggtcttgacataccacatgttgcccatgtgattaattttgacctccctaatgatatagatgactatgttcatcggattggaaggactggacgtgctgggaaatctggtcttgcgactgcattcttcaacgagagcaacactacgcttgcaaggccgttgagtgatctcatgaaagaggccaaccaggaggttcctaagtggcttgagggatacgctgcccgatcagcctacggaggtggaggtggtagaaaccgcagacaaggtagcagtgccagatttggtggccgtgatttccggcgagataggggcagtggtggaggatatggtggtggttcctacggaggaggtggtggtggtggatatgggggatcatcaggatacggtggtgcctatggcggcggtggcagcagcggcggcggctatggtggtggtcagagtacgagttcttgggactga

SEQ ID NO: 66213 - protein, 647 aa, Zea mays
MRSSWADSVANAEESAPATAAANGSVATHSTSRPTRSSYVPPHLRGRSAGAAVEAQAGLVAPAQGGPLPLAAAQPSGQGAAVGGPRWAGIVNGGGGGGSIGAPRQGHGGGGGGRGAWNSRPGGWDRRDREPDPFAKAEAEEIDFDGQENTGINFDAYEDIPVETSGHDVPAPVNTFAEIDLGDALNDNIRRCKYVKPTPVQRYAIPISIAGRDLMACAQTGSGKTAAFCFPIISGILKSPKPHQRSRSTRTACPLALILSPTRELSVQIHEEARKFAYQTGVRVVVAYGGAPITNQLRELERGVEILVATPGRLMDLLERARVSLQMIKYLALDEADRMLDMGFEPQIRKIVEGMDMPQRGERQTMLFSATFPKEIQRMAADFLADYIFLAVGRVGSSTDLIVQRVEFVLASDKRSYLMDLLHAQKANGTHGKHALTLVFVETKRGADALEDGFFRNGHPWTSIHGDRTQQEREHALRSFKSGATPILVATDVAARGLDIPHVAHVINFDLPNDIDDYVHRIGRTGRAGKSGLATAFFNESNTTLARPLSDLMKEANQEVPKWLEGYAARSAYGGGGGRNRRQGSSARFGGRDFRRDRGSGGGYGGGSYGGGGGGGYGGSSGYGGAYGGGGSSGGGYGGGQSTSSWD

SEQ ID NO: 66214 - DNA, 1584 bp, Zea mays
  CDS (1)..(1584)
atggatccacgcgccaggtatccttcgggcatgggcaacggccgcggtgggaacctcaactactacggccgcggcccaccgccgcaacagccgcatcagcaccacaaccaccagcagacgtcgggggcgcaccaccaccagcagacgtcgggggcgcaccaccaccagcagtacgcgcagaggcagcaccagcaccagcaccagcaccacggccacaatcgccatcagcaacagcagcagcaccacatttaccagcagcaacagcagcagtggctgcggcggagccagattgcccgcgagacctcgggcgcagccgtgaccagcgagccgaagtccctggcgccatccacggccgccgatggcgtcgattcgagttcacaagattggaaggcccaattgaagctgccgcctccagatacacgctacaggacagaggatgttacagctaccaagggaaatgagtttgaagactattttctcaagcgtgaactcctaatgggtatatacgagaagggatttgaaagaccgtctcctatccaagaggaaagcattcctattgctttaactggtagtgacattcttgcaagagcgaagaacggaactggcaagactgctgcattttgtattcctgcactggaaaagattgatcaagaaaaaaatgctattcaagttgttatattggttcccacaagggaattggctctgcaaacatcacaagtttgcaaggagcttggtaagcatttgaagatccaggttatggtcaccactggtggaaccagtttgaaggatgatattgttcgtctgtaccaacctgtgcacttactcgttggaacacctgggcgtattttggatcttacaaagaaaggtgtttgcattttgaacgactgttcaatgcttattatggatgaggcagacaagcttctctctcctgagtttcaaccttccatagaacagttgattcgctacctccctgctagtcgacagattttgatgttttcagcgacattccctgtgactgttaaggagtttaaggacaaatatctgcctaaaccttatgtgattaaccttatggacgaacttacactgaagggaattacacagttctatgcttttgtggaagaaagacagaaagttcactgtctcaacactctcttttccaagcttcaaatcaaccagtcaataatattttgtaactctgtaaatcgtgttgaactattggcgaaaaagatcacagagcttggctattcttgcttctatattcatgcaaagatgctacaggaccaccgtaatagagttttccatgatttccgtaatggagcatgcaggaaccttgtttgcactgatctttttacaaggggaatagatattcaagctgtgaatgttgttatcaattttgatttccccaagaactctgaaacatatctccacagggttggtagatctgggagatttggtcaccttggtctggccgttaatttgatcacctatgaggatcggtttaacttgtataggattgaacaagagcttgggactgaaataaaatcaattcctcctcagatagaccaggctatatactgccaataa

SEQ ID NO: 66215 - protein, 527 aa, Zea mays
MDPRARYPSGMGNGRGGNLNYYGRGPPPQQPHQHHNHQQTSGAHHHQQTSGAHHHQQYAQRQHQHQHQHHGHNRHQQQQQHHIYQQQQQQWLRRSQIARETSGAAVTSEPKSLAPSTAADGVDSSSQDWKAQLKLPPPDTRYRTEDVTATKGNEFEDYFLKRELLMGIYEKGFERPSPIQEESIPIALTGSDILARAKNGTGKTAAFCIPALEKIDQEKNAIQVVILVPTRELALQTSQVCKELGKHLKIQVMVTTGGTSLKDDIVRLYQPVHLLVGTPGRILDLTKKGVCILNDCSMLIMDEADKLLSPEFQPSIEQLIRYLPASRQILMFSATFPVTVKEFKDKYLPKPYVINLMDELTLKGITQFYAFVEERQKVHCLNTLFSKLQINQSIIFCNSVNRVELLAKKITELGYSCFYIHAKMLQDHRNRVFHDFRNGACRNLVCTDLFTRGIDIQAVNVVINFDFPKNSETYLHRVGRSGRFGHLGLAVNLITYEDRFNLYRIEQELGTEIKSIPPQIDQAIYCQ

SEQ ID NO: 66216 - DNA, 1527 bp, Zea mays
  CDS (1)..(1527)
atgggccgcaatcttccagccgagcaagtggaagcacccaggagcagcaagatggacaagaagagaaagaaggacaagaagcggaagctggcagccgaggccgaggaggaggcggcggtgacggcgacagtggagaccgtgaagagcagcaagaagaagcgggtggagaatgaacccggcgcaggagcagtggaggcggagaacggcgctgagaagaccgtggcggtgaccgggaagggttcggaggaccctaagtacgcgccgctacggtcgttctccgctgccgagctgccgtctcaggtgctcgaatgctgcagcgcgttcgcgcggccgtcacctatccaggcacacgcctggccgttcctcctcgacggccgggacttcatcggcatcgccgccaccggatccggaaagacaatcgcctttggcgtgccggcgctgatgcacatcaggaagaaggtaggggggaaagcagggaagaaggctgtgccacggtgcctcgtgctatcaccaacgagggagctcgctcagcagattgcagatgtacttagtgaggctggtgcaccatgtgggataaaatcagtctgtctttatggtggaactaaaaaggaaccccaaatatctgcccttaaatctggagtggatatagtcataggaactcctggtcgtatgaaagaccttattgaaatgggtgtttgctgtcttaatgaggtttcgtttgtggttctagatgaagcagataggatgctggatttgggttttgaacctgaagtcagggcaattttgagccaaacatcatctgtacgccagatggttatgttcagtgcaacatggcctcttgctgtccacaaattagcccaggagtttatggatccaaatccgataaaggttgttattggatcagaagaccttgctgctaaccatgacgtgatgcaaattgttgaagtattggatgatagaacaagggattcaagattacttgccttgcttgacaaataccatcaagcacaaagcaacagggttttggtttttgtgctgtacaagaaagaagctgcacgagtggaaacaatgcttcagagaaggggatggaaggctgtttcagtccatggcgacaaggctcagcatgatagaacaaaagctttatctttatttaaagaagggaaatgcccattaatgattgctacagatgtcgcttcacgtggacttgatattcctgatgttgaagtagtgattaactatagttatcctttgaccactgaggactacgtccacaggataggaaggactggtcgtgctggcaagaaaggtgttgcacatacctttttcactcaagcgaacaaggcacttgctggtgaacttgtgaatgttctgcgggaggctgatcaggttgttcctccagcccttatgaaatttggcacacatgtcaagaaaaaggaatctaagatatacggatctcatttcaaggaacttacagcagatgctcctaaatccacgaagatcacatttggcgattctgatgaggactga

SEQ ID NO: 66217 - protein, 508 aa, Zea mays
MGRNLPAEQVEAPRSSKMDKKRKKDKKRKLAAEAEEEAAVTATVETVKSSKKKRVENEPGAGAVEAENGAEKTVAVTGKGSEDPKYAPLRSFSAAELPSQVLECCSAFARPSPIQAHAWPFLLDGRDFIGIAATGSGKTIAFGVPALMHIRKKVGGKAGKKAVPRCLVLSPTRELAQQIADVLSEAGAPCGIKSVCLYGGTKKEPQISALKSGVDIVIGTPGRMKDLIEMGVCCLNEVSFVVLDEADRMLDLGFEPEVRAILSQTSSVRQMVMFSATWPLAVHKLAQEFMDPNPIKVVIGSEDLAANHDVMQIVEVLDDRTRDSRLLALLDKYHQAQSNRVLVFVLYKKEAARVETMLQRRGWKAVSVHGDKAQHDRTKALSLFKEGKCPLMIATDVASRGLDIPDVEVVINYSYPLTTEDYVHRIGRTGRAGKKGVAHTFFTQANKALAGELVNVLREADQVVPPALMKFGTHVKKKESKIYGSHFKELTADAPKSTKITFGDSDED

SEQ ID NO: 66218 - DNA, 26 bp, Artificial sequence
  primer
atgtctgaaggtattactgatattga

SEQ ID NO: 66219 - DNA, 25 bp, Artificial sequence
  primer
ttagttcaacaaggtagcaatgtcg

SEQ ID NO: 66220 - protein, 609 aa, Artificial sequence
  consensus sequence
  Variant (2)..(17): Xaa in position 2 to 17 is any amino acid
  Variant (18)..(26): Xaa in position 18 to 26 is any or no amino acid
  Variant (28)..(30): Xaa in position 28 to 30 is any amino acid
  Variant (32)..(38): Xaa in position 32 to 38 is any amino acid
  Variant (39)..(46): Xaa in position 39 to 46 is any or no amino acid
  Variant (48)..(51): Xaa in position 48 to 51 is any amino acid
  Variant (53)..(54): Xaa in position 53 to 54 is any amino acid
  Variant (56)..(56): Xaa in position 56 is any amino acid
  Variant (60)..(61): Xaa in position 60 to 61 is any amino acid
  Variant (63)..(81): Xaa in position 63 to 81 is any amino acid
  Variant (82)..(103): Xaa in position 82 to 103 is any or no amino acid
  Variant (110)..(110): Xaa in position 110 is any amino acid
  Variant (112)..(127): Xaa in position 112 to 127 is any amino acid
  Variant (128)..(139): Xaa in position 128 to 139 is any or no amino acid
  Variant (141)..(153): Xaa in position 141 to 153 is any amino acid
  Variant (154)..(180): Xaa in position 154 to 180 is any or no amino acid
  Variant (185)..(186): Xaa in position 185 to 186 is any amino acid
  Variant (188)..(202): Xaa in position 188 to 202 is any amino acid
  Variant (203)..(210): Xaa in position 203 to 210 is any or no amino acid
  Variant (215)..(216): Xaa in position 215 to 216 is any amino acid
  Variant (218)..(220): Xaa in position 218 to 220 is any amino acid
  Variant (221)..(223): Xaa in position 221 to 223 is any or no amino acid
  Variant (225)..(238): Xaa in position 225 to 238 is any amino acid
  Variant (239)..(264): Xaa in position 239 to 264 is any or no amino acid
  Variant (266)..(266): Xaa in position 266 is any amino acid
  Variant (267)..(268): Xaa in position 267 to 268 is any or no amino acid
  Variant (273)..(289): Xaa in position 273 to 289 is any amino acid
  Variant (290)..(339): Xaa in position 290 to 339 is any or no amino acid
  Variant (341)..(350): Xaa in position 341 to 350 is any amino acid
  Variant (351)..(366): Xaa in position 351 to 366 is any or no amino acid
  Variant (368)..(397): Xaa in position 368 to 397 is any amino acid
  Variant (398)..(445): Xaa in position 398 to 445 is any or no amino acid
  Variant (447)..(450): Xaa in position 447 to 450 is any amino acid
  Variant (452)..(453): Xaa in position 452 to 453 is any amino acid
  Variant (455)..(460): Xaa in position 455 to 460 is any amino acid
  Variant (462)..(467): Xaa in position 462 to 467 is any amino acid
  Variant (468)..(484): Xaa in position 468 to 484 is any or no amino acid
  Variant (486)..(487): Xaa in position 486 to 487 is any amino acid
  Variant (490)..(492): Xaa in position 490 to 492 is any amino acid
  Variant (493)..(558): Xaa in position 493 to 558 is any or no amino acid
  Variant (561)..(561): Xaa in position 561 is any amino acid
  Variant (563)..(567): Xaa in position 563 to 567 is any amino acid
  Variant (568)..(568): Xaa in position 568 is any or no amino acid
  Variant (570)..(570): Xaa in position 570 is any amino acid
  Variant (572)..(572): Xaa in position 572 is any amino acid
  Variant (574)..(574): Xaa in position 574 is any amino acid
  Variant (576)..(580): Xaa in position 576 to 580 is any amino acid
  Variant (581)..(591): Xaa in position 581 to 591 is any or no amino acid
  Variant (593)..(593): Xaa in position 593 is any amino acid
  Variant (596)..(596): Xaa in position 596 is any amino acid
  Variant (599)..(599): Xaa in position 599 is any amino acid
  Variant (602)..(605): Xaa in position 602 to 605 is any amino acid
  Variant (606)..(608): Xaa in position 606 to 608 is any or no amino acid
FXXXXXXXXXXXXXXXXXXXXXXXXXPXXXQXXXXXXXXXXXXXXXDXXXXAXXGXGKTXXFXXXXXXXXXXXXXXXXXXXXXXXXXXXXXXXXXXXXXXXXXPTRELAXQXXXXXXXXXXXXXXXXXXXXXXXXXXXXGXXXXXXXXXXXXXXXXXXXXXXXXXXXXXXXXXXXXXXXXTPGRXXDXXXXXXXXXXXXXXXXXXXXXXXDEADXXLXXXXXXFXXXXXXXXXXXXXXXXXXXXXXXXXXXXXXXXXXXXXXXXQXXXFSATXXXXXXXXXXXXXXXXXXXXXXXXXXXXXXXXXXXXXXXXXXXXXXXXXXXXXXXXXXXXXXXXXXXQXXXXXXXXXXXXXXXXXXXXXXXXXXLXXXXXXXXXXXXXXXXXXXXXXXXXXXXXXXXXXXXXXXXXXXXXXXXXXXXXXXXXXXXXXXXXXXXXXXXXXXXXXHXXXXQXXRXXXXXXFXXXXXXXXXXXXXXXXXXXXXXXLXXTDXXXXXXXXXXXXXXXXXXXXXXXXXXXXXXXXXXXXXXXXXXXXXXXXXXXXXXXXXXXXXXXXXXXXXRGXDXXXXXXVXNXDXPXXXXXXXXXXXXXXXXYXHRXGRXGRXXXXXXXG

SEQ ID NO: 66221 - protein, 13 aa, Artificial sequence
  protein pattern
  Variant (2)..(2): Xaa in position 2 is any amino acid
  Variant (5)..(5): Xaa in position 5 is Ala, Ile, Leu or Val
  Variant (8)..(8): Xaa in position 8 is any amino acid
  Variant (9)..(11): Xaa in position 9 to 11 is any or no amino acid
YXHRXGRXXXXGR

SEQ ID NO: 66222 - protein, 12 aa, Artificial sequence
  protein pattern
  Variant (2)..(2): Xaa in position 2 is any amino acid
  Variant (3)..(4): Xaa in position 3 to 4 is any or no amino acid
  Variant (8)..(8): Xaa in position 8 is Asp or Glu
  Variant (10)..(10): Xaa in position 10 is Ala, Cys, Ser or Val
  Variant (11)..(11): Xaa in position 11 is any amino acid
LXXXPTRXLXXQ

SEQ ID NO: 66223 - protein, 11 aa, Artificial sequence
  protein pattern
  Variant (2)..(2): Xaa in position 2 is any amino acid
  Variant (3)..(3): Xaa in position 3 is any or no amino acid
  Variant (5)..(5): Xaa in position 5 is Ser or Thr
  Variant (9)..(9): Xaa in position 9 is any amino acid
  Variant (10)..(10): Xaa in position 10 is Ala, Cys, Gly, Ser, Thr or Val
  Variant (11)..(11): Xaa in position 11 is Phe or Tyr
AXXGXGKTXXX

SEQ ID NO: 66224 - protein, 12 aa, Artificial sequence
  protein pattern
  Variant (2)..(2): Xaa in position 2 is Ile, Leu or Val
  Variant (3)..(3): Xaa in position 3 is Ala, Cys, Ser or Thr
  Variant (4)..(4): Xaa in position 4 is Ser or Thr
  Variant (5)..(5): Xaa in position 5 is Ala, Asp, Glu, Gly, Asn or Ser
  Variant (6)..(7): Xaa in position 6 to 7 is any amino acid
  Variant (8)..(8): Xaa in position 8 is Ala, Gly, Ser or Thr
  Variant (11)..(11): Xaa in position 11 is Phe, Ile, Leu, Met or Val
LXXXXXXXRGXD

SEQ ID NO: 66225 - DNA, 630 bp, Saccharomyces cerevisiae
  CDS (1)..(630)
atggccgaaaatgagagaatgtacatctcctataataatattcacaagctttgtcagggagtggctaaacatatcttagctagaaacgaaagacctgatattattatcgccatcactggtggtggtatgatccccgcaagaattattaggtcctttttgaaaactaaaggacaaaagaatattccgattcaggccatcggcctatctttgtatgaagatttagggttggataatagcgtcgaaactatcggcaaagaggtcatcagaacacaatggctggacttcggtgctttgaaccaacatttcgattccttaattggtaaaaaggtcctaattgtggatgaagttgacgatactagaactaccctccactatgctgtttctgagctggaaaaagagattgctgaacaacaaaaggttttgaatagaatgagtgaggaaaccgttatttctatctttgttctacataataaggacaaaccaaagagagctggactacctgactccatgatgaattctggacgttacattgctgcgcaaactgtccctgataagtggttgtgctatccatgggacgctgaagatatcgaagaacataccatgctcgctaaggctcaaggtcatgactga

SEQ ID NO: 66226 - protein, 209 aa, Saccharomyces cerevisiae
MAENERMYISYNNIHKLCQGVAKHILARNERPDIIIAITGGGMIPARIIRSFLKTKGQKNIPIQAIGLSLYEDLGLDNSVETIGKEVIRTQWLDFGALNQHFDSLIGKKVLIVDEVDDTRTTLHYAVSELEKEIAEQQKVLNRMSEETVISIFVLHNKDKPKRAGLPDSMMNSGRYIAAQTVPDKWLCYPWDAEDIEEHTMLAKAQGHD

SEQ ID NO: 66227 - DNA, 528 bp, Neisseria meningitidis MC58
  CDS (1)..(528): transl_table=11
atgaaacagaaaatctggtacacctacgatgacatccaccgcgtcatcaaagcattggcagaaaaaatccggaacgccgacatcaaatacgatgccatgattgccatcggcggcggcggctttattccggcacgtatgctgcgctgttttctggaaattccgatttatgccgtaaccaccgcctattacgacagcgacaacgaaggacaggttaccgaagaagtcaaaaaagtccaatggctcgaccccgttcccgaagccctgcggggcaaaaacgtactcgtcgtcgatgaagtggacgacagccgcgtaaccatggagttctgcctgaaagaactgctcaaggaagacttcggtacgatcggagtcgccgtactgcacgaaaaaatcaaagccaaagcaggcaaaatccccgaaggcattccctatttcagcggcatcaccgtagaagactggtggatcaactatccgtgggacgcactcgacatcgacgaacacaaccgccttgccgaggccggccgaggctga

SEQ ID NO: 66228 - protein, 175 aa, Neisseria meningitidis MC58
MKQKIWYTYDDIHRVIKALAEKIRNADIKYDAMIAIGGGGFIPARMLRCFLEIPIYAVTTAYYDSDNEGQVTEEVKKVQWLDPVPEALRGKNVLVVDEVDDSRVTMEFCLKELLKEDFGTIGVAVLHEKIKAKAGKIPEGIPYFSGITVEDWWINYPWDALDIDEHNRLAEAGRG

SEQ ID NO: 66229 - DNA, 528 bp, Neisseria meningitidis Z2491
  CDS (1)..(528): transl_table=11
atgaaacagaaaatctggtacacctacgatgacatccaccgcgtcatcaaagcattggcagaaaaaatccggaacgccgacatcaaatacgatgccatgattgccatcggcggcggcggctttattccggcacgtatgctgcgctgttttctggaaattccgatttatgccgtaaccaccgcctattacgacagcgacaacgaaggacaggttaccgaagaagtcaaaaaagtccaatggctcgaccccgttcccgaagccctgcggggcaaaaacgtccttgttgtcgatgaagtggacgacagccgcgtaaccatggaattttgcctgacagagctgctcaaagaagacttcggcaccatcggcgtcgccgtactgcacgaaaaaatcaaagccaaagcaggtaaaatccccgaaggcattccctatttcagcggcatcaccgtagaagactggtggatcaactatccgtgggacgcactcgacatcgacgaacacaaccgccttgccgaaagcagccgaggctga

SEQ ID NO: 66230 - protein, 175 aa, Neisseria meningitidis Z2491
MKQKIWYTYDDIHRVIKALAEKIRNADIKYDAMIAIGGGGFIPARMLRCFLEIPIYAVTTAYYDSDNEGQVTEEVKKVQWLDPVPEALRGKNVLVVDEVDDSRVTMEFCLTELLKEDFGTIGVAVLHEKIKAKAGKIPEGIPYFSGITVEDWWINYPWDALDIDEHNRLAESSRG

SEQ ID NO: 66231 - DNA, 540 bp, Sulfolobus solfataricus P2
  CDS (1)..(540): transl_table=11
atggttgaatatcatattccttcatgggatgaaatagaagatgcggttttttcgataggcgaggctctagttaagagtaattatattccagacgttttgattgcagtactaactggtggaattatacccgctaaacttctttccgacttgctagatttgaaagtaattaggtacatagatataaaattttatcgtagcgttggaaaaactgaaagtaaaccagtcattagatctgtatatactgattccttagaggggaagaaagtcctagtagttgatgatgttgcagatactggtgaaaccttagaggctgttagtaatgttataaccatgtttaacccagctaaagtgatgactgcggctttatacttaaaaccgtggtctaagaggatcccggatttttattataaacaaattgacaagtggataattttcccgtgggataagtgggatgttgttagggaaaatagtaatgttccagttgacaaaaaggagagattcttaaacttgtataatcaattattaaagatcagaaaatag

SEQ ID NO: 66232 - protein, 179 aa, Sulfolobus solfataricus P2
MVEYHIPSWDEIEDAVFSIGEALVKSNYIPDVLIAVLTGGIIPAKLLSDLLDLKVIRYIDIKFYRSVGKTESKPVIRSVYTDSLEGKKVLVVDDVADTGETLEAVSNVITMFNPAKVMTAALYLKPWSKRIPDFYYKQIDKWIIFPWDKWDVVRENSNVPVDKKERFLNLYNQLLKIRK

SEQ ID NO: 66233 - DNA, 618 bp, Magnaporthe grisea 70-15
  CDS (1)..(618)
atggttcaaaaactttacgtcaagtacaatgatgtacacaagctgtgccaggagtcggctccccagatcctctccgacttccagccgcagctgatgatcgccatcggcggcggtggctacgtccccgcccgtatcctgcgttccttcctcaagaagcccggcaaccccaacatccctatccaggccatcggcctgtcgctgtatgagcagctgtcgaccgactcggtggaggaggcgccggggaccaaggtcacgcgcacgcagtggctcgacctgagcagcctcggagagatgagcaacctgctcggcaagcgcatcctcatcgtcgacgaggtcgacgacacccgcaccacgctcgagtacgccgtcaaggagctcgagaaggacgtcgaggccgccagggtcaaagccggctacgaggggcccaagactgagtttcagatctttgtcttgcataacaagaacaagaacaagaagggcactctgcctcacgagatgttggagaatggaaagtacatggccgcaaggaccgtcgaggatgtttggatctgctacccgtgggaggccgccgacattgatgagcacgacaggctagcaagcctgcagacgaaggagtaa

SEQ ID NO: 66234 - protein, 205 aa, Magnaporthe grisea 70-15
MVQKLYVKYNDVHKLCQESAPQILSDFQPQLMIAIGGGGYVPARILRSFLKKPGNPNIPIQAIGLSLYEQLSTDSVEEAPGTKVTRTQWLDLSSLGEMSNLLGKRILIVDEVDDTRTTLEYAVKELEKDVEAARVKAGYEGPKTEFQIFVLHNKNKNKKGTLPHEMLENGKYMAARTVEDVWICYPWEAADIDEHDRLASLQTKE

SEQ ID NO: 66235 - DNA, 615 bp, Gibberella zeae PH-1
  CDS (1)..(615)
atggtcgagaagctctacgtcacctacaacgatgtgcacaagatgtgccagaagtctgctgagaagcttctcctcgacttccagcctcaacttctgatcgccatcggcggtggtggttacgtccctgctcgaatcctccgatctttcctcaagaagggcggcgctcccaacattcccatccaggccatcggtctctccctctacgagtctctcggcaacgatgaagtcgaggcccccggtaccaaggtcacccgaacacagtggctggacctcactgctctcggcgagatgcagaacctcgtcggaaagcgaatcctgattgttgacgaggtcgacgacacccgaacaactcttgagtacgccgtcagggagctcgagaaggacgttgagactgcccgccagaagatgggtggtaccgcccccaagactgagttcagcatctttgtcctccacaacaaggacaagcccaagaagggaaagctccccgacgagatgctcgccacccgttactccgctgccgagaccgtcggagatgtctggatcaactacccctgggaggccatcgatatcgacgagcatgaccgaaacgctagcctgcagaccaagagcaactaa

SEQ ID NO: 66236 - protein, 204 aa, Gibberella zeae PH-1
MVEKLYVTYNDVHKMCQKSAEKLLLDFQPQLLIAIGGGGYVPARILRSFLKKGGAPNIPIQAIGLSLYESLGNDEVEAPGTKVTRTQWLDLTALGEMQNLVGKRILIVDEVDDTRTTLEYAVRELEKDVETARQKMGGTAPKTEFSIFVLHNKDKPKKGKLPDEMLATRYSAAETVGDVWINYPWEAIDIDEHDRNASLQTKSN

SEQ ID NO: 66237 - DNA, 648 bp, Candida glabrata CBS 138
  CDS (1)..(648)
atgtctgacgaggataagcagtatatctcctacaacaacgtgcatcagctgtgtcaaattggtgctgagagaatcaaaaacttcaaacctgacttgatcatcgctatcggtggtggtggtttcatcccagcaagaattctacgtacatttttgaaggaaccaggtgtacctactattagaatatttgcaatcattttatctctttacgaagacctgcatactgctggctcagaagttgagcaagttggtgtcaaagttaacagaacacaatggattgattatgaacaatgtaaacttgacttagtcggtaagaatgtattgatcgtggatgaggttgatgacacacgtaccactctgcattacgccctccacgaactagagaaggatgccgcagaccaagccaaggctaagggtatcgatttggaaaagaatcctgagcaaaagacaaactttggtatctttgtcctacacgacaaactgaagccaaagaaggctgacctacctgctgaattattgaacgatccaaaccgttacttcgctgctagacaagtcccagacaagtggtatgcttacccatgggaatctaaggacatcgtattccacaccaagatggctgttcaacaaggtaacgatatcttcatggattaa

SEQ ID NO: 66238 - protein, 215 aa, Candida glabrata CBS 138
MSDEDKQYISYNNVHQLCQIGAERIKNFKPDLIIAIGGGGFIPARILRTFLKEPGVPTIRIFAIILSLYEDLHTAGSEVEQVGVKVNRTQWIDYEQCKLDLVGKNVLIVDEVDDTRTTLHYALHELEKDAADQAKAKGIDLEKNPEQKTNFGIFVLHDKLKPKKADLPAELLNDPNRYFAARQVPDKWYAYPWESKDIVFHTKMAVQQGNDIFMD

SEQ ID NO: 66239 - DNA, 627 bp, Candida glabrata CBS 138
  CDS (1)..(627)
atgtctgaagaaaagatctatatttcttacaacaatatccacaagctttgccaaaaaatcgctaagcaaattttggaaagagaagaaaggcctgatgttattattgctatcacgggtggtggtatgatacctgctagaattattagatcattcttgaaagttcaaggtcaaaagaatatacctattcaagccattggtttatctctctacgaagatcttggattgggtaacaccgctgatgtaatcggtaaggaagtgattagaactcaatggttggattttggtgctctagaccagcacttcgactctttgataggtaaaaaagtcctaattgttgatgaagttgatgacacaaggaccactttacactatgctgtgactgaattgcagaaagaagttgaggaacaacaaaaaagattaaatagattgaatgaagatacaatcttttctatatttgtccttcataacaaggataagaagaaaagagcgcagcttcctgcagaaatgatggactcaggtagatatttggctgcattaacagttccagacaaatggttatgttatccatgggaagcgcaggacattgaagaacacaccatacttgctaaacaacaaggcaatgactga

SEQ ID NO: 66240 - protein, 208 aa, Candida glabrata CBS 138
MSEEKIYISYNNIHKLCQKIAKQILEREERPDVIIAITGGGMIPARIIRSFLKVQGQKNIPIQAIGLSLYEDLGLGNTADVIGKEVIRTQWLDFGALDQHFDSLIGKKVLIVDEVDDTRTTLHYAVTELQKEVEEQQKRLNRLNEDTIFSIFVLHNKDKKKRAQLPAEMMDSGRYLAALTVPDKWLCYPWEAQDIEEHTILAKQQGND

SEQ ID NO: 66241 - DNA, 648 bp, Kluyveromyces lactis NRRL Y-1140
  CDS (1)..(648)
atgtctcaggaagattctggagctgatactagcaagatgtacatttcgtacaataatattcataagctttgccaagatgtagcgaaaactatcatgaataaaggtgaaagaccagatgtaatcattgctattactggtggtggtatgattccagccaggataatcagatcttttttgaaatccaagggtcaaaagaacattccaatccaagcaatcggtttgtcattatatgaagatttaggtctggatgaacaagttgagacaattggaaaagaagttatcagaactcaatggttagattttggtgctttggacaaacattttgattctttgatcggtaagagaattttgattgtcgatgaagttgatgacacgagaactaccctacattatgccttgactgaattggaaaaagaggttcatgagcaacaggtgaaattgaacagattgagtgaggagactactttctctatctttgttttacacaacaaggacaagcctaaaaaggttgaactaccaaaagaactgttcgacaatgaaagatatattgcagctgttactgtgcctgacaaatggttatgctatccatgggaagcaattgatattgaagaacataccaagtttgctatccaacaaggtaataactga

SEQ ID NO: 66242 - protein, 215 aa, Kluyveromyces lactis NRRL Y-1140
MSQEDSGADTSKMYISYNNIHKLCQDVAKTIMNKGERPDVIIAITGGGMIPARIIRSFLKSKGQKNIPIQAIGLSLYEDLGLDEQVETIGKEVIRTQWLDFGALDKHFDSLIGKRILIVDEVDDTRTTLHYALTELEKEVHEQQVKLNRLSEETTFSIFVLHNKDKPKKVELPKELFDNERYIAAVTVPDKWLCYPWEAIDIEEHTKFAIQQGNN

SEQ ID NO: 66243 - DNA, 648 bp, Kluyveromyces lactis NRRL Y-1140
  CDS (1)..(648)
atgtcttctgacgataagcaatacatctcatataacaatgtgcatcagctctgccaagagtcagccgaaaggatcaagaaattcaagccagatattatcatcgctattggcggcggtggttttatcccagctagaattcttcgtacatttttgaaagaacctggtattccaactatcagaatctttgccatcatattgtctctgtatgaggacttgtttactgttggttctgagcaagaagcggttggtgtcaccgtccaaagaacgcagtggattgattatgaacagtgtaagttggatttagttggtaagaacgtgttgattgtcgatgaagttgacgatacaagaacaacgcttcattatgctttgcatgaattagaaaaggatgccgaacaacaagccaaggccaagaatattgatttggataaacaaccagagatgagaaccaagtttggtatctttgttctacacgataaagtaaagccaaagaaggctgatcttccggaagaaatagtgaacgacgaggatcgttatatcgctggcagaaaggtaccagataaatggtatgcttatccatgggagtctactgacattgtttaccataccaaaatggctatggaacagggaaatgatgttttcttaccttaa

SEQ ID NO: 66244 - protein, 215 aa, Kluyveromyces lactis NRRL Y-1140
MSSDDKQYISYNNVHQLCQESAERIKKFKPDIIIAIGGGGFIPARILRTFLKEPGIPTIRIFAIILSLYEDLFTVGSEQEAVGVTVQRTQWIDYEQCKLDLVGKNVLIVDEVDDTRTTLHYALHELEKDAEQQAKAKNIDLDKQPEMRTKFGIFVLHDKVKPKKADLPEEIVNDEDRYIAGRKVPDKWYAYPWESTDIVYHTKMAMEQGNDVFLP

SEQ ID NO: 66245 - DNA, 630 bp, Debaryomyces hansenii CBS767
  CDS (1)..(630)
atgggttcggacgaagttcaagacaaaatgtacatttcgtacaacaatgtccatcaattatgtcaagaagcagcagacaaaattaaggaattcaaccctgacttaatcatagctattggtggtggtggttttattccagcccgtatgttacgttcattcttgaaagagccaggtcaaccaaatgtcagagttatggccattatcttgtctctttacgaggttgttgatggtgccaatgaagagcaaattggtaccgaggtggttagaacccaatggattgactaccaacaatccaagatcgatttagttggtaagaagatcttgattatcgacgaggttgacgataccagaaccactttgcactacgccatttctgagttgaaaaaggatattgctgaacaatctgctgctaagaatgccgatccaaacgataccacttttggtatttttgttttgcatgacaaggaaaagccaaagagggccgaattaccagccgaaatcatgaacggtaactactttgctgctagaaccgttccagacagctggatcgcctacccatgggaagcaattgacattgttgagcacaccaagagagctgttgaacaaggaaatgattgtttcttgccttaa

SEQ ID NO: 66246 - protein, 209 aa, Debaryomyces hansenii CBS767
MGSDEVQDKMYISYNNVHQLCQEAADKIKEFNPDLIIAIGGGGFIPARMLRSFLKEPGQPNVRVMAIILSLYEVVDGANEEQIGTEVVRTQWIDYQQSKIDLVGKKILIIDEVDDTRTTLHYAISELKKDIAEQSAAKNADPNDTTFGIFVLHDKEKPKRAELPAEIMNGNYFAARTVPDSWIAYPWEAIDIVEHTKRAVEQGNDCFLP

SEQ ID NO: 66247 - DNA, 636 bp, Yarrowia lipolytica CLIB122
  CDS (1)..(636)
atgagcgacgtccaggtccccaccgacaagaagtacatctcgtacaacaacgtgcacaagctgtgccaggaggcagccgagaagatcaaggagttcaagcccgatctgatgattgccatcggtggaggaggattcatccccgcccgaatcctgcgaacccacattcgagtgcccggctcaaagaacatccccatccaggccattggtctgtctctgtacgaggagcttggcaccggccagctcgaggagcagattggagtcgaggtggtccgaacccagtggctcgacttctccactctggagaagcactccggagacctgatcggcaagaacattctcattgtcgacgaggtggacgacacccgaaccaccctgcactacgccgtctccgagctggagaaggatattgctgcccaggccaagaagctgggccgagaggacgagaagaccactctccacgttttcgttctgcacaacaaggacaagcccaagaaggctgagctccccaaggacatgatggactctggccgatacattgctgcccgaaccacccccgatgagtggatcgcctacccttgggaggctcgggatatcgaggagcacaccaagttcgccaagctgcagaacaacgattag

SEQ ID NO: 66248 - protein, 211 aa, Yarrowia lipolytica CLIB122
MSDVQVPTDKKYISYNNVHKLCQEAAEKIKEFKPDLMIAIGGGGFIPARILRTHIRVPGSKNIPIQAIGLSLYEELGTGQLEEQIGVEVVRTQWLDFSTLEKHSGDLIGKNILIVDEVDDTRTTLHYAVSELEKDIAAQAKKLGREDEKTTLHVFVLHNKDKPKKAELPKDMMDSGRYIAARTTPDEWIAYPWEARDIEEHTKFAKLQNND

SEQ ID NO: 66249 - DNA, 624 bp, Aspergillus nidulans FGSC A4
  CDS (1)..(624)
atgccccaaaaagtctatgtcacctacaaccaggtccacaagctatgccaatcctcggctgaacaaatcctcaacacattccaccccaacttgatgatcgctattggtggaggcggttatgtccctgcccgcatcctccgatcgttcctcaagcgccccggcgagcccaacatccctattcaggccattggtctgtcgctctacgaggatcttggtcgcggtgacccagaggaggtccccggtacaaaggttacccgaacacaatggctggacctgagttccctggaaatggccaacctgattggcaagaacattctcattgtcgacgaggtcgatgacacccggacaacactggaatatgccgttcgtgaactgcaaaaggatgttgagcttgcgcaaaagcagcttggtcgcgaaggcgagaagacgaatttcttcgtgtttgtgctacaccttgaacagaacaaaaacaagtcgaagaagggccaactgcccactgacatgatggagtccggccggtaccacgccgctgtcaccactgatgacgtttggatttgctacccatgggaggcgaaggatattgatgaacacgacgcactcgcgaaggcaaaccccctagtctaa

SEQ ID NO: 66250 - protein, 207 aa, Aspergillus nidulans FGSC A4
MPQKVYVTYNQVHKLCQSSAEQILNTFHPNLMIAIGGGGYVPARILRSFLKRPGEPNIPIQAIGLSLYEDLGRGDPEEVPGTKVTRTQWLDLSSLEMANLIGKNILIVDEVDDTRTTLEYAVRELQKDVELAQKQLGREGEKTNFFVFVLHLEQNKNKSKKGQLPTDMMESGRYHAAVTTDDVWICYPWEAKDIDEHDALAKANPLV

SEQ ID NO: 66251 - DNA, 642 bp, Candida albicans SC5314
  CDS (1)..(642): transl_table=12
atgtctgaatctgagaaaatgtacatttcgtacaataatatacaccagttatgtcaagaaatagcccctaagatcaaagaatttaagcctgacttgatcattgctattggtggcggtggttttattccagctagaatgttgcgttccttcttgaaagaaccaggtcaaccaaacgttagaattatggctatcatattgtctttatacgaagagattgagagtgaaaacggtattgaaaagccaggtacccaagttgtgcgtactcaatggattgattatcatcaatctaaaattgacttggttggtaaaaatgtgttaattattgatgaggttgatgataccagaaccactttgcattacgcagtcagtgaattgaaaaaagatgtggaagagcaatcaaaagccaaaggtgcagatcctaaagataccaagtttggtatttttgtgttgcacgacaagcaaaagcaaaagaaagcagaattgccagatgatattatgaagactggtaattatttcgctgctcgttctgtcccagatagctggattgcatacccatgggagtctactgacattgtttatcatcaaatgaaagctgaagaacaaggaaacgatgtgttccttccttcatccactttagagtaa

SEQ ID NO: 66252 - protein, 213 aa, Candida albicans SC5314
MSESEKMYISYNNIHQLCQEIAPKIKEFKPDLIIAIGGGGFIPARMLRSFLKEPGQPNVRIMAIILSLYEEIESENGIEKPGTQVVRTQWIDYHQSKIDLVGKNVLIIDEVDDTRTTLHYAVSELKKDVEEQSKAKGADPKDTKFGIFVLHDKQKQKKAELPDDIMKTGNYFAARSVPDSWIAYPWESTDIVYHQMKAEEQGNDVFLPSSTLE

SEQ ID NO: 66253 - DNA, 765 bp, Ustilago maydis 521
  CDS (1)..(765)
atgtctcaagaacaacttccagacgaccacttccgccccacttacgaggatatccatgtccagatcggcgaagcggcgcgcaggatcaaggccgagtttgatccggatctcatggttgccatcggcggtggtggattctatccggctcgtgtgctgcgaactttcctcaagaagccttctgcgctcgaccccacgaagctccgcaacattcccatccaagctattggcttgagtctgtacgaagaagtctcaggaacttcggaaggtcagattggcaacgaggtagtgcgcacccagtggcttgatgccaagacggtcagcggccgtaaaggtccaggcaagattgaggagggcaaggatgccggaggactgctcggaaagaatgtgcttattgtcgatgaggtggatgattcgcgaaccactcttcaatatgcctattcggaactcctcaaggatgtcaaaaacgccattgccaatctctcggctgaggagcgtcagaatctcgcaccgactcgatttgccatctttgtagtgcacaacaaagaaaaggccggcggcaagcgtggaaccctgccgatcttgcccaaacagctctccaagaaccaagataagataattgatggcctcagtgaaggcgtacgatactattctacgcaggatattggcgacgtttggatttgctacccttgggaggaagaagatatcattgagcacaatcgcctggccgctttggccaaaaagctcggcgtcaaccagcccaactaa

SEQ ID NO: 66254 - protein, 254 aa, Ustilago maydis 521
MSQEQLPDDHFRPTYEDIHVQIGEAARRIKAEFDPDLMVAIGGGGFYPARVLRTFLKKPSALDPTKLRNIPIQAIGLSLYEEVSGTSEGQIGNEVVRTQWLDAKTVSGRKGPGKIEEGKDAGGLLGKNVLIVDEVDDSRTTLQYAYSELLKDVKNAIANLSAEERQNLAPTRFAIFVVHNKEKAGGKRGTLPILPKQLSKNQDKIIDGLSEGVRYYSTQDIGDVWICYPWEEEDIIEHNRLAALAKKLGVNQPN

SEQ ID NO: 66255 - DNA, 528 bp, Neisseria gonorrhoeae FA 1090
  CDS (1)..(528): transl_table=11
atgaaacagaaaatctggtacacctacgatgacatccaccgcgtcatcaaagcattggcagaaaaaatccggaacgccggcgtcaaatacgatgccatgatcgctatcggcggcggcggctttattccggcacgcatgctgcgctgttttctggaaattccgatttatgccgtaaccaccgcctattacgacagcgacagcgaaggacaagttaccgaagaagtcaaaaaagtccaatggctagaccccgtccccgaagtcctgcggggcaaaaacgtgctcgtcgtcgatgaagtggacgacagccgcgtaaccatggagttctgcctgaaagaactgctcaaggaagacttcgacactgtcggcgtcgccgtcctgcacgaaaaaatcaaagccaaagcaggcaaaatccccgaaggcattccctatttcagcggcattaccgtagaagactggtggatcaactatccgtgggacgcactcgacatcgacgaacacaaccgccttgccgaagccgatcgaggctaa

SEQ ID NO: 66256 - protein, 175 aa, Neisseria gonorrhoeae FA 1090
MKQKIWYTYDDIHRVIKALAEKIRNAGVKYDAMIAIGGGGFIPARMLRCFLEIPIYAVTTAYYDSDSEGQVTEEVKKVQWLDPVPEVLRGKNVLVVDEVDDSRVTMEFCLKELLKEDFDTVGVAVLHEKIKAKAGKIPEGIPYFSGITVEDWWINYPWDALDIDEHNRLAEADRG

SEQ ID NO: 66257 - DNA, 528 bp, Neisseria meningitidis FAM18
  CDS (1)..(528): transl_table=11
atgaaacagaaaatctggtacacctacgatgacatccaccgcgtcatcaaagcattggcagaaaaaatccggaacgccgacatcaaatacgatgccatgattgccatcggcggcggcggctttattccggcacgtatgctgcgctgttttctggaaattccgatttatgccgtaaccaccgcctattacgacagcgacaacgaaggacaggttaccgaagaagtcaaaaaagtccaatggctagaccccgtccccgaagccttacggggtaaaaacgtccttgttgtcgacgaagtggacgacagccgcgtaaccatggaattttgcctgacagagctgctcaaagaagacttcggcaccatcggcgtcgccgtactgcacgaaaaaatcaaagccaaagcaggtaaaatccccgaaggcattccctatttcagcggcatcaccgtagaagactggtggatcaactatccgtgggacgcactcgacatcgacgaacacaaccgccttgccgaggccggccgaggctga

SEQ ID NO: 66258 - protein, 175 aa, Neisseria meningitidis FAM18
MKQKIWYTYDDIHRVIKALAEKIRNADIKYDAMIAIGGGGFIPARMLRCFLEIPIYAVTTAYYDSDNEGQVTEEVKKVQWLDPVPEALRGKNVLVVDEVDDSRVTMEFCLTELLKEDFGTIGVAVLHEKIKAKAGKIPEGIPYFSGITVEDWWINYPWDALDIDEHNRLAEAGRG

SEQ ID NO: 66259 - DNA, 615 bp, Aspergillus niger
  CDS (1)..(615)
atgccgcagaaggtttatgtcacgtacaaccaggttcacaaactatgccaggcctccgctgacaagatcctggacaccttccagcccaatcttatgattgctatcggcggtggtggctacatccctgcccgcattctccgctctttcctgaagcgccccggcgagcctaacattcccattcaggccatcggtctttcgctttacgaggacctgggccgcggtgacgccgaagaagtccccggaaccaaggttacccgcacacaatggctggaccttagctctctggaaatggccaacctcattggcaagaacattctcattgttgacgaagtcgacgatacccgtacgaccctcgaatatgccgtccgcgagctccagaaggatgtcgagattgcgcagaagcagctcggccgtgaaggcgagaagacaaacttcttcgtctacgttgttcacaataaggacaagccgaagaagggtgtcttgccggaggatatgatgacctctggccgttaccacgcatccgtgaccaccgctgatgtttggatctgctatccttgggaagctaaggacattgacgagcacgacagactagctgaggagaaccctctcgtctga

SEQ ID NO: 66260 - protein, 204 aa, Aspergillus niger
MPQKVYVTYNQVHKLCQASADKILDTFQPNLMIAIGGGGYIPARILRSFLKRPGEPNIPIQAIGLSLYEDLGRGDAEEVPGTKVTRTQWLDLSSLEMANLIGKNILIVDEVDDTRTTLEYAVRELQKDVEIAQKQLGREGEKTNFFVYVVHNKDKPKKGVLPEDMMTSGRYHASVTTADVWICYPWEAKDIDEHDRLAEENPLV

SEQ ID NO: 66261 - DNA, 615 bp, Aspergillus oryzae
  CDS (1)..(615)
atgtcgcaaaaagtttatgtcacctataaccaggtgcacaagctgtgccagtcttcggctgataatatcctgacaacctttcatcctaaccttatgattgctattggcggtggcggatatgtccctgctcgtattcttcgatccttcctcaagcgcgctggtgaacccaacattcccattcaggccatcggcctatctctctacgaagatctgggccgtggtgacgccgaggaggttcctgggaccaaggtgactcggacacaatggttggatcttagttctttggagatggcaaaccttattggcaagaacatactcattgtggatgaggttgacgacactcggaccactttggaatatgcggttcgcgagcttcagaaggatgttgagcaggcacaaaagcagcttggacgggaaggcgaaaagacgaatttctttgtcttcgtgcttcataacaagaacaagtccaagaagggggtacttcctgcggatatgatggaatccggtcgctatcatgctgctgtcacaactgacgatgtttggatctgctatccatgggaagccaaggatattgatgagcacgatgcgttggccaaggagaaccctctcttttaa

SEQ ID NO: 66262 - protein, 204 aa, Aspergillus oryzae
MSQKVYVTYNQVHKLCQSSADNILTTFHPNLMIAIGGGGYVPARILRSFLKRAGEPNIPIQAIGLSLYEDLGRGDAEEVPGTKVTRTQWLDLSSLEMANLIGKNILIVDEVDDTRTTLEYAVRELQKDVEQAQKQLGREGEKTNFFVFVLHNKNKSKKGVLPADMMESGRYHAAVTTDDVWICYPWEAKDIDEHDALAKENPLF

SEQ ID NO: 66263 - DNA, 1166 bp, Saccharomyces cerevisiae
  CDS (501)..(1166)
tcgtttatcctttttgaactgcatctggcatcgttaacagtaaggccatctggaacatcaagcaagcactccacttttacgtcacaaccatagttggttaactaagaaaagacagtacatatttcccttccgagtcacttattttttttttcttctgaaaaaattaattagattaatttcaattaatatcatttccgcttatctgacttctttcattttttttctctatatttcgcgtttactaggaaagaaaaggaaaaaaaatttttccccctccatctgtcccaaatcgggtagcgatgagctgctatagaattttctatttaaacatgtttgataagcccaatttccgttagattttgttcccccttcgcagtttggtttgccgtaacttttttattttagtctccatctagctggagtaatacgatgtagtgccttgtaatctttcttatttttatattaccgttcgtgttcattatatccattacgttcccataatgtcggcaaacgataagcaatacatctcgtacaacaacgtacatcaactatgtcaagtatccgctgagagaattaagaatttcaagccggacttaatcattgccattggtggtggtggtttcattcctgctaggatcctacgtacgttcctaaaggagcccggcgtgccaaccatcagaatttttgctattattttgtctttgtacgaagatttgaacagtgtaggctcagaagttgaggaagttggtgttaaggttagcagaacacaatggattgattacgagcaatgtaaattagatctagtcggcaagaacgttcttatcgttgacgaagtcgatgacacccgtaccacacttcattacgctttgagtgaattggaaaaggatgcagctgaacaggcaaaggctaaaggtatcgatactgaaaagtctccagagatgaaaacaaacttcgggatttttgttctacacgataagcaaaaaccaaagaaagcagatttgcctgccgaaatgttgaatgacaagaaccgttattttgcagctaaaactgttccagacaagtggtatgcatatccatgggaatctactgacattgttttccatactagaatggctattgaacagggcaatgacatctttattcctgagcaggaacacaagcaatga

SEQ ID NO: 66264 - protein, 221 aa, Saccharomyces cerevisiae
MSANDKQYISYNNVHQLCQVSAERIKNFKPDLIIAIGGGGFIPARILRTFLKEPGVPTIRIFAIILSLYEDLNSVGSEVEEVGVKVSRTQWIDYEQCKLDLVGKNVLIVDEVDDTRTTLHYALSELEKDAAEQAKAKGIDTEKSPEMKTNFGIFVLHDKQKPKKADLPAEMLNDKNRYFAAKTVPDKWYAYPWESTDIVFHTRMAIEQGNDIFIPEQEHKQ

SEQ ID NO: 66265 - DNA, 621 bp, Schizosaccharomyces pombe
  CDS (1)..(621)
atggatcccgttcgtctttattacagctacaatgacattcataagatgtgtgctcaacaggcagaaaaaattttggaaacctttcgtcctgatgtgattatagccattggaggtggtggattcattccggctagaatccttcgtactttccttaagaaaaaaggaagcaaaaatattcccattcaagccattggtctcagcctgtatgaagagcttgtttctgattcccctgaagaagttcctgggcttgaagttaagcgaactcaatggcttgattttagtactcttggaatggttgatctcgttggcaagaacattctaattgttgacgaggtagatgatactcgtaccactctccattatgctcttcgcgagcttcaaagagatgttgccgagcaagctaagaagcttaaccgtgaaggagagaagaccacatttggtatttttgttgtccataataaggttaaaccaaaaaatgctcaattggataaggagattttggataaatattactttactggttgcaatactcccgactgctggatcatgtatccttgggaagctcaagacattgaggagcatgacagtcatgttgcaaaaatgggggatttgaagccatag

SEQ ID NO: 66266 - protein, 206 aa, Schizosaccharomyces pombe
MDPVRLYYSYNDIHKMCAQQAEKILETFRPDVIIAIGGGGFIPARILRTFLKKKGSKNIPIQAIGLSLYEELVSDSPEEVPGLEVKRTQWLDFSTLGMVDLVGKNILIVDEVDDTRTTLHYALRELQRDVAEQAKKLNREGEKTTFGIFVVHNKVKPKNAQLDKEILDKYYFTGCNTPDCWIMYPWEAQDIEEHDSHVAKMGDLKP

SEQ ID NO: 66267 - DNA, 25 bp, Artificial sequence
  primer
atggccgaaaatgagagaatgtaca

SEQ ID NO: 66268 - DNA, 23 bp, Artificial sequence
  primer
tcagtcatgaccttgagccttag

SEQ ID NO: 66269 - protein, 251 aa, Artificial sequence
  consensus sequence
  Variant (2)..(3): Xaa in position 2 to 3 is any amino acid
  Variant (4)..(11): Xaa in position 4 to 11 is any or no amino acid
  Variant (13)..(16): Xaa in position 13 to 16 is any amino acid
  Variant (18)..(20): Xaa in position 18 to 20 is any amino acid
  Variant (22)..(27): Xaa in position 22 to 27 is any amino acid
  Variant (29)..(30): Xaa in position 29 to 30 is any amino acid
  Variant (32)..(35): Xaa in position 32 to 35 is any amino acid
  Variant (36)..(37): Xaa in position 36 to 37 is any or no amino acid
  Variant (39)..(41): Xaa in position 39 to 41 is any amino acid
  Variant (49)..(50): Xaa in position 49 to 50 is any amino acid
  Variant (54)..(54): Xaa in position 54 is any amino acid
  Variant (57)..(57): Xaa in position 57 is any amino acid
  Variant (60)..(62): Xaa in position 60 to 62 is any amino acid
  Variant (63)..(74): Xaa in position 63 to 74 is any or no amino acid
  Variant (76)..(76): Xaa in position 76 is any amino acid
  Variant (79)..(82): Xaa in position 79 to 82 is any amino acid
  Variant (84)..(93): Xaa in position 84 to 93 is any amino acid
  Variant (94)..(99): Xaa in position 94 to 99 is any or no amino acid
  Variant (101)..(101): Xaa in position 101 is any amino acid
  Variant (103)..(103): Xaa in position 103 is any amino acid
  Variant (106)..(106): Xaa in position 106 is any amino acid
  Variant (108)..(108): Xaa in position 108 is any amino acid
  Variant (109)..(128): Xaa in position 109 to 128 is any or no amino acid
  Variant (130)..(130): Xaa in position 130 is any amino acid
  Variant (133)..(134): Xaa in position 133 to 134 is any amino acid
  Variant (136)..(136): Xaa in position 136 is any amino acid
  Variant (143)..(143): Xaa in position 143 is any amino acid
  Variant (145)..(145): Xaa in position 145 is any amino acid
  Variant (148)..(152): Xaa in position 148 to 152 is any amino acid
  Variant (155)..(155): Xaa in position 155 is any amino acid
  Variant (157)..(165): Xaa in position 157 to 165 is any amino acid
  Variant (166)..(182): Xaa in position 166 to 182 is any or no amino acid
  Variant (186)..(186): Xaa in position 186 is any amino acid
  Variant (187)..(189): Xaa in position 187 to 189 is any or no amino acid
  Variant (191)..(191): Xaa in position 191 is any amino acid
  Variant (193)..(193): Xaa in position 193 is any amino acid
  Variant (194)..(195): Xaa in position 194 to 195 is any or no amino acid
  Variant (197)..(200): Xaa in position 197 to 200 is any amino acid
  Variant (202)..(205): Xaa in position 202 to 205 is any amino acid
  Variant (206)..(223): Xaa in position 206 to 223 is any or no amino acid
  Variant (225)..(231): Xaa in position 225 to 231 is any amino acid
  Variant (233)..(233): Xaa in position 233 is any amino acid
  Variant (235)..(236): Xaa in position 235 to 236 is any amino acid
  Variant (240)..(242): Xaa in position 240 to 242 is any amino acid
  Variant (245)..(246): Xaa in position 245 to 246 is any amino acid
  Variant (248)..(250): Xaa in position 248 to 250 is any amino acid
MXXXXXXXXXXKXXXXYXXXHXXXXXXAXXIXXXXXXPXXXIAIGGGGXXPARXLRXFLXXXXXXXXXXXXXXXIXAIXXXXYXXXXXXXXXXXXXXXXVXRXQWXDXXXXXXXXXXXXXXXXXXXXXLXGKXXLXVDEVDDXRXTLXXXXXELXKXXXXXXXXXXXXXXXXXXXXXXXXXXVLHXXXXKXKXXXKXXXXPXXXXXXXXXXXXXXXXXXXXXXYXXXXXXXDXWXXYPWXXXDIXXHXXXA

SEQ ID NO: 66270 - protein, 29 aa, Artificial sequence
  protein pattern
  Variant (2)..(2): Xaa in position 2 is any amino acid
  Variant (5)..(5): Xaa in position 5 is any amino acid
  Variant (6)..(6): Xaa in position 6 is Ile or Val
  Variant (8)..(8): Xaa in position 8 is Ile or Val
  Variant (15)..(15): Xaa in position 15 is Ser or Thr
  Variant (17)..(17): Xaa in position 17 is Thr or Val
  Variant (19)..(19): Xaa in position 19 is Leu or Met
  Variant (20)..(20): Xaa in position 20 is any amino acid
  Variant (21)..(21): Xaa in position 21 is Phe or Tyr
  Variant (22)..(22): Xaa in position 22 is Ala or Cys
  Variant (23)..(24): Xaa in position 23 to 24 is any amino acid
  Variant (27)..(27): Xaa in position 27 is any amino acid
  Variant (29)..(29): Xaa in position 29 is Asp or Glu
LXGKXXLXVDEVDDXRXTXXXXXXELXKX

SEQ ID NO: 66271 - protein, 24 aa, Artificial sequence
  protein pattern
  Variant (2)..(2): Xaa in position 2 is any or no amino acid
  Variant (5)..(5): Xaa in position 5 is any or no amino acid
  Variant (9)..(10): Xaa in position 9 to 10 is any amino acid
  Variant (11)..(11): Xaa in position 11 is any or no amino acid
  Variant (15)..(15): Xaa in position 15 is Ile or Met
  Variant (16)..(16): Xaa in position 16 is Ile or Leu
  Variant (18)..(18): Xaa in position 18 is Cys, Ser or Thr
  Variant (21)..(21): Xaa in position 21 is Glu or Lys
  Variant (22)..(23): Xaa in position 22 to 23 is any amino acid
  Variant (24)..(24): Xaa in position 24 is Gly or Ile
IXAIXGGGXXXPARXXRXFLXXXX

SEQ ID NO: 66272 - protein, 25 aa, Artificial sequence
  protein pattern
  Variant (2)..(4): Xaa in position 2 to 4 is any or no amino acid
  Variant (6)..(6): Xaa in position 6 is any amino acid
  Variant (7)..(7): Xaa in position 7 is Ala, Cys or Asn
  Variant (11)..(11): Xaa in position 11 is Asp or Glu
  Variant (12)..(12): Xaa in position 12 is Ala or Ser
  Variant (13)..(13): Xaa in position 13 is any amino acid
  Variant (16)..(17): Xaa in position 16 to 17 is any amino acid
  Variant (19)..(19): Xaa in position 19 is Asp, Asn, Gln or Thr
  Variant (20)..(21): Xaa in position 20 to 21 is any amino acid
  Variant (23)..(24): Xaa in position 23 to 24 is any amino acid
  Variant (25)..(25): Xaa in position 25 is Asp, Gly, Asn, Gln or Ser
VXXXWXXYPWXXXDIXXHXXXAXXX

SEQ ID NO: 66273 - protein, 15 aa, Artificial sequence
  protein pattern
  Variant (2)..(5): Xaa in position 2 to 5 is any amino acid
  Variant (6)..(6): Xaa in position 6 is any or no amino acid
  Variant (8)..(8): Xaa in position 8 is Leu or Val
  Variant (10)..(10): Xaa in position 10 is Asp, Glu or Asn
  Variant (12)..(12): Xaa in position 12 is any amino acid
  Variant (14)..(14): Xaa in position 14 is any amino acid
TXXXXXVXHXKXKXK

SEQ ID NO: 66274 - DNA, 1086 bp, Saccharomyces cerevisiae
  CDS (1)..(1086)
atgatttctgctaattcattacttatttccactttgtgcgcttttgcgatcgcaacacctttgtcaaaaagagattcctgtaccctaacaggatcttctttgtcttcactctcaaccgtgaaaaaatgtagcagcatcgttattaaagacttaactgtcccagctggacagactttagatttaactgggttaagcagtggtactactgttacgtttgaaggcacaaccacatttcagtacaaggaatggagcggccctttaatttcaatctcagggtctaaaatcagcgttgttggtgcttcgggacataccattgatggtcaaggagcaaaatggtgggatggcttaggtgatagcggtaaagtcaaaccgaagtttgtaaagttggcgttgacgggaacatctaaggtcaccggattgaatattaaaaatgctccacaccaagtcttcagcatcaataaatgttcagatttaaccatcagcgacataacaattgatatcagagacggtgattcggctggtggtcataatacggatgggtttgatgttggtagttctagtaacgtcttaattcaaggatgtactgtttataatcaggatgactgtattgctgtgaattccggttcaactattaaatttatgaacaactactgctacaatggccatggtatttctgtaggttctgttggtggccgttctgataatacagtcaatggtttctgggctgaaaataaccatgttatcaactctgacaacgggttgagaataaaaaccgtagaaggtgcgacaggcacagtcactaatgtcaactttatcagtaataaaattagcggcataaaaagttatggtattgttatcgaaggcgattatttgaatagtaagactactggaactgctacaggtggcgttcccatttcgaatttagtaatgaaggatatcaccgggagcgtgaactccacagcgaagagggttaaaattttggtgaaaaacgctactaactggcaatggtctggggtgtcaattaccggtggttcttcctattctggatgttctggaatcccatctggatctggtgcaagctgttaa

SEQ ID NO: 66275 - protein, 361 aa, Saccharomyces cerevisiae
MISANSLLISTLCAFAIATPLSKRDSCTLTGSSLSSLSTVKKCSSIVIKDLTVPAGQTLDLTGLSSGTTVTFEGTTTFQYKEWSGPLISISGSKISVVGASGHTIDGQGAKWWDGLGDSGKVKPKFVKLALTGTSKVTGLNIKNAPHQVFSINKCSDLTISDITIDIRDGDSAGGHNTDGFDVGSSSNVLIQGCTVYNQDDCIAVNSGSTIKFMNNYCYNGHGISVGSVGGRSDNTVNGFWAENNHVINSDNGLRIKTVEGATGTVTNVNFISNKISGIKSYGIVIEGDYLNSKTTGTATGGVPISNLVMKDITGSVNSTAKRVKILVKNATNWQWSGVSITGGSSYSGCSGIPSGSGASC

SEQ ID NO: 66276 - DNA, 1185 bp, Arabidopsis thaliana
  CDS (1)..(1185)
atgaaaaccatattggatatttcgatcttgataaattttctctgttttggtattgtatacggcaaaaattacaacgtactcaattttgatgccaaaggagatggtcaaactgatgattcagaggcttttctacaagcatggactgctgcatgtggcggagacggggacataaaaacacttcttataccttccggcaaaacatttttacttcaacctactgtgtttcaaggcccatgtaaatctagttcgataaaagttcagttggatggcaccatcgttgcacctagtgacaaattcgcatggtcggaccccatctcccgaatgtggatcaaattttcaactgtgtctggcctaataatcgttggttcgggaaccattgatagtcgtggttcatctttttgggagcttaatctgaaagcttctcaacgacctacagcattacatatcagcaaatgtgacaaccttaggataaacgggataacatcgattgatagtccaaaaaatcatatatcaatcaaaacatgtaatactgttgcaatatcaaatataaatctttttgcacctgagacaagtcccaatacagatgggattgatataagtgactcgactaatatcaacatatttgactctacaattcaaactggtgacgattgtatagcaatcaatagtggaagttctaatattaacatcactggaatcaattgtggacctggtcatgggataagtgtggggagtttaggagcaggtggagcagaagctaaagtgagtgatgttcaagtgacacattgcactttcaatcagacgacgaatggagctagaatcaagacatggctgggtggacaaggatatgcaagaaacataagttttacggacatcacactcgttaacacaaaaaatccaattataatcgaccaacattatatagataaaggacgtcttacagaggaatcagcagtagctattagtaatgtaaaatttgtcgattttcgcggaacatcgtcaaataaaaatgctataacgcttaaatgtagcgaaactacacattgtgtagacgtcgttatggatggaattgatattaccatggcaaatggaggaaagcctaaagttaattgtcaatatgttgatggagagtccagtgacactgatttgatgcgagactgctttaaaaataacactagttcttga

SEQ ID NO: 66277 - protein, 394 aa, Arabidopsis thaliana
MKTILDISILINFLCFGIVYGKNYNVLNFDAKGDGQTDDSEAFLQAWTAACGGDGDIKTLLIPSGKTFLLQPTVFQGPCKSSSIKVQLDGTIVAPSDKFAWSDPISRMWIKFSTVSGLIIVGSGTIDSRGSSFWELNLKASQRPTALHISKCDNLRINGITSIDSPKNHISIKTCNTVAISNINLFAPETSPNTDGIDISDSTNINIFDSTIQTGDDCIAINSGSSNINITGINCGPGHGISVGSLGAGGAEAKVSDVQVTHCTFNQTTNGARIKTWLGGQGYARNISFTDITLVNTKNPIIIDQHYIDKGRLTEESAVAISNVKFVDFRGTSSNKNAITLKCSETTHCVDVVMDGIDITMANGGKPKVNCQYVDGESSDTDLMRDCFKNNTSS

SEQ ID NO: 66278 - DNA, 1302 bp, Arabidopsis thaliana
  CDS (1)..(1302)
atggcccgttgtaccaaccttgttaccgttttcctattatgggctcttttgatgttctcatggtgtaaagcttcaagaatcagccctaatgtatatgaccattcttataaaaggttcaaatccgatagcttaatcaagcgaagagaggacatcacgggattgagaagttttgtaagagcctctttgcggactccaaccaccgttagtgtttctgattttggagctaaaggagatggaaaaaccgatgacacgcaggcgttcgtgaatgcgtggaagaaagcatgttcttcaaatggagctgttaatctcctagttcctaaagggaatacttatctccttaagtctattcaattaactggtccatgcaattctattctcaccgttcagatattcggaacgttatccgcatctcaaaaacgatcggattacaaagatatcagcaaatggataatgtttgatggcgttaacaatctatcagtcgatggaggcgacactggggttgtggacggaaacggcgaaacgtggtggcaaaactcatgcaaacggaacaaagctaagccatgcacaaaagccccaacggctcttactttttacaactcgaaaagtctgatagtgaagaatctgaaggtgagaaatgcacagcagatccagatttcgattgaaaaatgctccaacgttcaggtctctaatgtcgtggtaactgcgcctgcggatagtcctaacaccgatggtattcatatcactaacacccaaaacattcgagtctccgaatccatcattggaacaggcgatgattgcatatctattgaaagtggatcacaaaatgttcaaatcaatgatataacttgcggtcccggtcacggtatcagtattgggagccttggagatgacaattcaaaggcttttgtctcaggcgtgactgtggatggtgctaagctttccggtacagacaatggagtaagaatcaaaacttaccagggagggtcaggaactgctagcaatattatatttcaaaacattcagatggataatgttaagaatccgatcataatcgaccaagactactgcgacaagagcaaatgcactacagagaaatccgcggtccaagtgaagaacgtggtgtaccgggacataagtggcactagcgcatcggaaaacgcaataacgtttaactgcagcaagaactatccatgccaaggaattgtgcttgacagagtgaacattaaaggaggaaaagcaacttgcaccaatgctaatgtggttgataaaggagctgttctgcctcagtgcaactccacttag

SEQ ID NO: 66279 - protein, 433 aa, Arabidopsis thaliana [sequence omitted]

SEQ ID NO: 66280 - DNA, 1080 bp, Gibberella zeae PH-1
  CDS (1)..(1080)
atgttctcttccatgatccttctcagcggcctggttgcctcagcctttgcccaccccactgttgagccccgtgccagctgcacctttactgatgctgcttctgctatcaagggcaagggtagctgctctaccattatcctcaacaacattgccgtccctgctggcactactcttgatcttaccaagctcaaggatggcactcatgtcatcttccaaggaaagactacctttggctatgatacctgggaaggtcccctgatctccttcactggaaacaaccttctcatcgaaggtgccgatggccactccattgactgtcagggtcagcgctggtgggatggcaagggcagcaacggtggcaagaccaagcccaagttcttcagtgcccattctctccagaactccaacatcaagaacttgaacgttatcaacactcccgttcaggctttcagcatcaacggagtcaccaacctcggtgtctacaacgtccacatggacaactctctgggagatacccagggtggacacaacactgacgctttcgatgtcggctcctccaccggtgtttacatctccggcgctgtcgtcaagaaccaggacgactgcctcgccatcaactccggcaccaacatcaccttcactggtggtaactgcagtggtggtcacggtctttccatcggatccgttggaggtcgatccaacaacgacgtcaagaccgtccgcattctcaactcatccatctccaactccgacaacggtgttcgcatcaagaccgtttctggagctaccggttccgtctccgacgtcaagtacgattccatcactcttagcaacattgccaagtacggtattgtcattgagcaggattacgagaacggctctcccactggtacccctactgctggtgttcccatcaccgatgtcaccatcaacaaggttaccggatctgtcaagtccagcggtaccgatatctacattctttgcgctagctgcaagaactggacctggaccaacaacaaggtcaccggtggtaagacctctgacaagtgccagggtgttccttctggagcttcttgctaa

SEQ ID NO: 66281 - protein, 359 aa, Gibberella zeae PH-1
MFSSMILLSGLVASAFAHPTVEPRASCTFTDAASAIKGKGSCSTIILNNIAVPAGTTLDLTKLKDGTHVIFQGKTTFGYDTWEGPLISFTGNNLLIEGADGHSIDCQGQRWWDGKGSNGGKTKPKFFSAHSLQNSNIKNLNVINTPVQAFSINGVTNLGVYNVHMDNSLGDTQGGHNTDAFDVGSSTGVYISGAVVKNQDDCLAINSGTNITFTGGNCSGGHGLSIGSVGGRSNNDVKTVRILNSSISNSDNGVRIKTVSGATGSVSDVKYDSITLSNIAKYGIVIEQDYENGSPTGTPTAGVPITDVTINKVTGSVKSSGTDIYILCASCKNWTWTNNKVTGGKTSDKCQGVPSGASC

SEQ ID NO: 66282 - DNA, 1086 bp, Aspergillus nidulans FGSC A4
  CDS (1)..(1086)
atgcatttccttcaaaactcccttattgctgcggcaatgggcgctgcgctggtcgctgccgcccctgctgctgatcttgatgctcgaagctcgtgcaccttcacctctgcctctgcggccaagtctggcgcatccaagtgctccactgtcaccctcaagagcatccaagttcctgccggtgagacccttgacctgaccggtctcaaatcgggtgctactgtacgcgagacaacctttggctacaaagaatggaaaggaccgctgatctccatgtccggtgacaaaatcacggttaagcaagcctctggcgcaaagatcaactgcgacggggcccgctggtgggacaccaagggcagcaacggcggcaagaccaagcccaagttcttcagcgcgcataagctgaacaactccaagattcaggggctgaagatctacaacacccctgtccagggattcagtatccagtccgaccacctgaccatttcggacgtgaccatcgacaactccgccggcaccagcaagggccacaacaccgatgcctttgacatcggctcctcgacgtacattaccatcgacggtgcgactgtctacaaccaggatgactgtattgccattaactccggcgagcacatcaccttcaccaacggatactgttccggcggccatggcttgtctattggctccgtcggcggccgcagcgacaacaccgtcaagagcgtcaccatctccaacagcaaggtcgtcgactcccaaaacggcgtccgcatcaagaccgtctacaaggctaccggctccgtcaccgatgtcaccttccaggacatcgaactctctggaatcaccaagtacggcctcattgttgagcaggactatgagaatggtagcccaacaggtacccctaccaacggtgtcgaggttgaagatatcaccttcaagaagattaccggctctgtggatagcagtgccacacgtgtcaatatcctctgcgggtcagggagctgcaaagactggacttggtctggggttgatattaccggcggaaagaagagctctaagtgcaagaatgttccgtctggtgcttcgtgctag

SEQ ID NO: 66283 - protein, 361 aa, Aspergillus nidulans FGSC A4
MHFLQNSLIAAAMGAALVAAAPAADLDARSSCTFTSASAAKSGASKCSTVTLKSIQVPAGETLDLTGLKSGATVRETTFGYKEWKGPLISMSGDKITVKQASGAKINCDGARWWDTKGSNGGKTKPKFFSAHKLNNSKIQGLKIYNTPVQGFSIQSDHLTISDVTIDNSAGTSKGHNTDAFDIGSSTYITIDGATVYNQDDCIAINSGEHITFTNGYCSGGHGLSIGSVGGRSDNTVKSVTISNSKVVDSQNGVRIKTVYKATGSVTDVTFQDIELSGITKYGLIVEQDYENGSPTGTPTNGVEVEDITFKKITGSVDSSATRVNILCGSGSCKDWTWSGVDITGGKKSSKCKNVPSGASC

SEQ ID NO: 66284 - DNA, 1095 bp, Ustilago maydis 521
  CDS (1)..(1095)
atgcctttcgacgccatggcctgccttttgctggttggttgggtgctgttgagcttgggtaccagcaacacgcaggcagctgactgcacatttgcagatgcagcaagtgtcaagttggggaagaggtcttgcagaatgatcacgctctccagcatcaaggtgccagctgggcagacgctggacctgacgggtctccgtacaggcacaaaggtgatctttgagggcacgaccacattcggttacgagacttggcctggcccattgatcgcggtgtcgggcaagaacatcgacattagcgggagcagcgggtcggtgttggacgcgggaggagggcagtggtgggatgggaagggaagcaacggtggcaagacgaaaccgaaattcttgttcgctcatgggctgatcaacagcagcattcgatatctcaacgtcaagaacacgccggtacaagcgttcagcatcaatggttgctccaacttgagagtagatcacgtaacaatcgacaattcagcaggcgatgtgaatcgactgggacacaacacggatgcatttgatgtgggaaactcggacggtgtgttcatcacgaacgccaacgttcgcaaccaagatgactgccttgcgatcaattcgggaaccaacatcctcttctccggcggctactgctctggaggtcacggcttgtcgattggtagtgtgggcggtcgcagcgacaatacagtggacggtgtgcatatcgtcaactcgcaagtggtcgacagccagaacgcggtgcgcatcaagacagtgtcgggtgctacgggtgtggtgaataatgtgacgtattccaacatcaaattgtcgggtattttcaagaacgggatcgatattcagcaagactacctgaatggccgaccaacgggcaagccgaccaacggtgttaagatcaccaacatccacatgaacggcatcacagggacggtcaacccgggagcgacagaggtgtatgtgctttgtggtcaaggatcgtgctcgagatggcgatggtccggtgtgtcgatcagcggtggtctgaggagtaccaaatgcactggagttccctcaggagcattttgctga

SEQ ID NO: 66285 - protein, 364 aa, Ustilago maydis 521
MPFDAMACLLLVGWVLLSLGTSNTQAADCTFADAASVKLGKRSCRMITLSSIKVPAGQTLDLTGLRTGTKVIFEGTTTFGYETWPGPLIAVSGKNIDISGSSGSVLDAGGGQWWDGKGSNGGKTKPKFLFAHGLINSSIRYLNVKNTPVQAFSINGCSNLRVDHVTIDNSAGDVNRLGHNTDAFDVGNSDGVFITNANVRNQDDCLAINSGTNILFSGGYCSGGHGLSIGSVGGRSDNTVDGVHIVNSQVVDSQNAVRIKTVSGATGVVNNVTYSNIKLSGIFKNGIDIQQDYLNGRPTGKPTNGVKITNIHMNGITGTVNPGATEVYVLCGQGSCSRWRWSGVSISGGLRSTKCTGVPSGAFC

SEQ ID NO: 66286 - DNA, 1071 bp, Lygus lineolaris
  CDS (1)..(1071)
atgtggaataacatgaaccccatcggaggcctcctcctagtcatcgtatctgcttacggtgccgtagtcacaaattacaatcaactgggtgctgccaaacagggtaacctcatcaccttgaaggaccttcaggtaccggctggagtcactttggacctgactaaattgaaacctggaacgacagtagagttttctggacgcaccactttcggataccatgagtgggctggtcctctggtcaaagttagcggtaagaacctgaagatcgtcggtctgccaggcaatctcttggatggtgaagggaaacgatggtgggacggcaaaggaggcaatggtggagtagcgaaacccaggttcatggaagtcaacattgaagactctaccattagcggtttgaacatcaagaacccacctgcatggtgttttgtagccaattattgtaaaaacatccacatttcgaacctcaacattgacatcaaagatggcgataagaaagcaggaggacacaacactgatggtattggcgtcggttacagtaataatgtgacgatcctcaactgtaaagtccataatcaagatgattgtttcgttactggagctggtagcgatatcctgatcgacaacttgtcctgtactggaggacacggaatttcaattggttctttgggtcgtggagctgtcgttgaaagggtgaccgtgaagaatagtaaaatcatcaagaatatggttggagtcaggattaaatccaccagaggagagactggggcgattagggacatcacttttgacaacatcgaactccaaggaatcacaaggtacggtatcattgtggaaggcaactacctcaactcaggatctgcaggtgatgcgaccccgttccccatcgaaaatatcgtcttcaacaacgtgcgaggaagcgtagttcgcaaggctactaacatatatgtgaacattcatcccaccagtggtaagaactggaggtggagcaacattaacgtcactggaggtcagaaagagctcaaatgtattggagttcctgcaggcgtgaatgtcaattgcggcaagaagtaa

SEQ ID NO: 66287 - protein, 356 aa, Lygus lineolaris
MWNNMNPIGGLLLVIVSAYGAVVTNYNQLGAAKQGNLITLKDLQVPAGVTLDLTKLKPGTTVEFSGRTTFGYHEWAGPLVKVSGKNLKIVGLPGNLLDGEGKRWWDGKGGNGGVAKPRFMEVNIEDSTISGLNIKNPPAWCFVANYCKNIHISNLNIDIKDGDKKAGGHNTDGIGVGYSNNVTILNCKVHNQDDCFVTGAGSDILIDNLSCTGGHGISIGSLGRGAVVERVTVKNSKIIKNMVGVRIKSTRGETGAIRDITFDNIELQGITRYGIIVEGNYLNSGSAGDATPFPIENIVFNNVRGSVVRKATNIYVNIHPTSGKNWRWSNINVTGGQKELKCIGVPAGVNVNCGKK

SEQ ID NO: 66288 - DNA, 1098 bp, Lygus lineolaris
  CDS (1)..(1098)
atgggtacctcaggcttagctcttgggtgcttgttcttcgtggttgcatccgcatcagcacaatacttcgagttgaagaacgtcaaccaactggctgaggccaagaagttccagaaaatcgtcatcagagacctccaagtcccggctggtgtaacgttggacttgtccaacttgaagccaggaacaaccgtcgagtttgcaggaagaattactttcggctacaaggaatggaaaggaccgcttgtcaaggtcaccggtaaacagctgacaatcatggctcacagttacgcgagatttgacggtgaaggtcacagatggtggaagggaggtcgcgagtcgaagcttgtgaagccgaggttcttcgaagctatcgttgacgattcgaccatcacgggtttgtacttcaagaatactccagccccttgcttcctctgcaactggtgccacaacgttgccatttccaaaataaccgttgataccaaagacgccggcgacggcagggctggaagggcgttcaacactgatggcatcagtttgggatacgtcaagaacgttactgttcgcgacagctacgttttcaaccaagacgactgcttcgtcacgggagccggcgaagacatgctaattgacaatctgacctgcgaaggaggaaatggaatcagtgtcgggtctcttggaaatggcgctgatgtcgtgaggtgcacaatcagaaacagcagggtcaccaacagcttgaatggtctgcgcctcaagtcagagaccaacgcagtgggtctccacagaggcgttacatttgaaaacatcgaactcaaggatattcatcaatatggaattagcatctacggaaactacgggcccacatacccaactggtgagccaacattcttcatcatggatcagctgaccatgaggaacatcagaggaaccatggcggctcctggtggtgccaacgtttggatttggctccataaagacagtgctaggaactggaagtgggaaaatgtcaacgtggttggaggaaagagcgccatgttccgcccaccactcacgtgcaaaggagttcctccgaatcttggaatccgatgtgctgagaaatga

SEQ ID NO: 66289 - protein, 365 aa, Lygus lineolaris
MGTSGLALGCLFFVVASASAQYFELKNVNQLAEAKKFQKIVIRDLQVPAGVTLDLSNLKPGTTVEFAGRITFGYKEWKGPLVKVTGKQLTIMAHSYARFDGEGHRWWKGGRESKLVKPRFFEAIVDDSTITGLYFKNTPAPCFLCNWCHNVAISKITVDTKDAGDGRAGRAFNTDGISLGYVKNVTVRDSYVFNQDDCFVTGAGEDMLIDNLTCEGGNGISVGSLGNGADVVRCTIRNSRVTNSLNGLRLKSETNAVGLHRGVTFENIELKDIHQYGISIYGNYGPTYPTGEPTFFIMDQLTMRNIRGTMAAPGGANVWIWLHKDSARNWKWENVNVVGGKSAMFRPPLTCKGVPPNLGIRCAEK

SEQ ID NO: 66290 - DNA, 1056 bp, Lygus lineolaris
  CDS (1)..(1056)
atgagtccttacatctgtggaattttgatgtgcgtcgcagcagcttcggctgttgatgtttggaatctgcagcagcttgaggctgccaaaagaggcaacgatctcaccatcaatgtcagggacatattcgttccagctggccagactctgaattttgaattcgtcaagccaggaaccaccattgtgtttagaggacgtgttactttcggatacaaagaatggagaggacccctcatcattctaaaagggagaaatcttaaaataaagggtggagctggacacatttttgacggtgaaggccgccgttggtgggacggtacaggaaccaacagtggtaagataaagccttacatgttctacgttcagttggcggactcaagcgtaagaggtttgaccatcaagaattcccccgctcacactttcgctattaatgattgcaaccacatctccatcaacaacgtcatgattgataacagagatgggaacaggtttggaggccacaatactgatggatttgatgtggctaaatcacaccgtgtcatcattgccaacagcacgatctacaatcaggatgattgcttggccatcaactcaggtactgagatcacattccaaaggaacaagtgtatcggaggacacggcattgcagtggcagttggaggataccaagtgaatgaagccaggaacatcgtgatcaggggttgtcgttgcatacaaacgaagtacggagttcgtatcaagaccctgttgaatggcagagggattgtcaaaggagtcaagatcgaaaatatcctcctcaaggacgtcactgatgctggacttctcatcatcggtaattatctgaattcaggaccaaaaggtgagccgactggaggcatcccgatagaggatttgacggtgaacaatgttcgtggaaacgtgctcgctaagggaaccaatatcaacgtcttggtggccaacgccaggaactggcaatggagttcgaacattcaaggaggacagaggagactgccatgcaagggtattcccaacggtcttcgcattccctgcggttaa

SEQ ID NO: 66291 - protein, 351 aa, Lygus lineolaris
MSPYICGILMCVAAASAVDVWNLQQLEAAKRGNDLTINVRDIFVPAGQTLNFEFVKPGTTIVFRGRVTFGYKEWRGPLIILKGRNLKIKGGAGHIFDGEGRRWWDGTGTNSGKIKPYMFYVQLADSSVRGLTIKNSPAHTFAINDCNHISINNVMIDNRDGNRFGGHNTDGFDVAKSHRVIIANSTIYNQDDCLAINSGTEITFQRNKCIGGHGIAVAVGGYQVNEARNIVIRGCRCIQTKYGVRIKTLLNGRGIVKGVKIENILLKDVTDAGLLIIGNYLNSGPKGEPTGGIPIEDLTVNNVRGNVLAKGTNINVLVANARNWQWSSNIQGGQRRLPCKGIPNGLRIPCG

SEQ ID NO: 66292 - DNA, 1086 bp, Kluyveromyces marxianus
  CDS (1)..(1086)
atgttattcagcaacaccttattgatcgcagcagctagtgcattattagctgaagcttctccattggaaaagagagacagttgtaccttgagtgggaagacagccggaggtggtttgtccaactgtgccacggtcactgtcaacaacgtcgaagtcccatctggtaagactttggacttgacaggcttgccagacggtgcgacagttaatttcgtcgggcaggttacctttggttacgatgaatgggtgggtccattggtctccatctccggtaagaacatcaaggtggtaggtaaatctggccacttgttagatggtgatggtgcacgttggtgggacgggaagggtgacggtggtaaaaagaagcctaagttcatgagcttgagattaactggcaactcagatgtcggtgggttgcaaatcaagaataccccaattcaagctatctcagtgaactcttgtagtgacactgtaattcacgatgtcaccattgacaacagagatggtgacaaggacaacttgggtcacaacactgacggtttcgatgttggtaacgttaacaacgtcaccattgagaacagtcatgtctacaaccaagatgactgtatcgccgtcaactccggtaccggtgtctacttcaagaacaactactgttctggtggtcatggtgcttccattggttcagtcggtcttcgctcaaacaatgtggttgacaccgtttacttcgagaacaaccaaattgtcaactctgacaacggtttgagaattaagaccattcaaaaggccactggttccgtcaacaacgtgcacttcttgtccaacactatctccggcatcagaaagtttggtattgttgttgaaactgattacagcaatggatccaccaccggtaccccaggtagcaaggtcccaatcaccaacttcgaagtcgatggtttgactggttcagttgactcttccgcttacagagtcaagatcttcgttgctggtgcttctaagtggacttggaagaatgttgatatcactggtggttcttctttcggttcatgtactggtattccatctggtagcggagccttctgttaa

SEQ ID NO: 66293 - protein, 361 aa, Kluyveromyces marxianus
MLFSNTLLIAAASALLAEASPLEKRDSCTLSGKTAGGGLSNCATVTVNNVEVPSGKTLDLTGLPDGATVNFVGQVTFGYDEWVGPLVSISGKNIKVVGKSGHLLDGDGARWWDGKGDGGKKKPKFMSLRLTGNSDVGGLQIKNTPIQAISVNSCSDTVIHDVTIDNRDGDKDNLGHNTDGFDVGNVNNVTIENSHVYNQDDCIAVNSGTGVYFKNNYCSGGHGASIGSVGLRSNNVVDTVYFENNQIVNSDNGLRIKTIQKATGSVNNVHFLSNTISGIRKFGIVVETDYSNGSTTGTPGSKVPITNFEVDGLTGSVDSSAYRVKIFVAGASKWTWKNVDITGGSSFGSCTGIPSGSGAFC

SEQ ID NO: 66294 - DNA, 1104 bp, Aspergillus oryzae
  CDS (1)..(1104)
atgcatttccaacttctcggcctcgccgccctcggctctctcgccgctgctgctcccgccccttctcgcacctctgaactggttgagagaggctcttcttgcactttcacctccgctgctcaggcctctgcgagcgccaagagctgctccaacatcgtcctcaagaacatcgctgtccctgctggagagactcttgacctgtccaaggccaaggacggtgccaccatcaccttcgagggcaccaccaccttcggctacaaggaatggaagggacccctgatccgtttcggtggtaacaaaatcaccgtcacccaggccgccggcgctgtcattgacggccagggctcccgctggtgggacggcaagggcaccaacggtggcaagaccaagcccaagttcatctacggccacaagctccagtcctcgaccatcaagggtttgcacgttaagaactaccccgtccaggtcttcagcgtccagggtaacgacgtccacctgaccgacatcaccatcgacaactcggatggtgacaacaatggtggtcacaacaccgatgctttcgacgttagcgagagtaacggtgtctacatcaccggtgccaatgtcaagaaccaggatgactgcctggccatcaactctggtgagaacatcgaattcaccggcgctacctgctccggcggtcacggtatctccatcggttccatcggtaaccgcgacagcaacaccgtcaagaacgtcaaggttgccgactccaccgtcgtcgactccgacaacggtatccgtatcaagaccatctctggtgctaccggctctgtcagcggcgtgacctacgagaacatcaccctcaagaacatcaagaagaacggtatcgtcatcgagcaggactacaagaacggtggccccaccggcaagcccaccaccggtgtccccatcactgacctcactgtcaacggtgtcactggctccgttgccagcaaggccacccccgtctacatcctctgcggcaagggcagctgctctgactggacctggaagggtgtcagcatctccggtggcaagaagtctgataagtgccagaacattccttctggcgcttcttgctaa

SEQ ID NO: 66295 - protein, 367 aa, Aspergillus oryzae
MHFQLLGLAALGSLAAAAPAPSRTSELVERGSSCTFTSAAQASASAKSCSNIVLKNIAVPAGETLDLSKAKDGATITFEGTTTFGYKEWKGPLIRFGGNKITVTQAAGAVIDGQGSRWWDGKGTNGGKTKPKFIYGHKLQSSTIKGLHVKNYPVQVFSVQGNDVHLTDITIDNSDGDNNGGHNTDAFDVSESNGVYITGANVKNQDDCLAINSGENIEFTGATCSGGHGISIGSIGNRDSNTVKNVKVADSTVVDSDNGIRIKTISGATGSVSGVTYENITLKNIKKNGIVIEQDYKNGGPTGKPTTGVPITDLTVNGVTGSVASKATPVYILCGKGSCSDWTWKGVSISGGKKSDKCQNIPSGASC

SEQ ID NO: 66296 - DNA, 2291 bp, Botrytis cinerea
  CDS (867)..(2015)
caaacggccgatccaaccttttctttttactatcagattgaaattccaaaaatgtaatccctacgattctagatggcactcgcaaaaccatcagttagaatctcaggggttcttaaccacaccaatcatatccttctaaacttccatcaaatctctagtgcagccgtcgtttgttgacatttcatcaactcaaaacatccaacaacttcgccgcatcattttttgggttagtcgttggttaattacactaattgaggcgttgtgctctggaattagtctagaagagctccaatttcatcaccttgacaagtaattaaggaggaacggtacttcgaaagtacttcgaaattacttcggagtgatgttgtaatataccggagggtctagctaagattgccttttatgcttgtccaaagcttcttttgcttcgtttcatcttccaagcctttcgttcccccttgatgtatagcccattcaacaagaaagtggtgacattttgtactccacaaggcaatctctccttatttcaaagcttatgtttgatgatgttccaaggatcgctggggtcagaatgcggaccttgatcttacatggcagagcaaaagcgtaccatagcatcaaatatactttggctcaccgcgggttaggtttaccgctgttaacatttcgcatcaacagccgacggcggattcaaccgggttccacttctttgatgcttttccgaatttcaatcatgtatttacatatataaggaagcttcgaatacctttttttcattcctcatctcatcatcacttacattcttttccatactgtctagtacattcactctttaaacttacattcttttaacactactagccaatatggttcaacttctctcaatggcctccggcctccttgcgctgagcgcaatcgtctctgctgctccagcaccagcaccaaccgcagcaccaaacccagctgaggctctcgccgctatcgagcaacgtggtaccgcctgtaccttctccggatctggcggtgctgcagccgcttccaagtccaaggcttcctgcgccaccatcgtcctcagcgccctctccgtcccatccggtactactcttgacttgactggcctcaagtccggcacccaggtcatcttcgagggtaccaccaccttcggttacgaagaatggtccggtcctctcttctctgtctccggaactgacatcactgtcaagggtgcctccggcagcaagcttgatggtcaaggagccaagtactgggatggtaagggaaccaacggtggaaagaccaagccaaagttcttctacgcccactccttgaagggtaaatcaacaatctctggtatcaacatcttgaactctccagttcaagtcttctccatcaacggtgcttccggtcttactctctccaacatcaacattgacaactctgctggagatgctggttcccttggccacaacaccgatgctttcgatgttggttcctccagcgatatcaccatctccggtgccgtcgttaagaaccaagatgactgtctcgctatcaactccggtactggtattaccttcaccggtggaacctgttccggtggtcacggtctctccatcggatctgtcggtggacgttccgacaacactgtctccgatatcatcatcgaatcatctactgtcaagaactctgccaacggtgtccgtatcaagactgtctccggtgccactggatccgtctccggcgttacctacaaagacatcaccctctccggcattacatcctacggtgttgtcgttcaacaagattacaagaacggttccccaactggtaccccaacttcaggtgtccccatcactgatgtcactttctccaacgtcaagggtaccgtcgcctccggtgccaccaatgtctacgttctttgcgccaagtgctctggctggtcttgggatgtcagtgttagcggtggtaagacctccagcaagtgtgctggtctcccatctggtgtcaagtgttaaacatcttaacaccttgaccatcaaaccctttgcagggtttggaacaattttatagaaggggatggggggtggtgttgttggagcagtgctcagtgttcgcgttctttgtatatatagcttctattgtccacatatcgactgtttaaaccattgtaatcgaattaatttgattaccttccaaaactttagcttccaatcatgctcttcagtgaactctccaggtctctgtgaaaccaatcgatttctcgccgtataagtcttaccctctgtatcagc

SEQ ID NO: 66297 - protein, 382 aa, Botrytis cinerea
MVQLLSMASGLLALSAIVSAAPAPAPTAAPNPAEALAAIEQRGTACTFSGSGGAAAASKSKASCATIVLSALSVPSGTTLDLTGLKSGTQVIFEGTTTFGYEEWSGPLFSVSGTDITVKGASGSKLDGQGAKYWDGKGTNGGKTKPKFFYAHSLKGKSTISGINILNSPVQVFSINGASGLTLSNINIDNSAGDAGSLGHNTDAFDVGSSSDITISGAVVKNQDDCLAINSGTGITFTGGTCSGGHGLSIGSVGGRSDNTVSDIIIESSTVKNSANGVRIKTVSGATGSVSGVTYKDITLSGITSYGVVVQQDYKNGSPTGTPTSGVPITDVTFSNVKGTVASGATNVYVLCAKCSGWSWDVSVSGGKTSSKCAGLPSGVKC

SEQ ID NO: 66298 - DNA, 1104 bp, Phaedon cochleariae
  CDS (1)..(1104)
atgtcgatcagattgatagccgtactctcagctgcatcaattgcagtcacatcagctactccggttgctgattcgagctgcactatttccagcttcgaccaagtagcttcagtgttagctgaatgtacagacatcgtagtatccaatcttgaagtacctgctggcgaaactttgaatcttgagaccaagaaaaaaggagttaccataactttcgagggtaagactaccttcgcatataaagaatggaccggacctcttctgagggtaaaaggaaaagccatcactgttgtgggagctaaaggctcagtccttgatggacaaggacagctctattgggatggcaaaggtggaaacggaggaataaagaagccgaaatttttcaaaataaaggcaacagaaggttcccatttcaaaaatatcaatttactgaactgcccagtacaagtgcactcaattgatcattctggaccactcactctcagtggatggaacattgatgtttcccaaggagacaaagatgcattgggccacaatactgatggattcgacatcaacaccacagatcaactgacaatcgaagataccgtggtcaaaaaccaagatgattgcatcgcagtcaaccaaggcacaaatttcctctttaacaatttggattgttccggaggccatggtttgagtctgtcagttggcaccagccatgaaattatcaagaacaccgtcagaaatgtcactttctctaattcagttgttcgcaaatcgaggaatgggatccatatcaaaacaacataccaattccggggaaggtatccatggaggatgttaacttacagcaacattgccatggaaggtatctggaagtatgctgtcaacgtagaacaggactataagaagggcaaacccactggaatccccgttggaaacatacccatcaaaggtttacatctggaaaaagtcaccggaactttgaccggagaagaatcgactccggtgtatatcatttgcgctgatggtgcttgcagcaacttcaactggtcgggtgtatcatttgaaggtgcttcgcacgctagtaactgtagttacgtacctactggctattcttgttga

SEQ ID NO: 66299 - protein, 367 aa, Phaedon cochleariae
MSIRLIAVLSAASIAVTSATPVADSSCTISSFDQVASVLAECTDIVVSNLEVPAGETLNLETKKKGVTITFEGKTTFAYKEWTGPLLRVKGKAITVVGAKGSVLDGQGQLYWDGKGGNGGIKKPKFFKIKATEGSHFKNINLLNCPVQVHSIDHSGPLTLSGWNIDVSQGDKDALGHNTDGFDINTTDQLTIEDTVVKNQDDCIAVNQGTNFLFNNLDCSGGHGLSLSVGTSHEIIKNTVRNVTFSNSVVRKSRNGIHIKTTYQFRGRYPWRMLTYSNIAMEGIWKYAVNVEQDYKKGKPTGIPVGNIPIKGLHLEKVTGTLTGEESTPVYIICADGACSNFNWSGVSFEGASHASNCSYVPTGYSC

SEQ ID NO: 66300 - DNA, 1113 bp, Claviceps purpurea
  CDS (1)..(1113)
atgtattctcttctcatgcttttgctgcccgtctggacgggtagctttgtgtcggctgcacccgcagtttctagggctgcggcgctgtccggtgccgattgcacattttccgatgtcgcgcaggcgattcagaagaaaactagctgcagcaccatcactctgcgtaaccttaaagtgccggccggcaagactctcgacctgagcgacttgaacgatggcactcgcgtcatcttcactggccgaacaacattcgaataccaagagtgggaaggccccctcatcgccgtgtcgggaacgaacatcaaggtgtcgggctcccccggtaacatcattgactgcgaaggtcaacgatggtgggacggcaagggcaccaacggtcaaggcaagaagaagcccgacttcttcaacgcccacgacctcatcaactccgagatcagaaacctgaacgtgctcaacacccccgcacacgcattcagcatcagccacgccgagaacctgggcattttcaacgtcaacatcgacgactctgccggtgatacccagggaggacacaacactgacggcttcgacattggcaattcgaacggcgtcaccatctctggctgctcggtccgcaaccaggacgactgcatggccatcaactctggcaccaacatcacctttgtgaatggcttctgctcgggaggccatggtctctccatcggatccgtcggcttccgcagctccaacactgtcaagggcgtgcacattgccaactccaaagtcaccaagtctatgtacggcgtccgcatcaagaccatcgccggcgccgagggtgccgtctcggacgttgtgtacgacaacatctccatgagtgagatttctgatatcggcatcgtcatccagcaggactacaagaacggtaaaccaactggaaatcccaccactggcgtccccatcaccaacctcactgttaacaaggtgaccggtaacgtcaagcccggcggcgccaacgtgcacattctctgcggctcgtcctcctcctgcaagggatggacgtggaccgacaacaagatcgtcgatggtgccacccctaaggccaactctgccgtcccggccggagttgtattgtaa

SEQ ID NO: 66301 - protein, 370 aa, Claviceps purpurea
MYSLLMLLLPVWTGSFVSAAPAVSRAAALSGADCTFSDVAQAIQKKTSCSTITLRNLKVPAGKTLDLSDLNDGTRVIFTGRTTFEYQEWEGPLIAVSGTNIKVSGSPGNIIDCEGQRWWDGKGTNGQGKKKPDFFNAHDLINSEIRNLNVLNTPAHAFSISHAENLGIFNVNIDDSAGDTQGGHNTDGFDIGNSNGVTISGCSVRNQDDCMAINSGTNITFVNGFCSGGHGLSIGSVGFRSSNTVKGVHIANSKVTKSMYGVRIKTIAGAEGAVSDVVYDNISMSEISDIGIVIQQDYKNGKPTGNPTTGVPITNLTVNKVTGNVKPGGANVHILCGSSSSCKGWTWTDNKIVDGATPKANSAVPAGVVL

SEQ ID NO: 66302 - DNA, 1688 bp, Geotrichum klebahnii
  CDS (143)..(1246)
gatgctctgtttactataaatatctgtgaatcgcctgcaattatttttttttttgataaatcttcaagctcaacaactcttcttctttgaactgataaaaagccttatagactctcttatttgttcactcttaactataacaatgcttttttctaaatctgctatctttgctatggctgctcttgcagttgctgctcctactgaaggtgaccttcaagctcgtggcagcgcctgtgtttttaaggatgccaagtctgctattgctggcaagaagtcttgttcttctatcactcttgagaacattgctgtccccgctggtcaaactcttgatctcactggacttgccaagggcactgttgtcacctttgctggtaccaccacttttggctacaaggagtgggctggtcctttgatctccgtttctggtgattctattactgtcaagcaggcctccggcggtaagattgactgtggtggttctcgttggtgggacggtaagggttccaactctggtggtaagcaaaagcccaagttcttttacgcccacaagctccagaactccaacattcagggactccaagtttacaacacccctgtccaggctttcagcattttgtctgaccatttgactttgtcaaacattctcgttgacaacagagccggtgacaaggctggtggtcacaacaccgacgcttttgatgttggtaccagtacttacatcactatcgaccatgctacggtctacaaccaggacgactgtcttgctatcaactccggtgaccacatcactttccagaacggtttctgctctggtggacatggtctttctattggctccgttggtggccgctctcttaacactgtttccaacgtcaatattcttaacagtcaggttgtcaactctgataacggtgtccgtattaagaccatttctggtgctactggttctgtcagcggtgttaagttccaggacattactctctccaacattgccaagtacggtattgatgttcagcaggactaccgtaacggtggccccactggtaaccccactaacggagtcaagatcactggaatcgagttcatcaacattcacggtagtgtcaagagctctggtaccaacgcttaccttctctgtggttccggctcttgctccaactggacctggagcaagatcaacgtcaagggtggcaaggacagcggtgcttgcaagaacgttccttctggtgctacttgcaaactttaaatagcaactatatatactaccttaaactaagaaacttacattatttttaaacactattaaattttcacaaatttaatacacaaacgttcaatgaagggaaaccgtggacagtaagaatgagttgaaacttgactgaatacttgagttgttattttgtacttgttttagtaagcctaataaggatccatcatttaaggaaaaaaaaataaataataaataaacgttcatttatcttcaaaatgtcatcagtaaagtttcctatcaaaagttgtaaaagactttcatgttaaaaaaatgtttgtcagttatcaagaggtttttctctcaattgtcaagaaaaatgaaaccagacaattattcatattagaatgttcagtaacttaattagttcatgtctgtttttgtagtgcctgtagtgatagtttcttagactttttttgac

SEQ ID NO: 66303 - protein, 367 aa, Geotrichum klebahnii
MLFSKSAIFAMAALAVAAPTEGDLQARGSACVFKDAKSAIAGKKSCSSITLENIAVPAGQTLDLTGLAKGTVVTFAGTTTFGYKEWAGPLISVSGDSITVKQASGGKIDCGGSRWWDGKGSNSGGKQKPKFFYAHKLQNSNIQGLQVYNTPVQAFSILSDHLTLSNILVDNRAGDKAGGHNTDAFDVGTSTYITIDHATVYNQDDCLAINSGDHITFQNGFCSGGHGLSIGSVGGRSLNTVSNVNILNSQVVNSDNGVRIKTISGATGSVSGVKFQDITLSNIAKYGIDVQQDYRNGGPTGNPTNGVKITGIEFINIHGSVKSSGTNAYLLCGSGSCSNWTWSKINVKGGKDSGACKNVPSGATCKL

SEQ ID NO: 66304 - DNA, 1092 bp, Thanatephorus cucumeris
  CDS (1)..(1092)
atgcgtttctcacttggcttcttggccactctcccaatcgcactggtggctgcttctcctgctggaaagcgctgcacaggtacgatctcgtcgctgaacgacgtcgctgctgctcagaagtgcacaactatcaacatcaacgctttcaccgttccggcaggacagacctttgcgatcgctgcgctcgatggaaccaccgtcaacatgctcggggatgtgaagttcggggtcgccaactgggcaggtccgctcttctccatcaccggaaacaaacttgtcttcaacggcaatgggcacaccttagacggtcaaggtgctaagtactgggacggcctgggcagcgccagcggtgtgaccaagcctcacccgatgatgaagatcaagatgtctgggacgtactcgaatgtcaaggtgctcaactcgcccgcgcatgtatacagcgtcagcaaccctgccgcgttggttatgtccaagctcacaatcgataactctgccggtgacaagcccaacagcaagtccggcaccagcgctgctggccacaacactgatggctttgatgtttctaccaccgacctcacaatcgaagacagcaccatcttcaaccaggacgactgcattgccatcaaccagggctccaacatcatcttccagcgcaacacctgcaccggtggccatggtatctctatcggttcggtctccactggcgcgggctgtcaacaacatccagatcttgaacaaacaaggtggtcaacaacgaccaaggcactccgtatcaagaccaagtctgacgctaccaatgcgtcggtgacgaacgtggtgttcaacggcaacactgcaactgggatcaagaagttcggtgtgattgtcgaccagggttaccccaccacgcttggcacccccggcaacaatgtcgccatgtctggcatttctttcgggaccaacaacattgctgttacatcggatgctcagcgggtcgctgtgaactgtgggtcgaagtgcactggcacttgggactggtcgggactgaaggttactggtggtaatgccggcaaggtgtacaactacaagaacatcaaggctggaacctactaa

SEQ ID NO: 66305 - protein, 363 aa, Thanatephorus cucumeris
MRFSLGFLATLPIALVAASPAGKRCTGTISSLNDVAAAQKCTTININAFTVPAGQTFAIAALDGTTVNMLGDVKFGVANWAGPLFSITGNKLVFNGNGHTLDGQGAKYWDGLGSASGVTKPHPMMKIKMSGTYSNVKVLNSPAHVYSVSNPAALVMSKLTIDNSAGDKPNSKSGTSAAGHNTDGFDVSTTDLTIEDSTIFNQDDCIAINQGSNIIFQRNTCTGGHGISIGSVSTGAGCQQHPDLEQTRWSTTTKALRIKTKSDATNASVTNVVFNGNTATGIKKFGVIVDQGYPTTLGTPGNNVAMSGISFGTNNIAVTSDAQRVAVNCGSKCTGTWDWSGLKVTGGNAGKVYNYKNIKAGTY

SEQ ID NO: 66306 - DNA, 1935 bp, Sclerotinia sclerotiorum
  CDS (648)..(1790)
tgctgctgtgtagtatcttttgctcgttcatcctctaataaacctcccccttgatatatgtgatatgatcacaaaagatttggtgacattaggtgtgataaatcatggtgtgctaggtagtgagtgggattgctttctcctggctaaagtttatgatattgattcaaggattgctagagtcaaaatgcgaaccgtgattgtagaaataaagcattaacatgatgaatattttggctcaccgcgggttaagttgttcaggttcaccgctgtcgacatgtgtgggacagaagccgacggtgcgaggatcagtttctactgctaaagtttatgctattgattcaagggtcgctatgatcgaaatgagaaccatggttctagaattgcagcttcaacacagcatcaattctttggctaattgctggtcaggttgcacgggtttaccgttgtcgacttgtggagagctgacggtgcgatttaatggtgtcccactttaaatcttccccaaatttgaatctcgtcttgacatatataagaagcttccaataccgttcttttctttcctcatctcatcatcacttagattcttttccatactgtctagtacattcactctttacattccttaaataacaactctactagccaatatggttgagattctttcctcggccttgagcctccttcggctgggcgcagctgtgtctgccgctccagcaccagcaccaactgctgcaccaaacgttgccgatgctcttgcagcagtcgagaagagggccggttcctgcaccttctccggatccagcggtgccgctgctgccatcaagtccaaggcttcctgcgcaaccatcgtcatcagcgccgtcgctgttccatccggaaccactctcgacttgactggcctcaaatctggtacccacgttgtcttcgagggtactaccaccttcggttacgaagagtggtacggtactctcgtctccgtctccggaactgacatcaccgttaccggtacctccggaagcgttctcgatggtaacggagccaagtactgggatggcaagggtaccaacggtggaaagaccaagccaaagttcttctacgctcactccttgaagggcaagtcctccatcaacaacgtcaagatcttgaactcgccagtccaaggcttctccatcaactctgcctctggtcttactctctctggtatcactatcgacaactctgccggtaactccctcggacacaacactgatgctttcgatgttggatcttccactgatatcaccatctccggcgccaacgttcaaaaccaagatgactgtctcgctatcaactccggtaccggcatcaccttcaccggtggaacctgctccggtggtcacggtctctccatcggatccgtcggtggacgttccgacaacgttgtctctgatgttatcattgaatcctccaccgtcaagaactccgccaacggtgtccgcatcaagactgtttccggtgccactggatccgtctccggcgttacctacaaggacatcaccctctccggtattaccagctacggtgttgtcatcgagcaagattacgagaacggttccccaactggaaagccaacctccggtgttcccatcactggtgtcactctctccaacgttcacggtaccgtctcttcctccgctaccaacgtttacgttctctgcgccaagtgctctggctggacctgggatgttaacgttactggtggtaagacctccaccaagtgcgctggtctcccatctggtgtcaagtgttaaatactttaacacggctactttcaagcactggattccactaggaaatcaattgtagagggggaatggggagaaaggggttcgagccgggctgcacccagttgtcaattctttgtacatatagcttctctggttcacacatagactg

SEQ ID NO: 66307 - protein, 380 aa, Sclerotinia sclerotiorum
MVEILSSALSLLRLGAAVSAAPAPAPTAAPNVADALAAVEKRAGSCTFSGSSGAAAAIKSKASCATIVISAVAVPSGTTLDLTGLKSGTHVVFEGTTTFGYEEWYGTLVSVSGTDITVTGTSGSVLDGNGAKYWDGKGTNGGKTKPKFFYAHSLKGKSSINNVKILNSPVQGFSINSASGLTLSGITIDNSAGNSLGHNTDAFDVGSSTDITISGANVQNQDDCLAINSGTGITFTGGTCSGGHGLSIGSVGGRSDNVVSDVIIESSTVKNSANGVRIKTVSGATGSVSGVTYKDITLSGITSYGVVIEQDYENGSPTGKPTSGVPITGVTLSNVHGTVSSSATNVYVLCAKCSGWTWDVNVTGGKTSTKCAGLPSGVKC

SEQ ID NO: 66308 - DNA, 1960 bp, Sclerotinia sclerotiorum
  CDS (675)..(1817)
aacgcactaggcgagctgccaaatgctgctgtgtagtatcttttgctcgtttcatcctctaataaaccttccccctttgatatatgtgatatgatcacaaaagatttggtgacattagggtgtgataaatcatggtgtgctaggtagtgagtgggattgctttctcctggctaaagtttatgatattgattcaaggattgctagagtcaaaatgcgaaccgtgattgtagaataaagcattaacatgatgaatattttggctcaccgcgggttaagttgttcaggttcaccgctgtcgacatgtgtggggacagaagccgacggtgcgaggatcagtttctactgctaaagtttatgctattgattcaagggtcgctatgatcgaaatgagaaccatggttctagaattgcagcttcaacacagcatcaattactttggctaattgctggtcaggttgcacgggtttaccgttgtcgacttgtggagagctgacggtgcgatttaacggtgtcccactttaaatcttccccaaatttcaatctcgtcttgacatatataagaagcttccaataccttcttttctttcctcgtctcatcatcacttacattcttttccatactgtctagtacattcactctttacattccttaaataacaactctactagccaatatggttcacattctttcctcggccttgagcctccttcggctgggcgcagctgtgtctgccgctccagcaccagcaccaactgctgcaccaaacgttgccgatgctcttgcagcagtcgagaagagggccggttcctgcaccttctccggatccagcggtgccgctgctgccatcaagtccaaggcttcctgcgcaaccatcgtcatcagcgccgtcgctgttccatccggaaccactctcgacttgactggcctcaaatctggtacccacgttgtcttcgagggtactaccaccttcggttacgaagagtggtacggtcctctcgtctccgtctccggaactgacatcaccgttaccggtgcctccggaagcattctcgatggtaacggaggcaagtactgggatgggaagggtaccaacggtggaaagaccaagccaaagttcttctacgctcactccttgaagggcaagtcctccatcaacaacgtcaagatcttgaactccccagaggaaggtttctccatcaactctgcctctggtcttactctctctggtatcactatcgacaactctggcggtaactccctcggacacaacactgatgctttcgatgttggatcttccactgatatcaccatctccggcgccaacgttcaaaaccaagatgactgtctcgctatcaactccggtaccggcatcaccttcaccggtggaacctgctccggtggtcacggtctctccatcggatccgtcggtggacgttccgacaacgttgtctctgatgttatcattgaatcctccaccgtcaagaactccgccaacggtgtccgcatcaagactgtttccggtgccactggatccgtctccggcgttacctacaaggacatcaccctctccggtattaccagctacggtgttgtcatcgagcaagattacgagaacggttccccaactggaaagccaacctccggtgttcccatcactgttgtcactctctccaacgttcacggtaccgtctcttcctccgctaccaacgtttacgttctctgcgccaagtgctctggctggacctgggatgttaacgttactggtggtaagacctccaccaagtgcgctggtctcccatctggtgtcaagtgttaaatactttaacacggctactttcaagcactggattccactaggaaatcaattgtagagggggaatggggagaaaggggttcgagccggctgcacccagttgtcaattctttgtacatatagcttctctggtcacacatagactg

SEQ ID NO: 66309 - protein, 380 aa, Sclerotinia sclerotiorum
MVHILSSALSLLRLGAAVSAAPAPAPTAAPNVADALAAVEKRAGSCTFSGSSGAAAAIKSKASCATIVISAVAVPSGTTLDLTGLKSGTHVVFEGTTTFGYEEWYGPLVSVSGTDITVTGASGSILDGNGGKYWDGKGTNGGKTKPKFFYAHSLKGKSSINNVKILNSPEEGFSINSASGLTLSGITIDNSGGNSLGHNTDAFDVGSSTDITISGANVQNQDDCLAINSGTGITFTGGTCSGGHGLSIGSVGGRSDNVVSDVIIESSTVKNSANGVRIKTVSGATGSVSGVTYKDITLSGITSYGVVIEQDYENGSPTGKPTSGVPITVVTLSNVHGTVSSSATNVYVLCAKCSGWTWDVNVTGGKTSTKCAGLPSGVKC

SEQ ID NO: 66310 - DNA, 1095 bp, Emericella nidulans
  CDS (1)..(1095)
atgcatttccttcaaaactcccttattgctgcggcaatgggcgctgcgctggtcgctgccgcccctgctgctgatcttgatgctcgaagctcgtgcaccttcacctctgcctctgcggccaagtctggcgcatccaagtgctccactgtcaccctcaagagcatccaagttcctgccggtgagacccttgacctgaccggtctcaaatcgggtgctactgttatctttgaaggcgagacaacctttggctacaaagaatggaaaggaccgctgatctccatgtccggtgacaaaatcacggttaagcaagcctctggcgcaaagatcaactgcgacggggcccgctggtgggacaccaagggcagcaacggcggcaagaccaagcccaagttcttcagcgcgcataagctgaacaactccaagattcaggggctgaagatctacaacacccctgtccagggattcagtatccagtccgaccacctgaccatttcggacgtgaccatcgacaactccgccggcaccagcaagggccacaacaccgatgcctttgacatcggctcctcgacgtacattaccatcgacggtgcgactgtctacaaccaggatgactgtattgccattaactccggcgagcacatcaccttcaccaacggatactgttccggcggccatggcttgtctattggctccgtcggcggccgcagcgacaacaccgtcaagagcgtcaccatctccaacagcaaggtcgtcgactcccaaaacggcgtccgcatcaagaccgtctacaaggctaccggctccgtcaccgatgtcaccttccaggacatcgaactctctggaatcaccaagtacggcctcattgttgagcaggactatgagaatggtagcccaacaggtacccctaccaacggtgtcgaggttgaagatatcaccttcaagaagattaccggctctgtggatagcagtgccacacgtgtcaatatcctctgcgggtcagggagctgcaaagactggacttggtctggggttgatattaccggcggaaagaagagctctaagtgcaagaatgttccgtctggtgcttcgtgctag

SEQ ID NO: 66311 - protein, 364 aa, Emericella nidulans
MHFLQNSLIAAAMGAALVAAAPAADLDARSSCTFTSASAAKSGASKCSTVTLKSIQVPAGETLDLTGLKSGATVIFEGETTFGYKEWKGPLISMSGDKITVKQASGAKINCDGARWWDTKGSNGGKTKPKFFSAHKLNNSKIQGLKIYNTPVQGFSIQSDHLTISDVTIDNSAGTSKGHNTDAFDIGSSTYITIDGATVYNQDDCIAINSGEHITFTNGYCSGGHGLSIGSVGGRSDNTVKSVTISNSKVVDSQNGVRIKTVYKATGSVTDVTFQDIELSGITKYGLIVEQDYENGSPTGTPTNGVEVEDITFKKITGSVDSSATRVNILCGSGSCKDWTWSGVDITGGKKSSKCKNVPSGASC

SEQ ID NO: 66312 - DNA, 1104 bp, Aspergillus oryzae
  CDS (1)..(1104)
atgcatttccaacttctcggcctcgccgccctcggctctctcgccgctgctgctcccgccccttctcgcacctctgaactggttgagagaggctcttcttgcactttcacctccgctgctcaggcctctgcgagcgccaagagctgctccaacatcgtcctcaagaacatcgctgtccctgctggagagactcttgacctgtccaaggccaaggacggtgccaccatcaccttcgagggcaccaccaccttcggctacaaggaatggaagggacccctgatccgtttcggtggtaacaaaatcaccgtcacccaggccgccggcgctgtcattgacggccagggctcccgctggtgggacggcaagggcaccaacggtggcaagaccaagcccaagttcatctacgcccacaagctccagtcctcgaccatcaagggtttgcacgttaagaactcccccgtccaggtcttcagcgtccagggtaacgacgtccacctgaccgacatcaccatcgacaactcggatggtgacaacaatggtggtcacaacaccgatgctttcgacgttagcgagagtaacggtgtctacatcaccggtgccaatgtcaagaaccaggatgactgcctggccatcaactctggtgagaacatcgaattcaccggcgctacctgctccggcggtcacggtatctccatcggttccatcggtaaccgcgacagcaacaccgtcaagaacgtcaaggttgccgactccaccgtcgtcgactccgacaacggtatccgtatcaagaccatctctggtgctaccggctctgtcagcggcgtgacctacgagaacatcaccctcaagaacatcaagaagaacggtatcgtcatcgagcaggactacaagaacggtggccccaccggcaagcccaccaccggtgtccccatcactgacctcactgtcaacggtgtcactggctccgttgccagcaaggccacccccgtctacatcctctgcggcaagggcagctgctctgactggacctggaagggtgtcagcatctccggtggcaagaagtctgataagtgccagaacattccttctggcgcttcttgctaa

SEQ ID NO: 66313 - protein, 367 aa, Aspergillus oryzae
MHFQLLGLAALGSLAAAAPAPSRTSELVERGSSCTFTSAAQASASAKSCSNIVLKNIAVPAGETLDLSKAKDGATITFEGTTTFGYKEWKGPLIRFGGNKITVTQAAGAVIDGQGSRWWDGKGTNGGKTKPKFIYAHKLQSSTIKGLHVKNSPVQVFSVQGNDVHLTDITIDNSDGDNNGGHNTDAFDVSESNGVYITGANVKNQDDCLAINSGENIEFTGATCSGGHGISIGSIGNRDSNTVKNVKVADSTVVDSDNGIRIKTISGATGSVSGVTYENITLKNIKKNGIVIEQDYKNGGPTGKPTTGVPITDLTVNGVTGSVASKATPVYILCGKGSCSDWTWKGVSISGGKKSDKCQNIPSGASC

SEQ ID NO: 66314 - DNA, 1599 bp, Brassica napus
  CDS (87)..(1388)
aaaaactgcaaagagtctcatattagttcttactctcaagaatcaaacacactctttctaaaaagattagcgtttcaaaccccgaaatggcccgttgttttggaagtctagctgttttcttatgcgttcttttgatgctcgcttgctgccaagctttgagtagcaacgtagatgatggatatggtcatgaagatggaagcttcgaatccgatagtttaatcaagctcaacaacgacgacgacgttcttaccttgaaaagctctgatagacccactaccgaatcatcaactgttagtgtttcgaacttcggagccaaaggagatggaaaaaccgatgatactcaggctttcaagaaagcatggaagaaggcatgttcaacaaatggagttactactttcttaattcctaaaggaaagacttatctccttaagtctattagattcagaggcccatgcaaatctttacgtagcttccagatcctaggcactttatcagcttctacaaaacgatcggattacagtaatgacaagaaccactggcttattttggaagacgttaataatctatcaatcgatggcggctcggcggggattgttgatggcaacggaaatatctggtggcaaaactcatgcaaaatcgacaaatctaagccatgcacaaaagcgccaacggctcttactctctacaacctaaagaatttgaatgtgaagaatctgagagtgagaaatgcacagcagattcagatttcgattgagaaatgcaacaatgttggcgttaagaatgttaagatcactgctcctggcgatagtcccaacacggatggtattcatatcgttgctactaaaaacattcgaatctccaattcagacattgggacaggtgatgattgtatatccattgaggatggatcgcaaaatgttcaaatcaatgatttaacttgcggccccggtcatgggatcagcattggaagcttgggggatgacaattccaaagcttatgtatcgggaattgatgtggatggtgctacgctctctgagactgacaatggagtaagaatcaagacttaccagggagggtcaggaactgctaagaacattaaattccaaaacattcgtatggataatgtcaagaatccgatcataatcgaccagaactactgcgacaaggacaaatgcgaacagcaagaatctgcggttcaagtgaacaatgtcgtgtatcagaacataaaaggtacgagcgcaacagatgtggcgataatgtttaattgcagtgtgaaatatccatgccaaggtattgtgcttgagaatgtgaacatcaaaggaggaaaagcttcttgcgaaaatgtcaatgttaaggataaaggcactgtttctcctaaatgcccttaattactaagctgattatgtaatatacataaatacgtagtatatgtaattatagatgcatgtatatcgttatctacgtattgattcttgatatatatagaaaactaaagatatatgggaatatacatacaatagttgagataattgttgtcttgtatatgattcactgaagttgattgcttgtccatgaataaatgaataatatcatttctct

SEQ ID NO: 66315 - protein, 433 aa, Brassica napus
MARCFGSLAVFLCVLLMLACCQALSSNVDDGYGHEDGSFESDSLIKLNNDDDVLTLKSSDRPTTESSTVSVSNFGAKGDGKTDDTQAFKKAWKKACSTNGVTTFLIPKGKTYLLKSIRFRGPCKSLRSFQILGTLSASTKRSDYSNDKNHWLILEDVNNLSIDGGSAGIVDGNGNIWWQNSCKIDKSKPCTKAPTALTLYNLKNLNVKNLRVRNAQQIQISIEKCNNVGVKNVKITAPGDSPNTDGIHIVATKNIRISNSDIGTGDDCISIEDGSQNVQINDLTCGPGHGISIGSLGDDNSKAYVSGIDVDGATLSETDNGVRIKTYQGGSGTAKNIKFQNIRMDNVKNPIIIDQNYCDKDKCEQQESAVQVNNVVYQNIKGTSATDVAIMFNCSVKYPCQGIVLENVNIKGGKASCENVNVKDKGTVSPKCP

SEQ ID NO: 66316 - DNA, 1657 bp, Brassica napus
  CDS (145)..(1446)
ggcatcacgagggtacccgtaaatcccaccatacaacaaagttctgtgaaagtctcccaaaaactgcaaagagtctcatattagttcttactctcagaaataaaacacactctttctgaaaagattagcgtttcaaaccccgaaatggcccgttgtcatggaagtcttgctattttcttatgcgttcttttgatgctcgcttgctgccaagctttgagtagcaacgtagatgatggatatggtcatgaagatggaagcttcgaaaccgatagtttaatcaagctcaacaacgacgacgacgttcttaccttgaaaagctccgatagacccactaccgaatcatcaactgttagtgtttcgaacttcggagcaaaaggtgatggaaaaaccgatgatactcaggctttcaagaaagcatggaagaaggcatgttcaacaaatggagtgactactttcttgattcctaaagggaagacttatctccttaagtctattagattcagaggcccatgcaaatcattacgtagcttccagatcctaggcactttatcagcttctacaaaacgatcggattacagtaatgacaagaaccactggcttattttggaggacgttaataatctatcaatcgatggcggctcggcggggattgttgatggcaacggaaaaatctggtggcaaaactcatgcaaaatcgacaaatctaagccatgcacaaaagcgccaacggctcttactctctacaacctaaacaatttgaatgtgaagaatctgagagtgagaaatgcacagcagattcagatttcgattgagaaatgcaacagtgttgatgttaagaatgttaagatcactgctcctggcgatagtcccaacacggatggtattcatatcgttgctactaaaaacattcgaatctccaattcagacattgggacaggtgatgattgcatatccattgaggatggatcgcaaaatgttcaaatcaatgatttaacttgcggccccggtcatggcatcagcattggaagcttgggggatgacaattccaaagcttatgtatcgggaattaatgtggatggtgctacgctctctgagactgacaatggagtaagaatcaagacttaccagggagggtcaggaactgctaagaacattaaattccaaaacattcgtatggataatgtcaagaatccgatcataatcgaccagaactactgcgacaaggacaaatgcgaacaacaagaatctgcggttcaagtgaacaatgtcgtgtatcggaacatacaaggtacgagcgcaacggatgtggcgataatgtttaattgcagtgtgaaatatccatgccaaggtattgtgcttgagaatgtgaacatcaaaggaggaaaagcttcttgcaaaaatgtcaatgttaaggataaaggcaccgtttctcctaaatgcccttaattactaagttgattatgtaatatacataaatacgtattatatgtggttatagatgccatctatatccttatctacgtattgattctcgatatatatagaaaactaaggatttatgggaatatacatacaatagttgagataattgttgtcttgtatatggttcactgaagttgattgcttgtccacgaataaatgaataatgtcatttgtc

SEQ ID NO: 66317 - protein, 433 aa, Brassica napus
MARCHGSLAIFLCVLLMLACCQALSSNVDDGYGHEDGSFETDSLIKLNNDDDVLTLKSSDRPTTESSTVSVSNFGAKGDGKTDDTQAFKKAWKKACSTNGVTTFLIPKGKTYLLKSIRFRGPCKSLRSFQILGTLSASTKRSDYSNDKNHWLILEDVNNLSIDGGSAGIVDGNGKIWWQNSCKIDKSKPCTKAPTALTLYNLNNLNVKNLRVRNAQQIQISIEKCNSVDVKNVKITAPGDSPNTDGIHIVATKNIRISNSDIGTGDDCISIEDGSQNVQINDLTCGPGHGISIGSLGDDNSKAYVSGINVDGATLSETDNGVRIKTYQGGSGTAKNIKFQNIRMDNVKNPIIIDQNYCDKDKCEQQESAVQVNNVVYRNIQGTSATDVAIMFNCSVKYPCQGIVLENVNIKGGKASCKNVNVKDKGTVSPKCP

SEQ ID NO: 66318 - DNA, 1149 bp, Botrytis cinerea
  CDS (1)..(1149)
atggttcaacttctctcaatggcctccggcctccttgcgctgagcgcaatcgtctctgctgctccagcaccagcaccaaccgcagctccaaacccagccgatgctcttgccgctatcgagcaacgtgctgccgcctgtaccttctcgggatctggtggtgctgccgccgcttccaagtccaagacttcctgcgccaccatcgtcctcagcgcactctccgtcccatccggtactacccttgacttgactggcctcaagtccggcacccatgtcgtcttcgagggtaccaccaccttcggctacgaagaatggtccggtcctctcttctccgtctccggaactgacattactgtcaccggtgcctccggcagcaagcttgatggccaaggagccaagtactgggatggaaagggaaccaacggtggaaagaccaagccaaagttcttttacgcccactccttgaagggtaaatcaacaatctctggtatcaacatcttgaactctccagttcaagtcttctccatcaacggtgcttccggtcttactctctccaacatccacattgacaactctgctggagatgctggtaaacttggccacaacaccgatgctttcgatgttggttcctccagcgatatcaccatctctggtgccaacgttcaaaaccaagatgactgtctcgctatcaactccggtactggtattaccttcaccggtggaacctgttccggtggtcacggtctctctatcggatctgtcggtggacgttccgacaacactgtctccgatatcatcattgaatcatctactgtcaagaactctgccaacggtgtccgtatcaagactgtctccggtgccactggatccgtctccggcgttacctacaaggacatcaccctctccggcattacatcctacggtgttgtcgttcaacaagattacaagaacggttccccaaccggaaagccaacctccggtgtccccatcactgatgtcactttctccaacgtcaagggtaccgtctcctccagtgctaccaacgtctacgttctttgcgccaagtgctctggctggtcttgggatgtcagtgttagcggtggtaagacctccagcaagtgtgctggtctcccatctggtgtcaagtgttaa

SEQ ID NO: 66319 - protein, 382 aa, Botrytis cinerea
MVQLLSMASGLLALSAIVSAAPAPAPTAAPNPADALAAIEQRAAACTFSGSGGAAAASKSKTSCATIVLSALSVPSGTTLDLTGLKSGTHVVFEGTTTFGYEEWSGPLFSVSGTDITVTGASGSKLDGQGAKYWDGKGTNGGKTKPKFFYAHSLKGKSTISGINILNSPVQVFSINGASGLTLSNIHIDNSAGDAGKLGHNTDAFDVGSSSDITISGANVQNQDDCLAINSGTGITFTGGTCSGGHGLSIGSVGGRSDNTVSDIIIESSTVKNSANGVRIKTVSGATGSVSGVTYKDITLSGITSYGVVVQQDYKNGSPTGKPTSGVPITDVTFSNVKGTVSSSATNVYVLCAKCSGWSWDVSVSGGKTSSKCAGLPSGVKC

SEQ ID NO: 66320 - DNA, 1140 bp, Ophiostoma ulmi
  CDS (1)..(1140)
atgctgggcatcactactctgctactgaccttggcggttgccgccaatgcttcccctgtggtagctcccgccaatactccgacgccctccccggtcctggctgagcgtgccactagctgcaccttttctggcgccaacggtgcgtccttggcgatccagtcccaggcggcctgtgctactattgtcttgaacaatgttgccgtgccgtcaggcaccactctggatctgtccaagctcgccgatggcgcgactgtcatctttgagggcgagaccacctggggctacaaggaatgggcgggacccctgctgcagatcaagggcaacggtatcaccgtccagggcgcgttgggtgccgtcctcaacgccaacggtgctcgctggtgggacggcaagggcagcaacagtggcaagaccaagcccaagttcttctatgcccatggcctgaccaactccaagattctcaacctcagcatcaggaacacacccatccaggctgtcagcataaacggctgcgatggcctcaccatcacagacatgaccatcgacagctcggccggtgacagcgctggcggccataacacggacggctttgacattggcaccagcaagaacattatcattgacggtgccaaggtctacaaccaggatgactgtgtggctgtcaactcaggaactaaaatcacctttcagaacggtctctgctcgggcggtcacggcctctccattggctctgtcggtggtcgctccgacaacacagtcgataccgtcaccttttacaacagccagatcaagaactccgtcaacggtatccgcgtcaagggcaccgtaggcaccaccggcaccattaagggtgtgacgtacaacaagatcacgctctctggcattactaactacggtgtcttgatcgagcagaactacaacggcggcgacctcaagggcacggcgacctccggtgttcctatcacgggcctcaccattaaggacatctcaggaaccaaggccatcgcgagctccggttacaatgtcgttatcacctgcggcagtggtgcttgctctggctggacttggagcggtgtttcggtgacgggtggcaagtcctacgacaagtgcaccaatgtgcctaacggaatttcctgctaa

SEQ ID NO: 66321 - protein, 379 aa, Ophiostoma ulmi
MLGITTLLLTLAVAANASPVVAPANTPTPSPVLAERATSCTFSGANGASLAIQSQAACATIVLNNVAVPSGTTLDLSKLADGATVIFEGETTWGYKEWAGPLLQIKGNGITVQGALGAVLNANGARWWDGKGSNSGKTKPKFFYAHGLTNSKILNLSIRNTPIQAVSINGCDGLTITDMTIDSSAGDSAGGHNTDGFDIGTSKNIIIDGAKVYNQDDCVAVNSGTKITFQNGLCSGGHGLSIGSVGGRSDNTVDTVTFYNSQIKNSVNGIRVKGTVGTTGTIKGVTYNKITLSGITNYGVLIEQNYNGGDLKGTATSGVPITGLTIKDISGTKAIASSGYNVVITCGSGACSGWTWSGVSVTGGKSYDKCTNVPNGISC

SEQ ID NO: 66322 - DNA, 1125 bp, Gibberella fujikuroi
  CDS (1)..(1125)
atggttcgaaacatcgctatcgcggccttgctcccagctgcctgggctctgccgtcaagctctctccaggaacgagatgcttgcaccgtgactgactactccggcctcgccaccgccgtctcatcctgcacaaacatcgtgctcgccggctttcaagtcccggcaggcaagcaacttgatctatccaagctcaaggctggcacaaccgtcactttcaagggcaagaccacttttgccaccactgctgacaacgactttgatcctatcgtcatcagtgggagtggtatcaccataactggtgcatctggtcatgtcattgacggcaacggtcaagcgtactgggacggcgaaggttccaacaacaaggacaaccccaagcctgaccacttcatcgttgtcaagaagaccaccggcaactcaaagatcacaaacctcaacatccagaactggcccgttcactgcttcgacatcaccggcagttcacaattaaccatctcagggctaattcttgacaacagagccggtgacaagccaaatgccaagagcggtagcttgcccgctgcgcataacagcgacggtttcgacatttcgtccagcgaccacgtcactctggataataaccatgtttataaccaggatgattgcgttgccgtcacttctggtaccaacatcgttgtttcaaacatgtattgctccggcggtcatggccttagtatcggatctgttggtggaaagagcgacaatgtcgtcgatggtgttcagttcttgaactcgcagattgtgaacagtgagaatggatgtcgcatcaagtccaactctggaacaactggcacgatcaacaacgttacctaccagaacattgctcttaccaacatcagcaaatacggtgtcgatgtccagcaagattatctcaacggcggtcctactggaaagcccaccaacggagtcaagatcagcaatatcaagttcaccaaggttactggaaccgtagccagctcagctcagaactggtatattctgtgcggtgatggtagctgctctggatttaccttttcaggaaacgctatcaccggcggcggcaagactagcagctgcaactatcctagcaacacttgccccagctag

SEQ ID NO: 66323 - protein, 374 aa, Gibberella fujikuroi
MVRNIAIAALLPAAWALPSSSLQERDACTVTDYSGLATAVSSCTNIVLAGFQVPAGKQLDLSKLKAGTTVTFKGKTTFATTADNDFDPIVISGSGITITGASGHVIDGNGQAYWDGEGSNNKDNPKPDHFIVVKKTTGNSKITNLNIQNWPVHCFDITGSSQLTISGLILDNRAGDKPNAKSGSLPAAHNSDGFDISSSDHVTLDNNHVYNQDDCVAVTSGTNIVVSNMYCSGGHGLSIGSVGGKSDNVVDGVQFLNSQIVNSENGCRIKSNSGTTGTINNVTYQNIALTNISKYGVDVQQDYLNGGPTGKPTNGVKISNIKFTKVTGTVASSAQNWYILCGDGSCSGFTFSGNAITGGGKTSSCNYPSNTCPS

SEQ ID NO: 66324 - DNA, 1089 bp, Kluyveromyces marxianus
  CDS (1)..(1089)
atgttattcagcaacaccttattgatcgcagcagctagtgcattattagctgaagcttctccattggaaaagagagacagttgtaccttgagtgggaagacagccggaggtggtttgtccaactgtgccacggtcactgtcaacaacgtcgaagtcccatctggtaagactttggacttgacaggcttgcaagacggtgcgacagttaatttcgtcgggcaggttacctttgattacgatgaatgggtgggtccattggtctccatctccggtaacaacatcaaggtggtaggtaaatctggccacttgttagatggtgatggtgcacgttggtgggacgggaagggtgacagtggtaaaaaggtgaagcctaagttcatgagcttgaaattgactggcaactcagatgtcggtgggttgcaaatcaagaataccccaattcaagctatctcagtgaactcttgtagtgacactgtaattcacgatgtcaccattgacaacagtgatggtgacaaggacagcttgggtcacaacactgacggtttcgatgttggtagcgttaacaacgtcaccattgagaactgtcatgtctacaaccaagatgactgtatcgccgtcaactccggtaccggtgtctacttcaagaacaactactgttctggtggtcatggtgcttccattggttcagtcggtcttcgctcaaacaatgtggttgacaccgtttacttcgagaacaaccaaattgtcaactctgacaacggtttgagaattaagaccattcaaaaggccactggttccgtcaacaacgtgcacttcttgtccaacactatctccggcatcagaaagttcggaattgttgttgaaactgattacagcaatggatccaccaccggtaccccaggtagcaaggtcccaatcaccaacttcgaagtcgatggtttgactggttcagttgactcttccgcttacagagtcaagatcttggttgctggtgcttctaagtggacttggaaggatgttgatatcactggtggttgttctttcggttcatgtactggtattccatctggtagcggagccttctgttaa

SEQ ID NO: 66325 - protein, 362 aa, Kluyveromyces marxianus
MLFSNTLLIAAASALLAEASPLEKRDSCTLSGKTAGGGLSNCATVTVNNVEVPSGKTLDLTGLQDGATVNFVGQVTFDYDEWVGPLVSISGNNIKVVGKSGHLLDGDGARWWDGKGDSGKKVKPKFMSLKLTGNSDVGGLQIKNTPIQAISVNSCSDTVIHDVTIDNSDGDKDSLGHNTDGFDVGSVNNVTIENCHVYNQDDCIAVNSGTGVYFKNNYCSGGHGASIGSVGLRSNNVVDTVYFENNQIVNSDNGLRIKTIQKATGSVNNVHFLSNTISGIRKFGIVVETDYSNGSTTGTPGSKVPITNFEVDGLTGSVDSSAYRVKILVAGASKWTWKDVDITGGCSFGSCTGIPSGSGAFC

SEQ ID NO: 66326 - DNA, 1436 bp, Turnera subulata
  CDS (1)..(1149)
atggtgttgggagtagaaatctcagccatatctctgttattactgttggcatccagcgccagtgcccaggatggtgtcttcgatatcaaaaaatataatcccaaggcagacatagctgaggccttatcagctgccttccaaaaggacgcatgtgcatcagcaactccaagcaaggttgtggttccagcaggagaatacactatgggaccggtggacatgaaaggtccctgcaaatctacagttgaggttcaagtagatgggaacttgaaggcaccagcggaacctaaaggggaacctggctgggttagcttcgaatacattgatggacttacattctctggtaaaggagtcttcgatggccaaggacatattgcttgggccaacaacaactgcaacaaaaatccaaactgcaaatcatttccccttaacttcagattcactagccttaaacatgcacttatcaaagatttgacttccaaagatagcaagaactttcatgttaatgtgataaattgcgagaacgtcactttccaaaactttgtgattgatgcaccggcagagagccttaacacagacggaatccacatgggaagatcaaaaggcattaagattatcgattccaagatcggcaccggggatgattgtatctccattggtgatggcaccgaacaggttacagtcacaggagtcacatgcggccctggccatggcatcagcattggaagcctaggaagatatgacaatgaacaaccagtcagaggagtcttagtcaagaattgtatcctaaagaacactgacaatggcgtgaggattaaatcttggcctgcaatgaaaggtggagaagcatctgacatccatttcgaggatatcaccatggagaatgtcaccaatccggtcatcatagatcaagaatactgcccatggaaccaatgcactaaggatgcaccatccaaagtcaagatcagtaacgttagcttcaagaatattaagggaaccaccaacactccggaggcagttaagataatttgcagcagtgcccttccatgcgagcaggtgcagcttaatgggattgacctcaaatatactggcactcagggccctgcaaaatcagaatgcaaaaacgccaagctgacagttactggacactgaaccctcctggctgttaaatttgggaattgaaaatcgcatttctacaagtaaattttgtagtccatggtcaggcatagcccattctgtagcatacgatggcgcctattgttggatccaatatgtgagatatatgtagcagataatgatattatgtgccatcatcatatacccgccccgttttgattctggtggcgtggtcatcatgatcgacacaaagaataagttttgtcaaataattcaagaaatatattttttggcctctttatatacaaaaaaaaaaaaaaaaa

SEQ ID NO: 66327 - protein, 382 aa, Turnera subulata
MVLGVEISAISLLLLLASSASAQDGVFDIKKYNPKADIAEALSAAFQKDACASATPSKVVVPAGEYTMGPVDMKGPCKSTVEVQVDGNLKAPAEPKGEPGWVSFEYIDGLTFSGKGVFDGQGHIAWANNNCNKNPNCKSFPLNFRFTSLKHALIKDLTSKDSKNFHVNVINCENVTFQNFVIDAPAESLNTDGIHMGRSKGIKIIDSKIGTGDDCISIGDGTEQVTVTGVTCGPGHGISIGSLGRYDNEQPVRGVLVKNCILKNTDNGVRIKSWPAMKGGEASDIHFEDITMENVTNPVIIDQEYCPWNQCTKDAPSKVKISNVSFKNIKGTTNTPEAVKIICSSALPCEQVQLNGIDLKYTGTQGPAKSECKNAKLTVTGH

SEQ ID NO: 66328 - DNA, 1218 bp, Oryza sativa
  CDS (1)..(1218)
atggcctccactgtgctcattgtctctgcatctctccttgcactcttcttcttcttgcatagtgctgatgcagatgttggcagtaatgtgttcagcatacagagctacggggctcatggagacggacgacatgatgacaccaaagcattgggagatacatgggctgcagcttgctcctctgcaaaacctgcagttttgctcatccccaagggcaagaaatacctgatcaagcacacaacactgtctggtccatgcaaatcaagcatctcattgatggtgaagggtagtttggtggcttctccagagaggtcagactggagcaaggagaccataaggcactggattctgatcagtggtgtcactggtcttactgtcactggtggtgggaccatagatggaaatggcaagatttggtggcaaaattcatgcaaaaccaactcaaagcttccatgcacagaagctccaacggcactgacattctactcctgcaagaatctgaaggtagagtatctgaaggtggtgaacagccagcaaatccagatttcagtggaggattgcaccgatgtgatggtgtctcgcctgtcgatcacagcaccagaaacagccccaaacactgatggaatccatatcacacgcagcagagatgttgaggtgacagactgcatgatcaagaccggggatgactgcatgtcaatcgaggacggaaccgagaacctgcatgtcaagaacatggtgtgtggaccgggacacggcatcagcatcggtagcttgggtgatcataattctgaagctcatgtcaacaatgtcaccgtcgacaatgtcaggttgtatggcacagccaacggagctcgcatcaagacatggcagggaggaaagggttcagcgaagaacatcgtgttccagaacatggtcatggacaatgtctggaaccccatcatcatcgaccaaaactactgcgactcttctacaccctgcaagcaacagaaatctgcagtggaggtgagcaatgtgctgttcaagaacatcaggggcacaagtgcatcagaggaggccatcatgctgcattgcagcagcagtgtaccttgccatggcataaccttggagaatgtcaatctcactgtcaagggaggtagcagtaatgccaagagcacctgccagaacgcagaatggaagaaatccgggagtgtcagtccacagccatgtggtttcaggaactga

SEQ ID NO: 66329 - protein, 405 aa, Oryza sativa
MASTVLIVSASLLALFFFLHSADADVGSNVFSIQSYGAHGDGRHDDTKALGDTWAAACSSAKPAVLLIPKGKKYLIKHTTLSGPCKSSISLMVKGSLVASPERSDWSKETIRHWILISGVTGLTVTGGGTIDGNGKIWWQNSCKTNSKLPCTEAPTALTFYSCKNLKVEYLKVVNSQQIQISVEDCTDVMVSRLSITAPETAPNTDGIHITRSRDVEVTDCMIKTGDDCMSIEDGTENLHVKNMVCGPGHGISIGSLGDHNSEAHVNNVTVDNVRLYGTANGARIKTWQGGKGSAKNIVFQNMVMDNVWNPIIIDQNYCDSSTPCKQQKSAVEVSNVLFKNIRGTSASEEAIMLHCSSSVPCHGITLENVNLTVKGGSSNAKSTCQNAEWKKSGSVSPQPCGFRN

SEQ ID NO: 66330 - DNA, 1269 bp, Oryza sativa
  CDS (1)..(1269)
atggcttgcaatgtgctcattttctctgcatatgtcgtcgtcatgtcgttcttcttgtgtagtgttcatgccaaggtcaacatgaatgcatcattccatttaactagtggagatgatagtctcagaggcaggtctcttgagtcaaagaaggtggtgttcgatgtgcgcaaacatggcgcttacggagatggacaacatgatgacacgaaggcattggcaaaggcatgggctgcagcttgctcctcttcgcaaccttccattgttctcatcccaaagggcaagagatacctcaccaagcacattacactatctggtccatgcaaatcaagcatcacgttcatgatagagggtacgttggtggctcctccaaagaggtcagattggagcaaggaaactattaggcactggattatgttcaatggtgtgagtggccttactgtcgctggtggtgggactgtcgatgaaaacggcaagatttggtggcaaaattcctgcaaaacgaatgcaaaacttccatgcactgaagctccaacggccttgacattctactcctgttcaaatctgaaagtggagaacttgaagctactaaacagccaacaaatccacatgtcagttgaggattgcactgatgttaggatctctagcctgacaatcacagcaccaggcactagcccaaacaccgacggcatccatatcacaagaagtaaaaatgtacaagtgacaggctgcataatcaagaccggggatgactgcatgtcgattgaggatggaactgagaacttacatgtcaagaacatggtgtgtggaccgggacacggcatcagcatcgggagcttaggcgatcacaactctgaagctcatgtcaacaatgtcaccgtcgacaccgtcaggctatatggcacaaccaacggagctcgcatcaagacatggcagggcggttggggctacgcgaagaacatcgtgttccagaacatgatcatggaaaatgtttggaacccaatcattatcgaccagaactactgtgattctgctacaccctgcaaggaacagacatctgcggtgcaagttagcaatgtggtcttcaagaacatcaggggcacaagtgcttccaaggaggctatcaaactggactgtagcagaaatgtaccttgtcaaggaataaccttgaaggacgtcaagctcactatcaagggaggtggtagtgatgccaagagcacttgcggaaacgcaaaatggaagaaatcagggatagccctgtgctttcagtaa

SEQ ID NO: 66331 - protein, 422 aa, Oryza sativa
MACNVLIFSAYVVVMSFFLCSVHAKVNMNASFHLTSGDDSLRGRSLESKKVVFDVRKHGAYGDGQHDDTKALAKAWAAACSSSQPSIVLIPKGKRYLTKHITLSGPCKSSITFMIEGTLVAPPKRSDWSKETIRHWIMFNGVSGLTVAGGGTVDENGKIWWQNSCKTNAKLPCTEAPTALTFYSCSNLKVENLKLLNSQQIHMSVEDCTDVRISSLTITAPGTSPNTDGIHITRSKNVQVTGCIIKTGDDCMSIEDGTENLHVKNMVCGPGHGISIGSLGDHNSEAHVNNVTVDTVRLYGTTNGARIKTWQGGWGYAKNIVFQNMIMENVWNPIIIDQNYCDSATPCKEQTSAVQVSNVVFKNIRGTSASKEAIKLDCSRNVPCQGITLKDVKLTIKGGGSDAKSTCGNAKWKKSGIALCFQ

SEQ ID NO: 66332 - DNA, 1340 bp, Sclerotinia sclerotiorum
  CDS (1)..(1143)
atggttgagattctttcctcggccttgagcctccttgcgctgggcgcagctgtgtctgccgctccagcaccagcaccaactgctgcaccaaacgttgccgatgctcttgcagcagtcgagaagagggccggttcctgcaccttctccggatccagcggtgccgctgctgccatcaagtccaaggcttcctgcgcaaccatcgtcatcagcgccgtcgccgttccatccggaaccaccctcgacttgactggcctcaaatctggtacccacgttgtcttcgagggtactaccaccttcggttacgaagagtggtccggtcctctcgtctccgtctccggaactgacatcactgttaccggtgcctccggaagcgttctcgatggtaacggagccaagtactgggatggcaagggtaccaacggtggaaagaccaagccaaagttcttctacgctcactccttgaagggcaagtcctccatcaacaacgtcaagatcttgaactccccagtccaagttttctccatcaactctgcctctggtcttactctctctggtatcactatcgacaactctgccggtaactccctcggacacaacactgatgctttcgatgttggatcttccactgatatcaccatctccggcgccaacgttcaaaaccaagatgactgtctcgctatcaactccggtaccggcatcaccttcaccggtggaacctgctccggtggtcacggtctctccatcggatccgtcggtggacgttccgacaacgttgtctctgatgttatcattgaatcctccaccatcaagaactccgccaacggtgtccgcatcaagactgtttccggtgccactggatccgtctccggcgttacctacaaggacatcaccctctccggtattaccaagtacggtgttgtcatcgagcaagattacgagaacggttccccaactggaaagccaacctccggtgttcccatcactggtgtcactctctccaacgttcacggtaccgtctcttcctccgctaccaacgtttacgttctctgcgccaagtgctctggctggacctgggatgttaacgttactggtggtaagacctccaccaagtgcgctggtctcccatctggtgtcaagtgttaaatactttaacacggctactttcaagcactggattccactaggaaatcaattgtagagggggaatggggagaaaggggttcgagccggctgcacccagttgtcaattctttgtacatatagcttctcttgtcacacatagactgtttaaacacttgtaatcgaattgatttgattaccaccaaaaaaaaaaaaaaaaa

SEQ ID NO: 66333 - protein, 380 aa, Sclerotinia sclerotiorum
MVEILSSALSLLALGAAVSAAPAPAPTAAPNVADALAAVEKRAGSCTFSGSSGAAAAIKSKASCATIVISAVAVPSGTTLDLTGLKSGTHVVFEGTTTFGYEEWSGPLVSVSGTDITVTGASGSVLDGNGAKYWDGKGTNGGKTKPKFFYAHSLKGKSSINNVKILNSPVQVFSINSASGLTLSGITIDNSAGNSLGHNTDAFDVGSSTDITISGANVQNQDDCLAINSGTGITFTGGTCSGGHGLSIGSVGGRSDNVVSDVIIESSTIKNSANGVRIKTVSGATGSVSGVTYKDITLSGITKYGVVIEQDYENGSPTGKPTSGVPITGVTLSNVHGTVSSSATNVYVLCAKCSGWTWDVNVTGGKTSTKCAGLPSGVKC

SEQ ID NO: 66334 - DNA, 1364 bp, Arabidopsis thaliana
  CDS (50)..(1351)
  misc_feature (618)..(618): n is a, g, c or t
cgacagcattccttttccagcaacaaagaaaaaacacatttccttgccaatggcccgttgtaccaaccttgttaccgttttcctattatgggctcttttgatgctctcatggtgtaaagcttcaagaatcagccctaatgtatatgaccattcttataaaaggttcaaatccgatagcttaatcaagcgaagagaggacatcacgggattgagaagttttgtaagagcctctttgcggactccaaccaccgttagtgtttctgattttggagctaaaggagatggaaaaaccgatgacacgcaggcgttcgtgaatgcgtggaagaaagcatgttcttcaaatggagctgttaatctcctagttcctaaagggaatacttatctccttaagtctattcaattaactggtccatgcaattctattctcaccgttcagatattcggtacgttatccgcatctcaaaaacgatcggattacaaagatatcagcaaatggataatgtttgatggcgttaacaatctatcagtcgatggaggcgacactggggttgtggacggaaacggcgaaacgtggtggcaaaactcatgcaaacggaacaaagctaagccatgcacaanagccccaacggctcttactttttacaactcgaaaagtctgatagtgaagaatctgaaggtgagaaatgcacagcagatccagatttcgattgaaaaatgctccaacgttcaggtctctaatgtcgtggtaactgcgcctgcggatagtcctaacaccgatggtattcatatcactaacacccaaaacattcgagtctccgaatccatcattggaacaggcgatgattgcatatctattgaaagtggatcacaaaatgttcaaatcaatgatataacttgcggtcccggtcacggtatcagtattgggagccttggagatgacaattcaaaggcttttgtctcaggcgtgactgtggatggtgctaagctttccggtacagacaatggagtaagaatcaaaacttaccagggagggtcaggaactgctagcaatattatatttcaaaacattcagatggataatgttaagaatccgatcataatcgaccaagacgactgcgacaagggcaaatgcactacagagaaatccgcggtccaagtgaagaacgtggtgtaccgggacataagtggcactagcgcatcggaaaacgcaataacgtttaactgcagcaagaactatccatgccaaggaattgtgcttgacagagtgaacattaaaggaggaaaagcaacttgcaccaatgctaatgtggttgataaaggagctgttctgcctcagtgcaactccacttagttacttagatcgc

SEQ ID NO: 66335 - protein, 433 aa, Arabidopsis thaliana
  misc_feature (190)..(190): The Xaa at location 190 stands for Arg, Ile, Lys, or Thr.
MARCTNLVTVFLLWALLMLSWCKASRISPNVYDHSYKRFKSDSLIKRREDITGLRSFVRASLRTPTTVSVSDFGAKGDGKTDDTQAFVNAWKKACSSNGAVNLLVPKGNTYLLKSIQLTGPCNSILTVQIFGTLSASQKRSDYKDISKWIMFDGVNNLSVDGGDTGVVDGNGETWWQNSCKRNKAKPCTXAPTALTFYNSKSLIVKNLKVRNAQQIQISIEKCSNVQVSNVVVTAPADSPNTDGIHITNTQNIRVSESIIGTGDDCISIESGSQNVQINDITCGPGHGISIGSLGDDNSKAFVSGVTVDGAKLSGTDNGVRIKTYQGGSGTASNIIFQNIQMDNVKNPIIIDQDDCDKGKCTTEKSAVQVKNVVYRDISGTSASENAITFNCSKNYPCQGIVLDRVNIKGGKATCTNANVVDKGAVLPQCNST

SEQ ID NO: 66336 - DNA, 1086 bp, Kluyveromyces wickerhamii
  CDS (1)..(1086)
atgttgttcaataaaaaccttatcatcctttcttctgcaattttaacttccgcctctcctttggagaaaagagattcctgtactttgactggtagcaccacaggcgggtccggggtgaatggctgttcagcagttattgtcaaagatgttagcgttccagcaggtaaaactttggacttaacaggtctaaagagcggagcaaccgtcactttcgaaggtaccacctcttttggctatcaagagtgggaaggtcctttgatttcaattgctggttccggcattactgtaactggtgcaagtgggaatttaatcgatggtgacggtgctcgttggtgggatggtaaaggcgataatggcaagacaaagccgaaattactgaaactaaagttaaccggtgattcagtagtttctggattgaagattaagaactcccctagacaggttgtttctgtgaatcagtgcagtgacttgacaatccatgacattacgatcgacaataccgatggtgatggcagcggcaaaggccacaatactgatggtttcgatgtgggtagcagtgacactgtcacaatcaagaactgtaaggtttacaatcaagatgattgtatcgcagttaattctggtaaaaacatatatttccagaataattactgttcaggtggccatgggatttccatcggatcagtaggagatcgttccgataatgtggttgactctgtttggttcgaaaacaaccaagttgtggactcagataacggtttgagaatcaaaactgttcaagatgcaaccggtaaagtgaacaacgttcatttcttggataacgaaatctctaacattgcaaaatacggtattgttgtggaatccgattataaggacggctctactactggcaccccaggtagcggtgttccaatcacgaaccttgaaatcaatggtgttacaggttcggtggcatcctctgccaagagagtcaagattcttgttgccggagcttcttcgtggaagtggtcgaatatcaagttcaccggaggccagtcttacagctcctgcgagggtattccatccggtagcggtgcttcatgctaa

SEQ ID NO: 66337 - protein, 361 aa, Kluyveromyces wickerhamii
MLFNKNLIILSSAILTSASPLEKRDSCTLTGSTTGGSGVNGCSAVIVKDVSVPAGKTLDLTGLKSGATVTFEGTTSFGYQEWEGPLISIAGSGITVTGASGNLIDGDGARWWDGKGDNGKTKPKLLKLKLTGDSVVSGLKIKNSPRQVVSVNQCSDLTIHDITIDNTDGDGSGKGHNTDGFDVGSSDTVTIKNCKVYNQDDCIAVNSGKNIYFQNNYCSGGHGISIGSVGDRSDNVVDSVWFENNQVVDSDNGLRIKTVQDATGKVNNVHFLDNEISNIAKYGIVVESDYKDGSTTGTPGSGVPITNLEINGVTGSVASSAKRVKILVAGASSWKWSNIKFTGGQSYSSCEGIPSGSGASC

SEQ ID NO: 66338 - DNA, 1600 bp, Geotrichum candidum
  CDS (322)..(1431)
tgctcaaagttgcattccgtgataattaaaccataaacatcctaagctttcttttttgttttgcttggtgactgcaaaatgcaggaacttgtcacacattttgtaatgaaatcagcaacagcctgtgcaacgaccaaggtaaccataaacaacatcgctaaggcatcaccatattgattagaacctggtgtataaaagctgaggaatcgccaggaagttctgttcattttcgttcttgtcatcaacaattttttctcttcacttcatcagtctgttgaacagattaaaccctttttttttctcctccaaagtatcaaaactatgctgttctctaaatctattctgctttctatggcagcggctctggcagtcgctgcgcccactgagactgaggttaatctttatgctcgtgattcttgcgttttcacttctgctgataaggccattgctgacaagaagtcgtgctctaccattactctcaagaacattgctgtccctgctggtaagacccttgatctttccaaccttaacaagggcaccactgttatctttgacggtaccaccacctttggctacaaggagtggactggtccccttattaaggtttctggtgacactatcactgtcaagcagacctcaggtgctaagattgactgcgctggttcccgttggtgggacagcaagggaggtaacggcggtaagaagaagcccaagttctttgctgctcatggcctcaagaactccaagattgagggtctcaaggtctacaacactcctgttcaggcctttagcatttctggctctgaacagttggccctcaacaacattctccttgataacaaggccggtgactcccagggaggtcataacactgacgcctttgacgtcggtggaagttccgatatcactattgatggtgctattgtctacaaccaggatgactgtattgctgtcaactctggtaaccgtatcaagttccttaacggttactgctctggtggtcacggtctttccattggctccgtcggtggccgtagcaacaacattgttgacgatgtcctgatcaagaactcccaggttgtcaactctgataacggtgtccgtattaagactgtttatggtgctactggtaaggtcaacaacgttcgctttgaagatattactcttgacaagattgtcaagaagggccttattgttcagcaggattacgagaacggcagtcccaccggcaaccctaccaacggagtctctgtcaccaacattactttcaagaatgtcaagggtaacgttcttgctaagggtattaactactacctcctctgtggtaagggctcctgcagcaactggacttggtctaatgttaagattattggtggtaagaccagtgatggttgcaagaactacccttccaacgctacttgcaagaactagttttaagaacttttaataagtaataatatatctaatagatttcaaaaaaaaaatttacttttattgtaactatagtgtatatttacattttttttttaaaaaagaaaaaaaagaaaaataatttagtcttaatggctattaccttcgacaaactcctcaattaccacag

SEQ ID NO: 66339 - protein, 369 aa, Geotrichum candidum
MLFSKSILLSMAAALAVAAPTETEVNLYARDSCVFTSADKAIADKKSCSTITLKNIAVPAGKTLDLSNLNKGTTVIFDGTTTFGYKEWTGPLIKVSGDTITVKQTSGAKIDCAGSRWWDSKGGNGGKKKPKFFAAHGLKNSKIEGLKVYNTPVQAFSISGSEQLALNNILLDNKAGDSQGGHNTDAFDVGGSSDITIDGAIVYNQDDCIAVNSGNRIKFLNGYCSGGHGLSIGSVGGRSNNIVDDVLIKNSQVVNSDNGVRIKTVYGATGKVNNVRFEDITLDKIVKKGLIVQQDYENGSPTGNPTNGVSVTNITFKNVKGNVLAKGINYYLLCGKGSCSNWTWSNVKIIGGKTSDGCKNYPSNATCKN

SEQ ID NO: 66340 - DNA, 1140 bp, Alternaria citri
  CDS (1)..(1140)
atggttgccttaactcttggtatcttcttcacgtcgctggcggcgtctgctgttgcagctccagcccctgccatcactcctgcacccaagcccgaggtcgtgaagcgtgcctccagctgcactttttcaggctccaacggagctgctgaggcttccaagtcacagtcatcatgtgctaccatggttctttccgacgttgccgtcccttcaggcacaactttggacctctctagtctggctgacggtactactgtcatcttcgagggtaccaccacctggggctactcggaatggaagggtccccttcttgacatccaaggaaagaagatcactgtcaagggcgccgagggatctgttctcaacggtgatggtgctcgttggtgggacggtaagggtggaaatggcggaaagaccaagcccaagttcttctccgctcacaaactgaccgactccaccatcaccggcattaccatcaagaaccctcccgtccaagtcgttagtatcaacggctgcgatggtcttaccattacagacatgactattgatgcgtccgacggcgacaaggacgagcagggccacaacacagatggtttcgatattggctccagcaacaacgtcatcattgatggcgctaaggtttacaaccaggatgattgcgtagctgtcaactcaggtaccgaaatcaccttcaagaacggcctctgctccggtggacacggtctatccattggctcggttggtggtcgtgacgataacactgtcgacactgtcaccttctccaattccgaggtcaccaagtctgtcaacggtgtccgcgtcaaggctaaggttggcacaaccggcaagattaacaaagtcacctacgacgatattactctgtctgagatttccaagtacggcgttcttattgagcagaactactatggcggtgaccttcacggtgacgcggacactggtgtccccatcaccgccttgacacttgacaacgtcactggtggtgtttccagcagtggctacgacgtcgttgtcacctgtggcaaaggctcttgcacaggctggacctggaccggtgtcgacgttactggtggtaagacctatgacaagtgctccaacgtgcccagcgttaccaagtgttcgtaa

SEQ ID NO: 66341 - protein, 379 aa, Alternaria citri
MVALTLGIFFTSLAASAVAAPAPAITPAPKPEVVKRASSCTFSGSNGAAEASKSQSSCATMVLSDVAVPSGTTLDLSSLADGTTVIFEGTTTWGYSEWKGPLLDIQGKKITVKGAEGSVLNGDGARWWDGKGGNGGKTKPKFFSAHKLTDSTITGITIKNPPVQVVSINGCDGLTITDMTIDASDGDKDEQGHNTDGFDIGSSNNVIIDGAKVYNQDDCVAVNSGTEITFKNGLCSGGHGLSIGSVGGRDDNTVDTVTFSNSEVTKSVNGVRVKAKVGTTGKINKVTYDDITLSEISKYGVLIEQNYYGGDLHGDADTGVPITALTLDNVTGGVSSSGYDVVVTCGKGSCTGWTWTGVDVTGGKTYDKCSNVPSVTKCS

SEQ ID NO: 66342 - DNA, 1765 bp, Brassica napus
  CDS (73)..(1377)
gttttcaacataatcccaaaaaacgacacgcgttccttttccaaaaattcacttctctacgtaccaaccacaatggctcattgttgcacagttcttaccggtttactagtatggtctctttttatgctctcatggtgtgaagcttcaagaaacaacattaatagatatgatcattcttatggaacgttcaaatccaatagcttaatcaagcgaagagacgatataactcgtctgaaaagtgttgcaagagcctctttgcggcttccaaccaccgttagtgtttctgattttggagctaaaggagatggaaaaaccgacgacacgcaggcgttcgtgaatgcatggaagaaagcttgttcttcaagtggagctgtaaatctcttagttcctgaaggaaaaacttattttctcaagtctcttcgattaaatggcccatgcaaatcagttcttaccgttcagattttaggaacgttatcggcttctcaacaacgatcggattatgaagatctcagcaaatggattacgtttgacggcgttaacagtctaacggttgatggcggagccaccggaactgtcaacggaaacggggcggaaacgtggtgggaaaactcatgcaaacggaacgaagctaagaaatgcacaaaagcccctacggctcttactttctacaactcgaagaatttaagagtgaataatctgagggtgaaagatgcgcaacagattcagatttcgattgagaaatgctccaacgttcaggtctcaaatgttgaggtcactgcacctgctgatagtcctaacactgatggtatccacatcactaacactcaaaacattcaagtctccaattccatcattggaacaggtgatgattgtatatctattgaaagtggatcacaaaacgttcaaatcaacgatttaacttgcggcccaggccacggtatcagcattgggagcttaggagatgacaattcaaaggcatttgtatcaggcgtgactgtggatggtgctaaactttccggtacagacaatggagttaggatcaaaactaaccagggaggttctggaactgctagcaacattatatttcagaacattcagatggagaatgtcgagaatccaatcataattgaccaagattattgcgacaagagcaaatgcactgaacaaaaatcagcggtccaaataaagaacgtggtgtaccggaacataagcggcacaagcgcatcggacatagcaataactttcaactgcagcaagaactatccatgccaaggaattgtactcgacaaagtgaacattaagggagggaaagccagttgcagcaatgctaatgtgatggataaagacggtgttttacctcagtgcaaatccacttgattaataagacctataaaaaaaactcacatagatgtataaaaatacatatataccgatacaaagtatacaaaattatgatatacacttgtggatatatacatggacaatgaatttaaacatattgtctatatgtcaaaaatagtttatgaatatacatatagacaacatggtccagagatttattgttttaatgtatatatatactactaaactacttgtctaaaatttcatgaataaaggattacgtttttaagtggttatgtatcatgatgttggttacagtatgatgtgtattgtagattttcaattaaaatatgaaaaagatgacatggctggtcaatgatgttacttgaccaactaattcaagctaaaaaaaaaaaaaaaaaaa

SEQ ID NO: 66343 - protein, 434 aa, Brassica napus
MAHCCTVLTGLLVWSLFMLSWCEASRNNINRYDHSYGTFKSNSLIKRRDDITRLKSVARASLRLPTTVSVSDFGAKGDGKTDDTQAFVNAWKKACSSSGAVNLLVPEGKTYFLKSLRLNGPCKSVLTVQILGTLSASQQRSDYEDLSKWITFDGVNSLTVDGGATGTVNGNGAETWWENSCKRNEAKKCTKAPTALTFYNSKNLRVNNLRVKDAQQIQISIEKCSNVQVSNVEVTAPADSPNTDGIHITNTQNIQVSNSIIGTGDDCISIESGSQNVQINDLTCGPGHGISIGSLGDDNSKAFVSGVTVDGAKLSGTDNGVRIKTNQGGSGTASNIIFQNIQMENVENPIIIDQDYCDKSKCTEQKSAVQIKNVVYRNISGTSASDIAITFNCSKNYPCQGIVLDKVNIKGGKASCSNANVMDKDGVLPQCKST

SEQ ID NO: 66344 - DNA, 1098 bp, Sitophilus oryzae
  CDS (1)..(1098)
atgaacgcactgctttacaacatcatatttcttgtttctttggcattagccaaaccttcaaacaactccttaggggccacttgtacagtaagttcatacgacgatgtggcatctgcgatttcaagttgcaccaccatcaacctgggctcttttacagtgccggccggtacaactttagctttaaaattaaaaaccggcaccactgtcaatatccaaggtactatcaaattcggataccaagaatggaaaggacctttggttcaagtgtcgggaaaacaagttacaattaatggtgctagtggaaaatttgatggagaaggtgctaactactgggacagtcaaggtgacaaaggaaaaacaaggccaaagtttatcaaaatatctactacatcaagttctactttcaatgatattactctgaaaaattgtcctcatcaatgcgtctctattagcagcgcttcagatactactttatcaggttggaacattgacgtatcagcaggagatagcgcaggtggacacaacactgacggcttcgatatctccggctcgaccggcatcaccattaaaaactccgttcccaagaaccaagacgattgcgtggctattaaccaaggttcaaacttggttttcgaaagcttaacatgcagcggtggacacgggctcagtctctcagtaggacaaagtactgagaatggggatgcaaacacagttaaaaacgtcgtttttagcgattgtaccgtaaagagttctcgaaatggcatccacataaagacgcacaaagatgccggtaccggtgcaatcagtgatgtgacttacgaaaacattaaactttctggaattaccaattatggcattaacgttcaagagatttatgcaaatggtggcgatagtgttgatccgttaggtaatatacctactacaaatttgaatctccaatcggtgacaggctccatgtctggaggatctagcagcatgtcggtatacattttatgcggcgatggaggatgcagtaattgggcatggtccggtgtttctatttccggcgcgaaaaaagcaaacagctgtaactttacgccctgtggattcacttgttaa

SEQ ID NO: 66345 - protein, 365 aa, Sitophilus oryzae
MNALLYNIIFLVSLALAKPSNNSLGATCTVSSYDDVASAISSCTTINLGSFTVPAGTTLALKLKTGTTVNIQGTIKFGYQEWKGPLVQVSGKQVTINGASGKFDGEGANYWDSQGDKGKTRPKFIKISTTSSSTFNDITLKNCPHQCVSISSASDTTLSGWNIDVSAGDSAGGHNTDGFDISGSTGITIKNSVPKNQDDCVAINQGSNLVFESLTCSGGHGLSLSVGQSTENGDANTVKNVVFSDCTVKSSRNGIHIKTHKDAGTGAISDVTYENIKLSGITNYGINVQEIYANGGDSVDPLGNIPTTNLNLQSVTGSMSGGSSSMSVYILCGDGGCSNWAWSGVSISGAKKANSCNFTPCGFTC

SEQ ID NO: 66346 - DNA, 1125 bp, Gibberella circinata
  CDS (1)..(1125)
atggttcggaacattgctctcgcggctttgctcccagctgcctgggctctgccttcaagctctctccaggaacgagatgcttgcaccgtgactgactactctggcctcgccaccgctgtctcatcctgcacaaacatcgtgctcaaaggtttccaagtcccgactggcaagcaacttgatcttttcaagctcaaggctggtacaaccgttaccttcaagggcacaactacctttgccaccactgccgataacgactttaaccccattgtcattagtggaagtggcatcaccatcactggtgcatctggccatgtcatcgatggcaatggccaagcatattgggatggccaaggttccaacaacgcagacaacccaaagcccgatcacttcatcgttgttaagaaggttaccggtacctcaaagattacaaacctcaacatccagaactggcccgttcactgcttcgacatcaccggcagttcagatctgaccatctcggggctcattctcgataacagagcaggcgacaagcccaattccaagagcggtggtttgcccgctgcgcataacagcgacggtttcgacatctcgtcctgtgaccacgtcacgctggataacaaccacgtttataaccaggatgactgtgttgccgtcacctctggcacaaacatcgtcgtttctaacatgtactgctccggtggtcatggtctcagcatcggttctgtcggcggaaagagcaccaatgtcgtgaatggtgtccagttcttgaactcacaaattgtgaacagtgagaatggatgccgcatcaagtccaactctggcacaactggcacgatcaacaacgttacctaccaaaacattgctcttaccaacatcagcaagtacggtgttgatgtccagcaggactacctcaacggcggccctactggaaagcccaccaacggcgtcaagattagcaacatcaaattcaccaaggtcactggcacggtggctagctcagctcagaattggtatattctgtgtggtgatggtagctgctctggatttactttctctggcaacgccattactggtggtggtaagactagcagctgcaactatcctaccaacacctgtccctcttaa

SEQ ID NO: 66347 - protein, 374 aa, Gibberella circinata
MVRNIALAALLPAAWALPSSSLQERDACTVTDYSGLATAVSSCTNIVLKGFQVPTGKQLDLFKLKAGTTVTFKGTTTFATTADNDFNPIVISGSGITITGASGHVIDGNGQAYWDGQGSNNADNPKPDHFIVVKKVTGTSKITNLNIQNWPVHCFDITGSSDLTISGLILDNRAGDKPNSKSGGLPAAHNSDGFDISSCDHVTLDNNHVYNQDDCVAVTSGTNIVVSNMYCSGGHGLSIGSVGGKSTNVVNGVQFLNSQIVNSENGCRIKSNSGTTGTINNVTYQNIALTNISKYGVDVQQDYLNGGPTGKPTNGVKISNIKFTKVTGTVASSAQNWYILCGDGSCSGFTFSGNAITGGGKTSSCNYPTNTCPS

SEQ ID NO: 66348 - DNA, 1113 bp, Aspergillus awamori
  CDS (1)..(1113)
atgccttctgccaagcctttgttctgcctcgcgaccctggccggtgccgctctggctgctcctgcgccttcccgcgccaccgacttcaacaagcggtccacctgcaccttcactgatgctgccaccgcctccgagagcaagacctcctgctccgacatcgtcctcaaggacatcaccgtccctgccggtgagacccttaacttgaaggacctcaacgatggcaccaccgtcacctttgagggaaccaccacctgggagtacgaggagtgggacggacccctcctccgtatctccggtaaggacatcaccgttacccagtcctccgacgccgtcctcaacggcaacggtgctaagtggtgggacggtgagggaaccaacggcggcaagaccaagcccaagttcttctacgcccatgacctcgatgactccaagatctccggtctctacatcaagaacacccctgtccaggccatctccgtcgagtcggacaacctcgtgatcgaggacgtcaccatcgacaacagcgacggtgattccgagggcggccacaacaccgacggtttcgacatcagcgagagtacctacatcaccatcaccggcgccaccgtcaagaaccagggtgactgcgtcgccatcaactccggcgagaacatctacttctccggcggtacctgctccggcggtcacggtctgtccatcggctccgttggtggccgcgacgacaacaccgtcaagaacgtcaccttcatcgactcgactgtctctgactccgagaacggtgttcgcatcaagaccgtttatgatgctaccggtaccgtcgaggacatcacctactccaacatccagctctccggcatctccgactacggtattgtcatcgagcaggactacgagaacggtgaccctaccggtaccccctccaacggtgttaccatctccgatgttaccctcgaggatatcactggctcggttgactccgacgctgttgagatctacatcctttgcggtgacggcagctgcactgactggaccatgtccggcattgacatcaccggcggtgagaccagcagcgattgcgagaatgttccctctggcgcttcctgcagtcagtaa

SEQ ID NO: 66349 - protein, 370 aa, Aspergillus awamori
MPSAKPLFCLATLAGAALAAPAPSRATDFNKRSTCTFTDAATASESKTSCSDIVLKDITVPAGETLNLKDLNDGTTVTFEGTTTWEYEEWDGPLLRISGKDITVTQSSDAVLNGNGAKWWDGEGTNGGKTKPKFFYAHDLDDSKISGLYIKNTPVQAISVESDNLVIEDVTIDNSDGDSEGGHNTDGFDISESTYITITGATVKNQGDCVAINSGENIYFSGGTCSGGHGLSIGSVGGRDDNTVKNVTFIDSTVSDSENGVRIKTVYDATGTVEDITYSNIQLSGISDYGIVIEQDYENGDPTGTPSNGVTISDVTLEDITGSVDSDAVEIYILCGDGSCTDWTMSGIDITGGETSSDCENVPSGASCSQ

SEQ ID NO: 66350 - DNA, 1089 bp, Aspergillus awamori
  CDS (1)..(1089)
atgcactcctttgcttctcttcttcgctacggcctagctgccggcgcaaccctcgcttccgcctctcccattgaagcccgggacagctgcaccttcaccacggctgctgctgccaaagcgggcaaggcgaaatgctctaccatcaccctcgacagcatcaaagtgcccgctggaaccaccctcgacctgaccggtctcaccagcggtaccaaggtcatcttcgagggcactacgaccttcgactatgaagattgggcaggccctttgatctccatgagtggcaaagacatcaccgtcactggtgcctcaggccacctcatcaactgcgacggttcgcggtggtgggacggtaaggggaccagcggaaagaagaagcccaagttcttctacgcccatggccttgactcctcgtccattactggattgaatatcaagaacactccccttatggcgtttagtgttgagtcggatgacatcaccctgactgacattaccatcaacaatgcggacggtgatagcctgggtggacacaacactgatgcgtttgatgttggtaactcggtcggtgtaaatatcatcaaaccatgggttcataaccaggatgactgtcttgcgatcaattctggcgagaacatctggttcaccggcggcacctgcattggcggccacggtctctccatcggctctgtcggcgaccgctccaacaacgtcgtcaagaatgtcacgattgagcactccaccgtgagcaattccgagaacgccgttcggatcaagactatctccggtgccactggctccgtgtctgagatcacctactccaacattgtcatgtccggcatctccgattacggcgtcgttatccagcaggattacgaggatggtaagcctacgggtaagcccacgaacggtgtcactattacggatgtcaaactggagagcgttactggtactgtggatagtaaggccactgatatctatcttctttgcggatctggtagctgctcggactggacttgggacgatgtgaaggtcactgggggaaagaagtctagcgcttgcaagaacttaccttcggtggcttcttgctag

SEQ ID NO: 66351 - protein, 362 aa, Aspergillus awamori
MHSFASLLRYGLAAGATLASASPIEARDSCTFTTAAAAKAGKAKCSTITLDSIKVPAGTTLDLTGLTSGTKVIFEGTTTFDYEDWAGPLISMSGKDITVTGASGHLINCDGSRWWDGKGTSGKKKPKFFYAHGLDSSSITGLNIKNTPLMAFSVESDDITLTDITINNADGDSLGGHNTDAFDVGNSVGVNIIKPWVHNQDDCLAINSGENIWFTGGTCIGGHGLSIGSVGDRSNNVVKNVTIEHSTVSNSENAVRIKTISGATGSVSEITYSNIVMSGISDYGVVIQQDYEDGKPTGKPTNGVTITDVKLESVTGTVDSKATDIYLLCGSGSCSDWTWDDVKVTGGKKSSACKNLPSVASC

SEQ ID NO: 66352 - DNA, 1089 bp, Aspergillus niger
  CDS (1)..(1089)
atgcatttcctccagaacgccgttgtggccgccactatgggcgctgcgctggccgccgctgctcctctcgagaagcgctcctgcactttcacctccgcctctgctgccaagtccggcaagtcctcttgctccaccatcaccctcgacaacatcgcggtccccgctggtgagactcttgacttgactggcctcaagaagggtaccaccgtcatcttcgagggtgagaccaccttcggctacaaggaatggaagggtcccctgatctccatgtccggtaccgacatcaccgtcaagcaggcctccggtgccaagatcaactgcgacggtgctcgctggtgggacggcaagggtagcaacggtggcaagaccaagcccaagttcttccaggcccacaagctcgaccagtccagcatcaccggcctgaaggtctacaacacccctgtccagggtttcagcattctggccgaccacctgaccatcaccgatgtgaccatcgacaactccgccggtaccagcaagggtcacaacaccgatgcctttgacattggccagagtacctacatcaccattgacggtgccaccgtctacaaccaggatgactgcctggccatcaactcgggtgagcacatcaccttcaccaacggctactgtgatggtggccacggtctctccatcggttccatcggtggccgcagtgacaacaccgtcaacgacgtgaccatctccaactccaaggtgctcaactcccagaacggtgtccgcatcaagaccatctacggcaagactggcactgtcgagaacgtcaagtttgaggacatcaccctgtccgacatcagcaagtacggtattgtcgttgagcaggactacgagaacggcagccccaccggcacgcccaccaacggtgtcaaggttgaggacatcactttcaagaaggtcaccggcagcgtcaagagctctggtactgacatctacatcctgtgcggttccggcagctgctcgaactggacctggagcggtgttgatgtgactggcggcaagaagagcagcaagtgcaagaacgtcccctcgggcgcttcctgcagcgattaa

SEQ ID NO: 66353 - protein, 362 aa, Aspergillus niger
MHFLQNAVVAATMGAALAAAAPLEKRSCTFTSASAAKSGKSSCSTITLDNIAVPAGETLDLTGLKKGTTVIFEGETTFGYKEWKGPLISMSGTDITVKQASGAKINCDGARWWDGKGSNGGKTKPKFFQAHKLDQSSITGLKVYNTPVQGFSILADHLTITDVTIDNSAGTSKGHNTDAFDIGQSTYITIDGATVYNQDDCLAINSGEHITFTNGYCDGGHGLSIGSIGGRSDNTVNDVTISNSKVLNSQNGVRIKTIYGKTGTVENVKFEDITLSDISKYGIVVEQDYENGSPTGTPTNGVKVEDITFKKVTGSVKSSGTDIYILCGSGSCSNWTWSGVDVTGGKKSSKCKNVPSGASCSD

SEQ ID NO: 66354 - DNA, 1155 bp, Leptosphaeria maculans
  CDS (1)..(1155)
atggttgccttaactcttggttttgtcgccacggcgctggtggcgtcttctgttgcagctcccgccccggagattgacggagcacacaatgctccagtcacagctaaacgtgctgatagctgtacgttcactggggctaatggtgctgctgaagcctctaaggctagcaaatcatgcaccaccatggtcctcgacaaccttgccgtaccagccggtaccactctagacctttccagtttggctgatggcacgactgtcatcttccaaggtacaactacttggggctacaaagagtgggccggcccccttcttagcatcggtggcaacaagatcacagtcaaaggggcttctggcagtcttctgaatcccgatggagcacgttggtgggatggaaaaggtggcaatggaggcaaagacaagccaaagttctttgccgcacacagtctcactgactccaccattaccgacgtgaacatcaagaacacccctgttcaagccgtcagcattgcaagttgcgatggcctcaccatcaccggcatgacgattgacgattccgagggcgatgccaacgaactcgggcacaacactgacgcgttcgacattgggaccagcaagaacatcatgattgatggtgcaaaggtgcacaaccaggacgactgcgtggccgtaaactctggaacaaacatcaccttccaaaacggcctctgctctggcggccacggcctctccattggctccgtcggcggccgcgcagacaacacagtcgacactgtcaccttcaacaacaacgtcgtcacaaaatccacaaacggaatccgcgtcaaagccaaagttggtgcaacgggcaaaatcaacaacgtcgtctacagcaagaccacgctgtcctccatctcaaagtacggcgtgctggttgagcagaactacgatggcggcgatctccatggcacgccggataccggtattccgatcacgggcctggtgctgagcgatgttaagggtgagggtgcggttgcggccaacgggtttaatgtcgtggttacgtgtgggagtgagacatcttgcactggctggaaatgggacaatgttgtgattactggtggcagtaaggtgtacgggaactgtacgaatgttccgtctgttaccaagtgctcctaa

SEQ ID NO: 66355 - protein, 384 aa, Leptosphaeria maculans
MVALTLGFVATALVASSVAAPAPEIDGAHNAPVTAKRADSCTFTGANGAAEASKASKSCTTMVLDNLAVPAGTTLDLSSLADGTTVIFQGTTTWGYKEWAGPLLSIGGNKITVKGASGSLLNPDGARWWDGKGGNGGKDKPKFFAAHSLTDSTITDVNIKNTPVQAVSIASCDGLTITGMTIDDSEGDANELGHNTDAFDIGTSKNIMIDGAKVHNQDDCVAVNSGTNITFQNGLCSGGHGLSIGSVGGRADNTVDTVTFNNNVVTKSTNGIRVKAKVGATGKINNVVYSKTTLSSISKYGVLVEQNYDGGDLHGTPDTGIPITGLVLSDVKGEGAVAANGFNVVVTCGSETSCTGWKWDNVVITGGSKVYGNCTNVPSVTKCS

SEQ ID NO: 66356 - DNA, 1089 bp, Chondrostereum purpureum
  CDS (1)..(1089)
atgccttcgttatcctcgatccttaagggccttggcgacgtcaccctttttgcctctgtggctactgtaacggccgtgccgaagcgagcatcctgcaccgttgcctcagttagcgatgctgcaaatatttcgggatgtacctctgtgaccataaaatcgtttaccgtaccttcgggccaaactcttgttctaaacccctcagacggtaccaccgtagctatggttggcgatgtcacatttgcaaagacgacatcgtctggtcctctgtttaccattgatggctcgaacatcaaatttaaaggcgcaggacataagttcgacggaaatggcgcaaagtattgggatgggcaggggactaacggtggcgttaccaaaccccatcctttcctcaaattcaaaggatcaggtcaatactcgagtttcactgtcctaaacagccctgcgcaggcaatatctatcggaaatagtgacggcctaacctttgacactgtcactgtggacaatagtgccggagatagtggtagtctcgggcacaacactgatggcttcgatgtatctgcggacaatgttaccatccagaatagtgttgtcaaaaaccaagatgactgcattgccatcaacgatggctctaatattgttttccaaaacaatcagtgctctggagggcacggtatttctgttggttctatcgcctcaggaaagcacgtatcgggtgtagcaatcaaaggaaacacggtcacaaacagcatgtatggcatgcgtgtcaaggtcaaggctgctgcaacctctgcttcagtctctgctgtgacttacagtggcaacaccatttctgcgattgccaagtatggcttcctcgtctcgcagtcttacccagatgatgcttcaactcccggaactggcgcccccatctcggggatcaacttcagtggtgatactaccaatatcaaagtaaacagtggagcgaaacgggtcactgtcgactgtcgtagttgcaccggcacgtggaactggtctaagctgaccgctacagggggaagtgccggcactatctccagtgacaaagctaagatttctggcggctcatactag

SEQ ID NO: 66357 - protein, 362 aa, Chondrostereum purpureum
MPSLSSILKGLGDVTLFASVATVTAVPKRASCTVASVSDAANISGCTSVTIKSFTVPSGQTLVLNPSDGTTVAMVGDVTFAKTTSSGPLFTIDGSNIKFKGAGHKFDGNGAKYWDGQGTNGGVTKPHPFLKFKGSGQYSSFTVLNSPAQAISIGNSDGLTFDTVTVDNSAGDSGSLGHNTDGFDVSADNVTIQNSVVKNQDDCIAINDGSNIVFQNNQCSGGHGISVGSIASGKHVSGVAIKGNTVTNSMYGMRVKVKAAATSASVSAVTYSGNTISAIAKYGFLVSQSYPDDASTPGTGAPISGINFSGDTTNIKVNSGAKRVTVDCRSCTGTWNWSKLTATGGSAGTISSDKAKISGGSY

SEQ ID NO: 66358 - DNA, 1427 bp, Penicillium griseoroseum
  CDS (135)..(1244)
gaatagcttgttcaaactcattcattcattcattcattcattcattcattcctcatttcctattacactcaggtcggctagtccggaacatctacactctctttaattgtctgttgatcggacacctacttaaaatgcgtacttctttcgttaccatgctggccctcggcgccgccgctgtgtccggtgccccggcttccgcccccgttaccgatctcgttgagcgcggctcctccagctgtaccttcacctcggccgctgccgccaaggctggcaagtcctcctgctccaccattgtgctggacaacatcaaggtccccgccggcgagaccctcgacctttccaagctgaagagcggcactaaggtcatcttcaagggcgaaaccactttgggatacaaggagtggaccggtcccctcatccggttctctggagataacattaacgtctccggtgcatccggccatgtcgtcaacggtggcggccccagctggtgggacggaaagggaaccaacggcggaaagaagaagcccaagttcttctacgcccacggcttggacaactcgaacatctccggccttaacgtcaagaacacccccgtccagggtttcagtgtccaggccgaccacctggtcctcgaccacatcaccatcgacaacagcgagggtgactccaagggtggccaccacaccgatgccttcgatgttggctccagtacctacatcaccatcagcaacgccaacatcaagaaccaggacgactgcctggctatcaactctggcgagcacatcaccttcaccggtggcacctgctccggtggccacggtatctccatcggttccgttggtgtgcgcgacaacaacatcgtgaaggatgtcaccatctctgactccagtgtcgtcaactccgacaacggtgtccgcgtcaagaccatctacaaggctaccggtgccgtctccgacgtcactttctccaacatcaagctgtccaacatcgccaagtacggtatcgtcatcgagcaggattaccagaacggcagccctaccggcaagcccaccaccggtgtccccattactggcctcaaggttgagaaggttaccggtaccgttaagagcagcggtactgacgtctacattctctgcggtaacggtagctgcaagaactggacctggactggaaactccgtcactggtggtaagaagagcagcaagtgctctggtgtgccttccggcgcttcttgctagattgccagcgatcaaatggtgatcaataaacagcatgacaccagcagggcagagactgggttatcttcaagaaaagatttgactggatgacctaaggaatagccaggtgaaatagatgctagtcgcattgttattttcaacataattgtacttatatatagccgtctatagatggatttaaaa

SEQ ID NO: 66359 - protein, 369 aa, Penicillium griseoroseum
MRTSFVTMLALGAAAVSGAPASAPVTDLVERGSSSCTFTSAAAAKAGKSSCSTIVLDNIKVPAGETLDLSKLKSGTKVIFKGETTLGYKEWTGPLIRFSGDNINVSGASGHVVNGGGPSWWDGKGTNGGKKKPKFFYAHGLDNSNISGLNVKNTPVQGFSVQADHLVLDHITIDNSEGDSKGGHHTDAFDVGSSTYITISNANIKNQDDCLAINSGEHITFTGGTCSGGHGISIGSVGVRDNNIVKDVTISDSSVVNSDNGVRVKTIYKATGAVSDVTFSNIKLSNIAKYGIVIEQDYQNGSPTGKPTTGVPITGLKVEKVTGTVKSSGTDVYILCGNGSCKNWTWTGNSVTGGKKSSKCSGVPSGASC

SEQ ID NO: 66360 - DNA, 1305 bp, Penicillium griseoroseum
  CDS (133)..(1263)
tccagttcgtttcaggatgaaccgtagaggtatataagactcccctcgtctgctctttgcttgaaaatcataaacaaaccatcacactcttttaaaaccccacattcatttctatttcatattttctttatcatggcctccagtctcaaacttggcttgattgccctactcggtgcgactgctgtcaacgcagctcccgccgctgagcccgttcttggaacctctctccttacttctcgtgcttcttgtaccttctccggctccagcggtgctgcggaagccatcaagagcaagacctcttgctcaaccattaccctgagcaacgtcgaagtcccggccggaactactctggacctgacaggactcaagtccggtaccaccgtcatcttcgaaggaaccaccaccttcggttacaaggaatgggaaggtcctctggtctccgtctccggaacctccatcaccgtccagggtgcctcaggcgcgcagctcaacggtgatggtgcccgctggtgggacggcaagggaaccaacggcggcaagaccaagcccaagttcttctacgctcacagcttgaccaactccaagatcgagaacatctacatcaagaactcccccgtgcaggtcttcagcatcaacggcgccaaggagctgactcttagcggaatcaccgtcgacaccgctgacggcgatagcaacggcggccacaacaccgacgctttcgacgtcggctccagcaacggtgtctacatcaccagccctatcgtccacaaccaggatgactgcctggctgtcaactccggcactaacgtccacttcactggcgctcagtgcactggcggccacggtatctccatcggctccgtcggtggacgctccgacaacaccgttgacggtgtcaccgtcgagagctgcaccatcaaggactccgacaacggcgtccgcatcaagaccgtctacggcgccaccggtgcagtccaaggcgtcacctacaaggacatcactctctccggaattgccaagtacggtatcgtcatcgagcaggattacgagaacggtagccctaccggaacccccaccagcggtgtccccattaccgacttgaccctcgacaacgtccacggaactgtcgccagcagtggtgtcgatacctacatcctgtgtgcttctggtgcttgctccgactggtcttggagcggcgttagcatcaccggtggtcagactagcaagaagtgcaagggtattcccagcggtgctagctgctaaattctgcgaattttgagtcggactgtgtaggcctttttaact

SEQ ID NO: 66361 - protein, 376 aa, Penicillium griseoroseum
MASSLKLGLIALLGATAVNAAPAAEPVLGTSLLTSRASCTFSGSSGAAEAIKSKTSCSTITLSNVEVPAGTTLDLTGLKSGTTVIFEGTTTFGYKEWEGPLVSVSGTSITVQGASGAQLNGDGARWWDGKGTNGGKTKPKFFYAHSLTNSKIENIYIKNSPVQVFSINGAKELTLSGITVDTADGDSNGGHNTDAFDVGSSNGVYITSPIVHNQDDCLAVNSGTNVHFTGAQCTGGHGISIGSVGGRSDNTVDGVTVESCTIKDSDNGVRIKTVYGATGAVQGVTYKDITLSGIAKYGIVIEQDYENGSPTGTPTSGVPITDLTLDNVHGTVASSGVDTYILCASGACSDWSWSGVSITGGQTSKKCKGIPSGASC

SEQ ID NO: 66362 - DNA, 1143 bp, Botrytis cinerea
  CDS (1)..(1143)
atggttaagttttctgcctgtctcctcttgggagggctttccgctttggcttcggctcttcccgccgcagcacctgctccaacggctgctccagatcttgataagcgagcaactacctgcactttctccggctcaggaggagcttcatcagcaagcaagtccaagacttcttgttcaaccatcattctatctgcacttgcagtcccatctggcacgaccttggatttgacaggtcttactaaaggaactacagtcatctttgaaggtatcaccaccttcggctatgaagaatggtctggtcctttggtctctgtttcgggaacagatatcactgttactcaaaccactggtgcttacctcgatggcggcggagcttcttactgggatggagaaggttccaacggaggaaagacgaagcccaaattcttttacgcacacagcttaatctcctcaactattgagaacctttacttctacaacccacccgtccaagtgatgagtatcaacagcgctaccgatttgacagtttccggagttaccatcaatgcacaggatggtgacactgacagtcttggtgctaacacggatggttttgatattggatccagcacgaccgtcaccatcaccggtgctaatgtatacaatcaagatgactgcgtggctatcaactccggaactggcattactttctcaggaggtgtttgttccggtggccatggtctctcagttggatctgtcggcggtagagatgataacattgttgagactgtcttgttcgaaaactccgagatcaaagcatcgcaaaatggtatccgtatcaagaccatctctggtgatacaggaaccgtctctggcatcacttactcaggcattaccctttccggtatcaccgactacggtatcacagtcaatcaagcttatgatggaacgtccggtgagccaaccaatggcgttgccatctccaaattcattctcgaaaatattactggaaccgttgaatctaccgccaccaacattcttattgagtgtggaagtggttcttgcaccgattggacatggaccgatgtttccgtgacaggcggcaagacgtcatcctcttgtcttaacgtcccaacaagcggcggtgtctcttgttccttgtag

SEQ ID NO: 66363 - protein, 380 aa, Botrytis cinerea
MVKFSACLLLGGLSALASALPAAAPAPTAAPDLDKRATTCTFSGSGGASSASKSKTSCSTIILSALAVPSGTTLDLTGLTKGTTVIFEGITTFGYEEWSGPLVSVSGTDITVTQTTGAYLDGGGASYWDGEGSNGGKTKPKFFYAHSLISSTIENLYFYNPPVQVMSINSATDLTVSGVTINAQDGDTDSLGANTDGFDIGSSTTVTITGANVYNQDDCVAINSGTGITFSGGVCSGGHGLSVGSVGGRDDNIVETVLFENSEIKASQNGIRIKTISGDTGTVSGITYSGITLSGITDYGITVNQAYDGTSGEPTNGVAISKFILENITGTVESTATNILIECGSGSCTDWTWTDVSVTGGKTSSSCLNVPTSGGVSCSL

SEQ ID NO: 66364 - DNA, 1300 bp, Arabidopsis thaliana
  CDS (1)..(1269)
atggctaacgcaagaagtttggtcgccaaggcaaacaatattaacgtaggttcattgattctaatggccttggtgtttggttcttgcgtggctaatggtgaatatctcggcggccgccgtggtctcgctgctaattccggtaaccccacggtctatgatattactaagtttggagccgtaggagatggttccaccaatacttttaaggcgtttttgaacacatggatacaagtgtgtgacagtccagtaccagcaacgctactagttcctaagggaacatttttggctggtccagtcattttcgccggtccatgcaagagcaaagtgaccgtcaatgttataggcacaatcatcgctacgaccagcgggtacgcaactcccgagtggttcttgttcgagcgtgttgacaatctcgtcctcaccggaaccggcacattccacgggaaaggtgaagctgtctggaaagcagatggttgtggtaaaaaggtccaatgcaatcttcctccaacgtctctcaaattcaggaacatgaaaaatgttgaaatcaatggcataagctcggtgaacgcaaaggccttccacatgttcttagtcaaaactgagaatgttaacatccaaaacattaagcttaccgcaccagctgaaagccccaacaccgatggtatccatttgagcaatgcagacaacgttagcatcctcgacagtaccatagcgactggagacgattgtgtttcagtcggtcgtggctccaacaacgtaaccgtcgaacgtgtgatttgtggtccaggacacggtctaagtgtcggtagtcttggtaagtacaagaacgaggaagacgttagcggaatccacgttaacaactgcacgatgattgagaccgacaatggtcttaggatcaagacatggggtgggtcagacccaagcaaggctgtggacattaagtttgaaaacatcatcatgcagagtgtcaagaacccaatcatcattgatcaaaactacggttcaagaggcggagattcacaagttgctataagtgatattttgttcaagaacattagaggaacaacaattacaaaagatgttgttcagattatgtgtagcaaatcggtgccgtgccaaggagtaaacgttgttgacgtgaacttggactatgtaggcaagacaggaggagagaagaagtcgtcatcaggcggtttggtcggagctctttgcgataacgccaatgttatcttcggtggaaaacttagtttccctatgtgtcccaaataagctttttggtataaataatttaatattaaaa

SEQ ID NO: 66365 - protein, 422 aa, Arabidopsis thaliana
MANARSLVAKANNINVGSLILMALVFGSCVANGEYLGGRRGLAANSGNPTVYDITKFGAVGDGSTNTFKAFLNTWIQVCDSPVPATLLVPKGTFLAGPVIFAGPCKSKVTVNVIGTIIATTSGYATPEWFLFERVDNLVLTGTGTFHGKGEAVWKADGCGKKVQCNLPPTSLKFRNMKNVEINGISSVNAKAFHMFLVKTENVNIQNIKLTAPAESPNTDGIHLSNADNVSILDSTIATGDDCVSVGRGSNNVTVERVICGPGHGLSVGSLGKYKNEEDVSGIHVNNCTMIETDNGLRIKTWGGSDPSKAVDIKFENIIMQSVKNPIIIDQNYGSRGGDSQVAISDILFKNIRGTTITKDVVQIMCSKSVPCQGVNVVDVNLDYVGKTGGEKKSSSGGLVGALCDNANVIFGGKLSFPMCPK

SEQ ID NO: 66366 - DNA, 1137 bp, Aspergillus aculeatus
  CDS (1)..(1137)
atgcaccttaacaccaccctactcgtctcgctcgccctcggggccgcgagcgtcctcgccagcccagccccaccagcaatcacggccccgcccacggccgaggagatcgcgaagcgcgcgacgacctgcacgttctccggatcgaacggcgcctcgtcggccagcaagtccaagacctcgtgctcgaccattgtgttgtcgaatgtggccgttccgtcggggacgacgctggacctgaccaagctgaacgacgggactcatgtgatcttctcaggcgaaaccaccttcggctacaaggaatggagcggccccctgatctccgtctccgggagcgacctgaccatcaccggggcgagcgggcacagcatcaacggggacggcagccggtggtgggacggcgagggcgggaacgggggcaagacgaagcccaagttcttcgcggcgcacagcctgaccaactcggtgattagcgggctgaagatcgtcaactcgccggtgcaggttttcagcgttgcggggtcggattatctgaccctcaaggatatcacgatcgacaactcggacggcgacgacaatggcgggcataataccgatgcgtttgatatcggcacgagcacgtatgtcacgatctcgggcgccacggtgtataatcaggatgattgcgtggctgtgaattcgggggagaatatctacttctcgggcggctactgctccggtggacacggcttgtccattggttcggtgggcggacgcagtgataatacggttaagaacgtgacgtttgtggattcgacgatcattaactcagataatggcgtccgcatcaaaaccaacatcgacaccaccggctccgtgtccgacgtcacctacaaggacatcacgctcacctccatcgccaagtacgggatcgtggtgcagcagaactacggcgacacgtcatcgacgcccacgacgggggtgccgatcacggactttgtgctggacaacgtgcacggctcggtggtcagctcggggaccaacatcctcatctcgtgcgggtcgggcagttgttcggattggacgtggacggatgtgagtgtcagtggggggaagacgagttccaagtgtacgaatgtgccgagtggggctagttgttga

SEQ ID NO: 66367 - protein, 378 aa, Aspergillus aculeatus
MHLNTTLLVSLALGAASVLASPAPPAITAPPTAEEIAKRATTCTFSGSNGASSASKSKTSCSTIVLSNVAVPSGTTLDLTKLNDGTHVIFSGETTFGYKEWSGPLISVSGSDLTITGASGHSINGDGSRWWDGEGGNGGKTKPKFFAAHSLTNSVISGLKIVNSPVQVFSVAGSDYLTLKDITIDNSDGDDNGGHNTDAFDIGTSTYVTISGATVYNQDDCVAVNSGENIYFSGGYCSGGHGLSIGSVGGRSDNTVKNVTFVDSTIINSDNGVRIKTNIDTTGSVSDVTYKDITLTSIAKYGIVVQQNYGDTSSTPTTGVPITDFVLDNVHGSVVSSGTNILISCGSGSCSDWTWTDVSVSGGKTSSKCTNVPSGASC

SEQ ID NO: 66368 - DNA, 1092 bp, Colletotrichum lindemuthianum
  CDS (1)..(1092)
atggtctcttacctcttcgtgctcggcgccctggcttctgttgccatcgcctcccccgtccccgagctcaaggcccgcgccagctgcaccttcaccgatgctgcctctgccatcaagggcaaggccagctgcaccaccatcgtcctcaacaatattgcggtccctgccggcaccaccctcgacatgaccggcctcaagtctggcactcacgtaagtttctctggcaaaaccaccttcggctacaaggagtgggagggccccctcatctccttctccggctccaacgtcgtcatcgacggcgcctccggccactccatcgactgccagggctcccgctggtgggactccaagggcggcaacggcggcaagaccaagcccaagttcttctacgcccacagcctcaaggactcgaccatcaggggcctccacacgctcaacacccccgtccaggccttctccatcaacggcgccgccaacctcggcgtctacgacgtctccgtcgacaactcggccggcgactccgccggcggccacaacaccgacgccttcgacgtcggctcctccaccggcgtctacatctctggcgccgacgtcaagaaccaggacgactgcctcgccgtcaactcgggcaccaatattaccttcaccggcggcacctgctccggcggccacggtctttccatcggctccgttggcggccgcaaggataatgtcgtcaagagcgtcagcatcaccaactccaagattatcaactcggataacggcgtgcgtatcaagaccgtggccggcgctactggtcccgtttccgacatcacctactcgggcatcaccctctccaacatcgccaagtacggcatcgtcatcgaacaggactacgagaacggttctcccaccggcaagcccacctccggtgtccctatttccggcctcaccctcagcaagatcagcggttccgtctcctcctccgccacccccgtttacatcctctgcgcctcctgcaccaactggaagtggtccggcgtcagcgtcaccggcggcaagaagtcctccaagtgcaccggtatccccagcgggagcggtgctgcttgctaa

SEQ ID NO: 66369 - protein, 363 aa, Colletotrichum lindemuthianum
MVSYLFVLGALASVAIASPVPELKARASCTFTDAASAIKGKASCTTIVLNNIAVPAGTTLDMTGLKSGTHVSFSGKTTFGYKEWEGPLISFSGSNVVIDGASGHSIDCQGSRWWDSKGGNGGKTKPKFFYAHSLKDSTIRGLHTLNTPVQAFSINGAANLGVYDVSVDNSAGDSAGGHNTDAFDVGSSTGVYISGADVKNQDDCLAVNSGTNITFTGGTCSGGHGLSIGSVGGRKDNVVKSVSITNSKIINSDNGVRIKTVAGATGPVSDITYSGITLSNIAKYGIVIEQDYENGSPTGKPTSGVPISGLTLSKISGSVSSSATPVYILCASCTNWKWSGVSVTGGKKSSKCTGIPSGSGAAC

SEQ ID NO: 66370 - DNA, 1113 bp, Penicillium olsonii
  CDS (1)..(1113)
atgcgtacctccattctgtctatgctcgccctcggcgctgctgccgtctccgccgcccctgcggctgccgctgctcctgctgagctcgttgagcgcggttcttcctgcaccttcacctccgcttctgctgctaaggccggcaagaagtcttgctccagcatcgtccttgacaacatcaaggtccccgctggtgagactcttgatctgtccaacctcaagagcggcaccaaggtcaccttcaagggtgagaccaccttcggttacaaggagtggaagggtcccctcatccgcttctccggtaagaacatcgaggtgaacggtgcttccggccatgtcatcaacggtggcggtgccagctggtgggacggcaagggaaccaacggcggcaagaccaagcctaagttcttctacgcccactctctggacgactcgaccatcaccggtctcaacgtcaagaacacccccgtccagggcttcagtgttcaggccgacaacctggtcctcgaccacatcaccatcgacaacaccgacggtgacaagaccaatggtggccacaacaccgatgccttcgatgtcggcgagtccacctacatcaccatcagcaacgccaacatcaagaaccaggatgactgcctggccatcaactctggcgagaacatcatcttcactggtggtacctgctccggtggccacggtctctccatcggctccgtcggtggacgtgacgacaacaccgtcaagaacgtgaccatctccgactccaccgtctccaactccgacaacggtatccgcatcaagaccatctacaaggccaagggtgaggtcgccgacgtcaccttctccaacatcgagctctccaacatcgccaagtacggtatcgtcatcgagcaggactacgagaacggcagccccaccggcaagcccaccaccggtgtccccatcactggcctcactgtcgagaaggtcactggtagcgtcaagtccagcggtaccgatgtctacatcctttgcggttccggctcttgctccgactggacctggtctggcaacaaggtctccggcggtaagaccagcagcaagtgcaagaacgtgccctccggtgcctcttgctaa

SEQ ID NO: 66371 - protein, 370 aa, Penicillium olsonii
MRTSILSMLALGAAAVSAAPAAAAAPAELVERGSSCTFTSASAAKAGKKSCSSIVLDNIKVPAGETLDLSNLKSGTKVTFKGETTFGYKEWKGPLIRFSGKNIEVNGASGHVINGGGASWWDGKGTNGGKTKPKFFYAHSLDDSTITGLNVKNTPVQGFSVQADNLVLDHITIDNTDGDKTNGGHNTDAFDVGESTYITISNANIKNQDDCLAINSGENIIFTGGTCSGGHGLSIGSVGGRDDNTVKNVTISDSTVSNSDNGIRIKTIYKAKGEVADVTFSNIELSNIAKYGIVIEQDYENGSPTGKPTTGVPITGLTVEKVTGSVKSSGTDVYILCGSGSCSDWTWSGNKVSGGKTSSKCKNVPSGASC

SEQ ID NO: 66372 - DNA, 1556 bp, Sclerotinia sclerotiorum
  CDS (287)..(1429)
ataacgatctcctctagaattgcagcttcaacacagcatcaattactttggctaattgctggtcaggttgcacgggtttaccgttgtcgacttgtggagagctgacggtgcgatttaacggtgtcccactttaaatcttccccaaatttcaatctcgtcttgacatatataagaagcttccaataccttcttttctttcctcatctcatcatcacttacattcttttccatactgtctagtacattcactctttacattccttaaataacaactctactagccaatatggttcacattctttcctcggccttgagcctccttcggctgggcgcagctgtgtctgccgctccagcaccagcaccaactgctgcaccaaacgttgccgatgctcttgcagcagtcgagaagagggccggttcctgcaccttctcggatccagcggtgccgctgcctgccatcaagtccaaggcttcctgcgcaaccatcgtcatcagcgccgtcgctgttccatccggaaccactctcgacttgactggcctcaaatctggtacccacgttgtcttcgagggtactaccaccttcggttacgaagagtggtccggtcctctcgtctccgtctccggaactgacatcaccgttaccggtgcctccggaagcgttctcgatggtaacggagccaagtactgggatggcaagggtaccaacggtggaaagaccaagccaaagttcttctacgctcactccttgaagggcaagtcctccatcaacaacgtcaagatcttgaactccccagtccaagttttctccatcaactctgcctctggtcttactctctctggtatcactatcgacaactctgccggtaactccctcggacacaacactgatgctttcgatgttggatcttccactgatatcaccatctccggcgccaacgttcaaaaccaagatgactgtctcgctatcaactccggtaccggcatcaccttcaccggtggaacctgctccggtggtcacggtctctccatcggatccgtcggtggacgttccgacaacgttgtctctgatgttatcattgaatcctccaccgtcaagaactccgccaacggtgtccgcatcaagactgttctcggtgccactggatccgtctccggcgttacctacaaggacatcaccctctccggtattaccagctacggtgttgtcatcgagcaagattacgagaacggttccccaactggaaagccaacctccggtgttcccatcactggtgtcactctctccaacgttcacggtaccgtctcttcctccgctaccaacgtttacgttctctgcgccaagtgctctggctggacctgggatgttaacgttactggtggtaagacctccaccaagtgcgctggtctcccatctggtgtcaagtgttaaatactttaacacggctactttcaagcactggattccactaggaaatcaattgtagagggggaatggagaaaggggttcgagcccggctgcacccagttgtcaattctttgtacatatagcttctctt

SEQ ID NO: 66373 - protein, 380 aa, Sclerotinia sclerotiorum
MVHILSSALSLLRLGAAVSAAPAPAPTAAPNVADALAAVEKRAGSCTFSDPAVPLPAIKSKASCATIVISAVAVPSGTTLDLTGLKSGTHVVFEGTTTFGYEEWSGPLVSVSGTDITVTGASGSVLDGNGAKYWDGKGTNGGKTKPKFFYAHSLKGKSSINNVKILNSPVQVFSINSASGLTLSGITIDNSAGNSLGHNTDAFDVGSSTDITISGANVQNQDDCLAINSGTGITFTGGTCSGGHGLSIGSVGGRSDNVVSDVIIESSTVKNSANGVRIKTVLGATGSVSGVTYKDITLSGITSYGVVIEQDYENGSPTGKPTSGVPITGVTLSNVHGTVSSSATNVYVLCAKCSGWTWDVNVTGGKTSTKCAGLPSGVKC

SEQ ID NO: 66374 - DNA, 1089 bp, Aspergillus niger
  CDS (1)..(1089)
atgcactcgtttgcttctcttctcgcctacggcctggtcgccggcgccaccttcgcttctgcctctcctatcgaagctcgagacagctgcacgttcaccaccgctgccgctgctaaagcgggcaaggcgaaatgctctactatcacccttaacaacatcgaagttccagctggaaccaccctcgacctgaccggtctcaccagcggtaccaaggtcatcttcgagggcaccacgaccttccagtacgaagaatgggcaggccccttgatctccatgagtggcgaacatatcaccgtcactggtgcctccggccacctcatcaattgcgatggtgcgcgctggtgggatggcaagggaaccagcggaaagaagaagcccaagttcttttacgcccatggccttgactcctcgtctattactggattaaacatcaaaaacaccccccttatggcgtttagtgtccaggcgaatgacattacgtttaccgatgttaccatcaataatgcggatggcgacacccagggtggacacaacactgatgcgttcgatgttggcaactcggtcggggtgaatatcattaagccttgggtccataaccaggatgactgtcttgcggttaactctggcgagaacatctggttcaccggcggcacctgcattggcggccacggtctctccatcggctctgtcggcgaccgctccaacaacgtcgtcaagaacgtcaccatcgaacactccaccgtgagcaattccgaaaacgccgtccgaattaagaccatctctggcgccactggctccgtgtccgagattacgtactccaacatcgtcatgtctggcatctccgattacggcgtggtcattcagcaggattacgaagacggcaagcctacgggtaagccgacgaacggtgtcactattcaggatgttaagctggagagcgtgactggtagcgtggatagtggggctactgagatctatcttctttgcgggtctggtagctgctcggactggacctgggacgatgtgaaagttaccggggggaagaagtccaccgcttgcaagaacttcccttcggtggcctcttgttag

SEQ ID NO: 66375 - protein, 362 aa, Aspergillus niger
MHSFASLLAYGLVAGATFASASPIEARDSCTFTTAAAAKAGKAKCSTITLNNIEVPAGTTLDLTGLTSGTKVIFEGTTTFQYEEWAGPLISMSGEHITVTGASGHLINCDGARWWDGKGTSGKKKPKFFYAHGLDSSSITGLNIKNTPLMAFSVQANDITFTDVTINNADGDTQGGHNTDAFDVGNSVGVNIIKPWVHNQDDCLAVNSGENIWFTGGTCIGGHGLSIGSVGDRSNNVVKNVTIEHSTVSNSENAVRIKTISGATGSVSEITYSNIVMSGISDYGVVIQQDYEDGKPTGKPTNGVTIQDVKLESVTGSVDSGATEIYLLCGSGSCSDWTWDDVKVTGGKKSTACKNFPSVASC

SEQ ID NO: 66376 - DNA, 1089 bp, Aspergillus tubingensis
  CDS (1)..(1089)
atgcactcctttgcttctcttctggcctacggcctagccgccagcgccaccctcgcttctgcctcccccatcgaagcccggggaagctgcaccttcaaaacggctgctgctgccaaagcgggcaaggcagggtgctctaccatcacccttgacaacatcgaagtccccgctggaaccaccctcgacctgaccggtctcaccagcggtacgaaggtcatcttcgagggcaccacgaccttcgattatgaagaatgggcaggccccttgatctccatgagtggcaaagatatcaccgtcactggtgcctcaggccatctcatcaactgcgacggtgcgcggtggtgggacggcaaggggaccagcggaaagaagaagcccaagttcttctacgctcatggccttgactcctcgtccattactggattgaatatcaagaacactccccttatggcgtttagtgttcaggcggatgacatcactctgactgacattaccatcaacaacgcggacggtgataccctgggtggacacaacactgatgcgtttgatgttggtaactctgtcggtgtgaatatcatcaaaccgtgggtccataaccaggatgactgtcttgcgatcaactctggcgagaacatctggtttaccagcggcacctgcattggcggccacggtctctccatcggttctgtcggcggccgctccaacaacgttgtcaagaacgtcactatcgaacactccaccgtgagcaattccgagaacgccgtccggattaagaccgtctctggtgccactggttccgtgtctgagatcacatactccaacattgtcatgtccggcatctccgattacggcgtcgttatccagcaggattacgaggatggcaagcctacgggtaagcccacgaacggtgtcactattacggatgtcaagctggagagcgtgactggtactgtggatagtaaggctactgatatctatctcctttgcggatctggtagctgctcggactggacttgggacgatgtgaaggtcactggaggaaagaagtctactgcttgcaaaaactacccttcggtggcttcttgctag

SEQ ID NO: 66377 - protein, 362 aa, Aspergillus tubingensis
MHSFASLLAYGLAASATLASASPIEARGSCTFKTAAAAKAGKAGCSTITLDNIEVPAGTTLDLTGLTSGTKVIFEGTTTFDYEEWAGPLISMSGKDITVTGASGHLINCDGARWWDGKGTSGKKKPKFFYAHGLDSSSITGLNIKNTPLMAFSVQADDITLTDITINNADGDTLGGHNTDAFDVGNSVGVNIIKPWVHNQDDCLAINSGENIWFTSGTCIGGHGLSIGSVGGRSNNVVKNVTIEHSTVSNSENAVRIKTVSGATGSVSEITYSNIVMSGISDYGVVIQQDYEDGKPTGKPTNGVTITDVKLESVTGTVDSKATDIYLLCGSGSCSDWTWDDVKVTGGKKSTACKNYPSVASC

SEQ ID NO: 66378 - DNA, 1143 bp, Penicillium olsonii
  CDS (1)..(1143)
atgattgcaggctcgaaacttctcatgctcggtctcttcggagccttggcagtacacgcactcccagagccagccaaggctcaggttacggcagctccgaaactcgaagagagagcgaccagctgcactttctccgggtctgctggtgcctcgtcagcgagcaagtcgaagactgcttgtgccaccattgtactgtcggcagtggctgtgccatctggcacgaccttggatttgactggtctgaatgatgggacaactgtgatatttgaaggtgaaaccacatttggttacaaagagtggtcagggcctttggtctcggtctccggcaccgacatcacggtcaaaggtgcctctggcgcaacactcaacggtgacggaagccgttggtgggacggcaagggctcgaatggcgggaagaccaaaccgaagttcttctatgcgcacaaaatgttttcctccaccatcagtgacatccacatcgtgaactctcccgttcaggtttttagcatcaacggcgcaacagacctcacgctcagtggcatcactgtagacaaccgcgatggcgacaccgacgagggaggccacaacaccgacgcattcgacgttggatcaagcacgggaattaccattaccggtgcgacggtctacaaccaagatgactgtctcgcagtcaactctggaacggacatcacgttcactggcggtctttgctctggtggacatggcttgtccatcggctccgtcggcggacgcagcaacaacgatgttgccaacgtcatcatcgagaactcgcagatccaagactccacaaatggcgtgcggatcaagaccgtttacgaggccactggctctgtcaaaaatgtcacctacaaggacatcacgctttcgggaatcaccaaatatgggattgtgatcgaacaagactacgagaatggcagtcccactggcacaccgaccgacggtgtaccaatcaccgacctcaccttggacggggtcaagggaacagttgcgagtagcggaacgaatgtgtacatcctttgcgccgaaggggcttgctccgattggacttgggatggtgtcagcgtcagtggtggcaagacgagcagcgcttgtgagaatgtgccgagtagcgccagctgctga

SEQ ID NO: 66379 - protein, 380 aa, Penicillium olsonii
MIAGSKLLMLGLFGALAVHALPEPAKAQVTAAPKLEERATSCTFSGSAGASSASKSKTACATIVLSAVAVPSGTTLDLTGLNDGTTVIFEGETTFGYKEWSGPLVSVSGTDITVKGASGATLNGDGSRWWDGKGSNGGKTKPKFFYAHKMFSSTISDIHIVNSPVQVFSINGATDLTLSGITVDNRDGDTDEGGHNTDAFDVGSSTGITITGATVYNQDDCLAVNSGTDITFTGGLCSGGHGLSIGSVGGRSNNDVANVIIENSQIQDSTNGVRIKTVYEATGSVKNVTYKDITLSGITKYGIVIEQDYENGSPTGTPTDGVPITDLTLDGVKGTVASSGTNVYILCAEGACSDWTWDGVSVSGGKTSSACENVPSSASC

SEQ ID NO: 66380 - DNA, 1490 bp, Arabidopsis thaliana
  CDS (81)..(1451)
aaagccttcgcttcaacaacattttttctttagtcgtaaacatattcattcatgattttaacgctttttcttcaaaatatatgaagaagaagacttggttcttgaatttctcactgttctttcttcaaatcttcacatcttcgaatgcattggatgttactcaattcggagcggttggagatggagttacagacgattcacaggcgttcttgaaagcttgggaagctgtgtgtagcggaacaggagatgggcagtttgtcgttccggcagggatgacatttatgttacagcccctgaagtttcaagggtcttgcaaatccacccctgtttttgttcagatgttaggcaagctggttgcaccgagtaaaggaaattggaaaggggacaaagatcaatggattctttttacagacattgaaggacttgtgattgaaggtgacggtgaaattaacggccagggttcgagctggtgggaacacaaaggctctagacctaccgcattgaagttcaggagctgcaacaaccttagattgagtgggttaacgcatttagatagtccaatggctcacattcacataagcgagtgcaactatgtgaccatctcaagcctacgaataaatgcacctgaatcaagtcctaacaccgatggaatcgacgtaggggcttcatccaacgttgtcatccaggattgcatcatcgcaaccggtgatgattgcattgcgattaattcggggacgtctaacatccacatttccggtatagattgcggaccaggccatgggataagcataggaagcttgggaaaagatggagagacagctacagtggagaatgtatgtgtccaaaactgtaactttagaggaactatgaatggagctcggatcaaaacttggcagggcggatcgggttacgcgagaatgattactttcaatggaattactctagacaatgttgaaaatccaatcataatcgatcagttctataacggtggcgattccgataatgccaaagatcgtaagtcgtcggcagtggaagtgagcaaagtggtgtttagtaatttcattgggacgtcaaagtcagagtacggtgttgacttccgatgcagcgagagagttccatgcacagagattttcttgagagacatgaaaatagaaacggcatcatcaggatcaggacaagtcgcacaaggacagtgtttaaacgtgagaggtgcgtctacaattgctgtaccaggtctagaatgtttagaactttccacagatatgttttcatcggcgcaattgctggaacaaacttgcatgtcggcacaatcagtgcaaccaagaacaacaacacaaccgatgcaagatccaatatgggtttttcaaagcagagggaaacaacttagagtttacaatattgccatattagtttcatttatctctttggttacatatattttagctagataggttacatatattatgcgagtaaaatttgtaatctaattg

SEQ ID NO: 66381 - protein, 456 aa, Arabidopsis thaliana
MKKKTWFLNFSLFFLQIFTSSNALDVTQFGAVGDGVTDDSQAFLKAWEAVCSGTGDGQFVVPAGMTFMLQPLKFQGSCKSTPVFVQMLGKLVAPSKGNWKGDKDQWILFTDIEGLVIEGDGEINGQGSSWWEHKGSRPTALKFRSCNNLRLSGLTHLDSPMAHIHISECNYVTISSLRINAPESSPNTDGIDVGASSNVVIQDCIIATGDDCIAINSGTSNIHISGIDCGPGHGISIGSLGKDGETATVENVCVQNCNFRGTMNGARIKTWQGGSGYARMITFNGITLDNVENPIIIDQFYNGGDSDNAKDRKSSAVEVSKVVFSNFIGTSKSEYGVDFRCSERVPCTEIFLRDMKIETASSGSGQVAQGQCLNVRGASTIAVPGLECLELSTDMFSSAQLLEQTCMSAQSVQPRTTTQPMQDPIWVFQSRGKQLRVYNIAILVSFISLVTYILAR

SEQ ID NO: 66382 - DNA, 1092 bp, Aspergillus oryzae
  CDS (1)..(1092)
atgcagcttcttcaatcttccgtcattgccgctactgtcggcgctgcgctggtcgccgcagtcccagtagaactcaaagcccgcgactcctgtactttcacctcggctgccgacgctaagtcgggcaagacctcttgctcaaccatcactctgagcaacatcgaggttcccgctggtgaaacccttgatctgaccggtctcaacgatggcaccactgtcatcttctcgggtgagaccactttcggctacaaggagtgggagggtcctctcatctccgtgtccggaaccaacatcaaagtccaacaggcatccggtgccaagattgacggagacggatcccgctggtgggatggcaagggtggcaatggtggaaagacaaagcccaagttcttctacgcccacaagctggactcctcttccatcaccggcctccagatctacaacacccccgtccagggcttcagcatccagtcggacaacctgaacatcactgatgttaccatcgataactccgctggtaccgcagagggccacaacaccgacgccttcgatgtcggctctagcacctacatcaacattgacggtgccaccgtgtacaaccaggatgactgtctcgccatcaactctggatcgcacatcactttcaccaacggctactgtgacggtggccatggtctctccatcggttcggtcggtggtcgtagcgacaacaccgtcgaagacgtgaccatctccaactccaaggttgtcaactcccagaatggtgtccgtatcaagaccgtctacgatgccaccggtaccgtctccaacgtcaagttcgaggatatcactctttccggtattaccaagtacggactcatcgttgagcaggattacgagaacggcagccccactggtacccctaccaacggtatcaaggtctctgatatcaccttcgacaaggttaccggtaccgttgagagcgacgctactgacatctacattctctgtggatctggcagctgcactgactggacctggtccggtgtttccatcactggtggtaagactagctccaagtgcgagaacgtttctactggtgcttcttgttaa

SEQ ID NO: 66383 - protein, 363 aa, Aspergillus oryzae
MQLLQSSVIAATVGAALVAAVPVELKARDSCTFTSAADAKSGKTSCSTITLSNIEVPAGETLDLTGLNDGTTVIFSGETTFGYKEWEGPLISVSGTNIKVQQASGAKIDGDGSRWWDGKGGNGGKTKPKFFYAHKLDSSSITGLQIYNTPVQGFSIQSDNLNITDVTIDNSAGTAEGHNTDAFDVGSSTYINIDGATVYNQDDCLAINSGSHITFTNGYCDGGHGLSIGSVGGRSDNTVEDVTISNSKVVNSQNGVRIKTVYDATGTVSNVKFEDITLSGITKYGLIVEQDYENGSPTGTPTNGIKVSDITFDKVTGTVESDATDIYILCGSGSCTDWTWSGVSITGGKTSSKCENVSTGASC

SEQ ID NO: 66384 - DNA, 1288 bp, Aspergillus parasiticus
  CDS (61)..(1152)
tctttcagttcatatttgaaggcgtcttgttgaccaagtccctatccattctttcggaaaatgcagcttcttcaatcttccgtcattgccgctactgtcggcgctgcgctggtcgccgcagccccagtagaacttgaagcccgcgactcctgtactttcacctcggctgccgacgctaagtcgggcaagacctcttgctcaaccatcactctgagcaacatcgaggttcccgctggtgaaacccttgatctgaccggtctcaacgatggcaccactgtcatcttctcgggtgagaccactttcggctacaaggagtgggagggccctctcatctcggtgtccggaaccaacatcaaggtccaacaggcatccggtgccaagattgacggagacggatcccgctggtgggatggagagggtggcaatggtggaaagaccaagcccaagttcttctacgcccacaagctagactcctcttccatcaccggcctccagatctacaacacccctgtccagggcttcagcattcagtcggacaacctgaacatcactgatgttaccatcgataactccgctggtactgcagagggccacaacaccgacgccttcgatatcggctctagcacctacatcaacattgacggtgccaccgtgtacaaccaggatgactgtctcgccatcaactctggatcgcatatcactttcaccaacggctactgtgatggtggtcacggtctctccatcggttccgtcggtggtcgtagcgacaataccgtcgaagacgtgaccatctccaactccaaggttgtcaactctcagaacggtgtccgtatcaagaccgtctacggtgccaccggcactgtctccaacgtcaagtttgaggatatcaccctttccggtattaccaagtacggactcgtcgttgagcaggattacgagaacggcagccccactggtacccctaccaacggtatcacggtctcaggtatcaccttcgagaaggttaccggtaccgtcgagagcgacgctactgatatctacattctctgtggatctggcagctgcactgactggacttggtctggtgtctccatcactggtggtaagactagctccaagtgcgagaatgttccgactggcgcttcttgttaaatacggacgcacgggcgcagtttagccggccattgtgatatctattgttcttggtgttagtgctattttttggcactgactgtttaatctagctttacataactactaagcaattcaacttctttacatgttgtga

SEQ ID NO: 66385 - protein, 363 aa, Aspergillus parasiticus
MQLLQSSVIAATVGAALVAAAPVELEARDSCTFTSAADAKSGKTSCSTITLSNIEVPAGETLDLTGLNDGTTVIFSGETTFGYKEWEGPLISVSGTNIKVQQASGAKIDGDGSRWWDGEGGNGGKTKPKFFYAHKLDSSSITGLQIYNTPVQGFSIQSDNLNITDVTIDNSAGTAEGHNTDAFDIGSSTYINIDGATVYNQDDCLAINSGSHITFTNGYCDGGHGLSIGSVGGRSDNTVEDVTISNSKVVNSQNGVRIKTVYGATGTVSNVKFEDITLSGITKYGLVVEQDYENGSPTGTPTNGITVSGITFEKVTGTVESDATDIYILCGSGSCTDWTWSGVSITGGKTSSKCENVPTGASC

SEQ ID NO: 66386 - DNA, 1104 bp, Penicillium digitatum
  CDS (1)..(1104)
atgcgcacatctttcgttaccatgctggccctcggcgccgccgccgtgtccgctgccccagctgctcctgttactgatctcgttgagcgcggctcgagctgcaccttcaccaccgctgaagcggccaaggctggcaagggatcttgctccaccattgtgctggacaacatcaaggtccctgccggtgagaccctcgaccttaccaagctgaagtccggtactcaggtcgtcttcaagggcgaaacctctttcggatacaaggagtggactggccccctcgtcagcttctccggaagcaacattcacgtctccggcgctgccggccatgtcatcaacggtggcggtcccagctggtgggacggcaagggaaccaacggcggaaagaagaagcccaagttcttctacgcccaccacttggacgactcgaccatcagcggtctgaacgtcaagaacacccccgttcagggtttcagtatcctggctgaccgcctgaccctcgaccacatcaccatcgacaacagcgagggtgatgccaagggtggccacaacaccgatgccttcgatgttggctccagtaccttcatcaccatctccaacgccaacatcaagaaccaggatgactgcctggctatcaactctggctcgaacatcaagttcgttggcggcacctgctccggcggccacggtatctccatcggttccgttggcttgcgcgacaacaacatcgtgaaggatgtcaccatctctgactctaccgtcatcaactccgacaacggtgtccgcgtcaagaccatctaccaggccaccggtgctgtctccggcgtcactttctccaacatcaagctgtccaacatcgccaagtacggtatcgtcatcgagcaggattacgagaacggcagccctaccggcaagcccaccaacggtgtccccatctctgagctcaccattgagaacgttaccggtaccctcaagagcagcgctactgaagtttacattctctgcggtaacggtagctgcaagaactggaaatgggctggaaactctctctctggtggtaagaagagtggcaagtgcggtaacgtgcctgccggtgcttcttgctag

SEQ ID NO: 66387 - protein, 367 aa, Penicillium digitatum
MRTSFVTMLALGAAAVSAAPAAPVTDLVERGSSCTFTTAEAAKAGKGSCSTIVLDNIKVPAGETLDLTKLKSGTQVVFKGETSFGYKEWTGPLVSFSGSNIHVSGAAGHVINGGGPSWWDGKGTNGGKKKPKFFYAHHLDDSTISGLNVKNTPVQGFSILADRLTLDHITIDNSEGDAKGGHNTDAFDVGSSTFITISNANIKNQDDCLAINSGSNIKFVGGTCSGGHGISIGSVGLRDNNIVKDVTISDSTVINSDNGVRVKTIYQATGAVSGVTFSNIKLSNIAKYGIVIEQDYENGSPTGKPTNGVPISELTIENVTGTLKSSATEVYILCGNGSCKNWKWAGNSLSGGKKSGKCGNVPAGASC

SEQ ID NO: 66388 - DNA, 1137 bp, Penicillium expansum
  CDS (1)..(1137)
atgatcttgacacgcagtgttgttctgggatttctgggctcagcgtccttggccctcgcctctccggttgccgaactggctgaagggagcagactcacccctcgtggatctgcatgcagctattcgggaaccagtggtgcagcagcagcgatagctggaaaggcaggttgctccagtattactctcaacaacgttgtagtgcctgccgggactacgctggatttgactggtctggcctcgggtaccaaggtgatttttgagggaaccactactttcggctataagcagtgggctggccctctgatctccatctctggaaccaacatccaagtttctggagcttccggtcacctcatcgatggccaaggttcccgctggtgggatggagagggttccaacagcaagaccaacatcaagcctaagttcttcttcgcccacagtctcaagggatcctccactatcaccgggttgaacatcaaggattctcccgttcaggtcttcagcatctctggctcgtccggtctcacaatcagtggtgtcacaattgacaacaagaatggtgatacgaactctcttggtcacaataccgatgggttcgatatcggcgacagtgatagcattaccatcactggtgctacggtttataaccaagacgactgccttgctatcaattctggaacgaacattgtcttttccgggggttactgctctggtgggcacggattgtctatcggctcagtcggtggccgttccaataatgtggtagagaccgtccatatcagcagcacccaggtcgtcaactctcagaatggtgtccgtgtcaaggctgtctctggtgccaccggtactatcaaaggcgtgactttccaggatattaccctctccggcattacgagccagggtatcaccatccgccaagaatacaccaactctggctacactggaagccccacgaccggggttccaatcactggtctcaccttgaacaatgtgcacggcacggtcacatccaagggtaccgatatcaccatcgagtgtggaagttctgccagttgctcaggctggacttggactaaggttgcagtgtctggcggtaaggcggatgtgtgcaagaatgcaccttccggcacttgttaa

SEQ ID NO: 66389 - protein, 378 aa, Penicillium expansum
MILTRSVVLGFLGSASLALASPVAELAEGSRLTPRGSACSYSGTSGAAAAIAGKAGCSSITLNNVVVPAGTTLDLTGLASGTKVIFEGTTTFGYKQWAGPLISISGTNIQVSGASGHLIDGQGSRWWDGEGSNSKTNIKPKFFFAHSLKGSSTITGLNIKDSPVQVFSISGSSGLTISGVTIDNKNGDTNSLGHNTDGFDIGDSDSITITGATVYNQDDCLAINSGTNIVFSGGYCSGGHGLSIGSVGGRSNNVVETVHISSTQVVNSQNGVRVKAVSGATGTIKGVTFQDITLSGITSQGITIRQEYTNSGYTGSPTTGVPITGLTLNNVHGTVTSKGTDITIECGSSASCSGWTWTKVAVSGGKADVCKNAPSGTC

SEQ ID NO: 66390 - DNA, 1131 bp, Penicillium griseoroseum
  CDS (1)..(1131)
atggcctccagtctcaaacttggcttgattgccctactcggtgcgactgctgtcaacgcagctcccgccgctgagcccgttcttggaacctctctccttacttctcgtgcttcttgtaccttctccggctccagcggtgctgcggaagccatcaagagcaagacctcttgctcaaccattaccctgagcaacgtcgaagtcccggccggaactactctggacctgacaggactcaagtccggtaccaccgtcatcttcgaaggaaccaccaccttcggttacaaggaatgggaaggtcctctggtctccgtctccggaacctccatcaccgtccagggtgcctcaggcgcgcagctcaacggtgatggtgcccgctggtgggacggcaagggaaccaacggcggcaagaccaagcccaagttcttctacgctcacagcttgaccaactccaagatcgagaacatctacatcaagaactcccccgtgcaggtcttcagcatcaacggcgccaaggagctgactcttagcggaatcaccgtcgacaccgctgacggcgatagcaacggcggccacaacaccgacgctttcgacgtcggctccagcaacggtgtctacatcaccagccctatcgtccacaaccaggatgactgcctggctgtcaactccggcactaacgtccacttcactggcgctcagtgcactggcggccacggtatctccatcggctccgtcggtggacgctccgacaacaccgttgacggtgtcaccgtcgagagctgcaccatcaaggactccgacaacggcgtccgcatcaagaccgtctacggcgccaccggtacagtccaaggcgtcacctacaaggacatcactctttccggaattgccaagtacggtatcgtcatcgagcaggattacgagaacggtagccctaccggaacccccaccagcggtgtccccattaccgacttgaccctcgacaacgtccacggaactgtcgccagcagtggtgtcgatacctacatcctgtgtgcttctggtgcttgctccgactggtcttggagcggcgttagcatcaccggtggtcagactagcaagaagtgcaagggtattcccagcggtgctagctgctaa

SEQ ID NO: 66391 - protein, 376 aa, Penicillium griseoroseum
MASSLKLGLIALLGATAVNAAPAAEPVLGTSLLTSRASCTFSGSSGAAEAIKSKTSCSTITLSNVEVPAGTTLDLTGLKSGTTVIFEGTTTFGYKEWEGPLVSVSGTSITVQGASGAQLNGDGARWWDGKGTNGGKTKPKFFYAHSLTNSKIENIYIKNSPVQVFSINGAKELTLSGITVDTADGDSNGGHNTDAFDVGSSNGVYITSPIVHNQDDCLAVNSGTNVHFTGAQCTGGHGISIGSVGGRSDNTVDGVTVESCTIKDSDNGVRIKTVYGATGTVQGVTYKDITLSGIAKYGIVIEQDYENGSPTGTPTSGVPITDLTLDNVHGTVASSGVDTYILCASGACSDWSWSGVSITGGQTSKKCKGIPSGASC

SEQ ID NO: 66392 - DNA, 1116 bp, Penicillium janthinellum
  CDS (1)..(1116)
atgccttcctatctccggaatttggtctgggctaccctggctgccggcctggtgtctgcggctcccaccccttcgcgtgtttcggatctgaccaagaagtcgtcctccacctgcaccttctcctcggctgctagtgccagcgccagcaagtcctcctgctccacgattgttctgagtaacattgaggtgcctgcgggtaaaacactcgatctgacggacctgaaggacggaaccaaggtcatcttcgaaggcaccactacgttcggttacaaggagtggagcggtcctctcatcaagatctctggatccgatatcaccgtcgaggctgccgatggcgctgtaattaacgctgacggttcccgttggtgggatggagagggcaccaatggaggcaagaccaagcccaagttcttctatgcccactcgttggacgactcgaccatctcgggcctcaatatcaagaacacccccgtgcaggctttcagcatccagtctgacaatcttatcattgatggagttactattgacaattcggacggtgacgaaaatggcggccacaacaccgacggctttgatatcagcgagtccacaggcgttactatcaggaacgcggttgtcaagaaccaggatgactgcattgcaatcaactccggccagaacatctacttcaccggaggtacctgctctggcggccatggtctctcgattggctccgtcggtggtcgtgatgataacaccgtgaagaacgtgacgatcacagattccaccgtgacagattccgccaacggagttcgcatcaagaccgtttacgatgctactggctctgttagcgacgtgactttttccgacatcacggtctctggtattaccgactatggcattgtgattgagcaggactacgagaacggttctccgaccggcactcctaccagcggtgttccgatcacagatttgactgtcaagggcatcactggctcagtggaatccgatgcagttgaagtgtatatcctgtgtggtgacgatgcctgcagcgactggacctggagcggcgtggacatcaccagtggacagaccagcagcaaatgcgagaatgtcccctctggcgcgtcgtgctga

SEQ ID NO: 66393 - protein, 371 aa, Penicillium janthinellum
MPSYLRNLVWATLAAGLVSAAPTPSRVSDLTKKSSSTCTFSSAASASASKSSCSTIVLSNIEVPAGKTLDLTDLKDGTKVIFEGTTTFGYKEWSGPLIKISGSDITVEAADGAVINADGSRWWDGEGTNGGKTKPKFFYAHSLDDSTISGLNIKNTPVQAFSIQSDNLIIDGVTIDNSDGDENGGHNTDGFDISESTGVTIRNAVVKNQDDCIAINSGQNIYFTGGTCSGGHGLSIGSVGGRDDNTVKNVTITDSTVTDSANGVRIKTVYDATGSVSDVTFSDITVSGITDYGIVIEQDYENGSPTGTPTSGVPITDLTVKGITGSVESDAVEVYILCGDDACSDWTWSGVDITSGQTSSKCENVPSGASC

SEQ ID NO: 66394 - DNA, 1344 bp, Oryza sativa
  CDS (1)..(1344)
atggcttgcaatgtgctccttttctctgcatttgtcgttgtcatgtccttcttcttgtgtagtgttcatgccaaggtcaacatgaatgcatcctctttgactaatggagatgatagtctgagaggaaagtcgtctctcgagtcgaagaaggctgtgttcgatgtgcgcaaacatggctcttacggagatggacaacatgatgatacaaaggcattgtcaaaggcatgggctgcggcttgctcctctttgcaaccttctattgttcttgttccaaagggcaagagatacctcaccaagcacattacactatctggcccatgcaaatccagcatcacgttcatgatagagggtactttggtggctcctccaaagaggtcagattggagcaaggaaactattaggcactggattatgttcaatggtgtaattggtcttactgtcgctggcggtgggacggtcgatggaaatggcaagatttggtggcaaaattcttgcaaaacgaatgcgaaacttgcatgcactgaatctccaacggccttgacattctactcctgttcaaatctgaaagtggagaacttgaagctactaaacagccaacaaatccacatgtcagtggaggattgcacaaatgttaggatctctggcctgacaatcacagcaccaggcactagcccaaacaccgatggcatccatatcaccagaagtaaaaatgtacaagtgacaggctgcacaatcaagaccggggacgattgcatgtcgatcgaggatggaactgagaacctccatgtcaagaacatggtgtgcggaccaggacacggcatcagcatcgggagcctaggcgatcacaactctgaagctcatgtcaacaatgtcaccatcggcactgtcaggctatatggcacaaccaacggagctcgcatcaagacatggcagggtggtcgggggtacgcgaagtacattgttttccagaacatgatcatggaaaatgtttggaaccccgtcattatcgatcaaaactactgtgactctgcaacaccatgcaagaaacagttgtccatttgtgtgaataatatggaagcttataatttagtgtttttgtctcagacatctgcagttcagattagcaatgtggtcttcaagaacatcaggggcacaagtgcttccaaggaggctatcaagctggactgcagcagaaatgtaccttgccaaggcataaccttgaatgatgtcaagctcactgtcaagggaggtggtggtgatgcgaagagcacttgccgaaacgcaaaatggaagaaatcagggacagttgttccacagccttgtgcttccacaacaactgtatga

SEQ ID NO: 66395 - protein, 447 aa, Oryza sativa
MACNVLLFSAFVVVMSFFLCSVHAKVNMNASSLTNGDDSLRGKSSLESKKAVFDVRKHGSYGDGQHDDTKALSKAWAAACSSLQPSIVLVPKGKRYLTKHITLSGPCKSSITFMIEGTLVAPPKRSDWSKETIRHWIMFNGVIGLTVAGGGTVDGNGKIWWQNSCKTNAKLACTESPTALTFYSCSNLKVENLKLLNSQQIHMSVEDCTNVRISGLTITAPGTSPNTDGIHITRSKNVQVTGCTIKTGDDCMSIEDGTENLHVKNMVCGPGHGISIGSLGDHNSEAHVNNVTIGTVRLYGTTNGARIKTWQGGRGYAKYIVFQNMIMENVWNPVIIDQNYCDSATPCKKQLSICVNNMEAYNLVFLSQTSAVQISNVVFKNIRGTSASKEAIKLDCSRNVPCQGITLNDVKLTVKGGGGDAKSTCRNAKWKKSGTVVPQPCASTTTV

SEQ ID NO: 66396 - DNA, 1266 bp, Brassica napus
  CDS (1)..(1266)
atggctagcgcaagaagtttggttgccaaggcaaataatactaatgtaggctcattaatcttaatggccttggtgttaggttcttgcgtagctaatggtgaatatctcggtggccgccgtggccttgccgctgttgccggcaaccctacggtctttgatattactaagaatggagcagtgggaaatggtgccaccgattcttccaaggcgtttctaaacacatggctccaagtgtgtgccagtcctgtaccagcaacgctactagtccctaaaggagatttcttggctggtccagtaatttttgctggtccatgcaagagcaaagtgaccgtcgaagttcagggcacaatcatcgctccaccaagcggatacccgactcctgaatggttcttattcgaacatgtcgataatgtcgtcctcaccggacccggcacattccacggcaaaggtgaagccgtttggaaagcagatggctgtggtaaaaagttgaactgcaatcttcctccaacgtctctaaaattcagaaacattttaaaccttgacatttccggcattagctcggtcaacgcaaaggccttccacatgttcttggtaaaaactacaaatgtcaacgtccaaaacatcaagattactgcccctgctgaaagtcccaacaccgatggcatccatttgagcaatgcggtcaacgttcatatcgctgacagtttaatagctacaggagacgattgtatctcagtcggtcgtggttccaccaatgtaaccgtcgaacgcgtgacttgtggcccaggacacggcctaagtgtcggtagtcttggtaagtacccgaacgaggagaatgttgccggcattcactttaagaagtgcaccatgaaagataccgacaatggtcttagaatcaagagttggggtggttcgtctccaagcacggctgtggacatcacctatgaagatattatgatgacaaacgtcaagaacccaatcatcattgaccaaaactacggctcaagaggcggagattcaaaagttgcgataagcaatgtgctgttcaagaacgtaagaggaacaacaattacaaaagatgaagttcagttcatgtgcagcaaatcagtaccgtgcaaaggagtcagcgtcgttgacgtggaattgaacttcgtaggtgacaaaggaggacacccctcgtcgtcaggaggtttggtcggagctctttgtaccaacgccaatgttatcttcggtggaaaacttagcttccctctgtgtcccaaataa

SEQ ID NO: 66397 - protein, 421 aa, Brassica napus
MASARSLVAKANNTNVGSLILMALVLGSCVANGEYLGGRRGLAAVAGNPTVFDITKNGAVGNGATDSSKAFLNTWLQVCASPVPATLLVPKGDFLAGPVIFAGPCKSKVTVEVQGTIIAPPSGYPTPEWFLFEHVDNVVLTGPGTFHGKGEAVWKADGCGKKLNCNLPPTSLKFRNILNLDISGISSVNAKAFHMFLVKTTNVNVQNIKITAPAESPNTDGIHLSNAVNVHIADSLIATGDDCISVGRGSTNVTVERVTCGPGHGLSVGSLGKYPNEENVAGIHFKKCTMKDTDNGLRIKSWGGSSPSTAVDITYEDIMMTNVKNPIIIDQNYGSRGGDSKVAISNVLFKNVRGTTITKDEVQFMCSKSVPCKGVSVVDVELNFVGDKGGHPSSSGGLVGALCTNANVIFGGKLSFPLCPK

SEQ ID NO: 66398 - DNA, 1263 bp, Brassica napus
  CDS (1)..(1263)
atggctaacgcaagaatgttagccgctaaggcaaataacactaatattggttcattcattataatggccttggtacttggttcttgcgtggctaacggtgaatatcttggaggcggccgtgaacttactggcaaccctaccgtatttgatataactcagtttggagcagtgggagatggtcgcaccaatactttcaaggcgtttttgaaagcatggatccaagtgtgtgcaagtcctgtaccagcaacgctactagtccctaaaggaaatttcttggctggtccaattattttcgccggtccatgcaaaagcaaagtgaccgtcaatgttcaaggcacgatcagtgctacaacaagcggattcgcaacccctgaatggatcttatttgagcgtgtcgacaatgtccacctcaccggacctggcataattcacggaagaggtgaagcagtatgggcagcagatggttgtggcaaaaagtttaaatgcaatcttcccccaacgtctctaaaattcagaaacatagtaaatcttgaagtcagcggcattagctcggtcaacgcaaaggccttccacatgttcttggtgaaaaccgtgaatgtcaacatccacaacattaagattatcgcccctgctgaaagtcccaacaccgatggtatccatttgagcaatgccgacaacgttaggatcctagacagttttatagggaccggagacgattgtgtttcagtcggtcgtggttccaacaatgtaaccgtcgaacgtgtggtttgtggccctggacacggcctcagtgttggtagtcttggtaagtaccccaacgaggaggacgttagcggcattcactttaggaactgcacaatgagaaataccgacaatggtcttagaatcaagagttggggtggttcgacaccaagcaaggctgtggacattcattttgaagatattatcatggaaaacgtcaagaacccaatcatcattgaccaaaactatggttcaagaggcggggagtcaagagttgccataagcgatgtgttgttcaagggtgtaaaaggaacaacaattacaaaagattttgttcagttcatgtgcagcaaatcggtaccgtgtaaaggagtcagagtcgacgatgttaaattaagcttcgtaggccacaaaggaggacatccatcggcgtcaggtggtttgatcggatctctttgtaataacgccggtgttgtatttggtggaagggttaacttccctctgtgcccaaatcaaaaataa

SEQ ID NO: 66399 - protein, 420 aa, Brassica napus
MANARMLAAKANNTNIGSFIIMALVLGSCVANGEYLGGGRELTGNPTVFDITQFGAVGDGRTNTFKAFLKAWIQVCASPVPATLLVPKGNFLAGPIIFAGPCKSKVTVNVQGTISATTSGFATPEWILFERVDNVHLTGPGIIHGRGEAVWAADGCGKKFKCNLPPTSLKFRNIVNLEVSGISSVNAKAFHMFLVKTVNVNIHNIKIIAPAESPNTDGIHLSNADNVRILDSFIGTGDDCVSVGRGSNNVTVERVVCGPGHGLSVGSLGKYPNEEDVSGIHFRNCTMRNTDNGLRIKSWGGSTPSKAVDIHFEDIIMENVKNPIIIDQNYGSRGGESRVAISDVLFKGVKGTTITKDFVQFMCSKSVPCKGVRVDDVKLSFVGHKGGHPSASGGLIGSLCNNAGVVFGGRVNFPLCPNQK

SEQ ID NO: 66400 - DNA, 1302 bp, Brassica napus
  CDS (1)..(1302)
atggcccgttgtcatggaagtcttgctattttcttatgcgttcttttgatgctcgcttgctgccaagctttgagtagcaacgtagatgatggatatggtcatgaagatggaagcttcgaaaccgatagtttaatcaagctcaacaacgacgacgacgttcttaccttgaaaagctccgatagacccactaccgaatcatcaactgttagtgtttcgaacttcggagcaaaaggtgatggaaaaaccgatgatactcaggctttcaagaaagcatggaagaaggcatgttcaacaaatggagtgactactttcttgattcctaaagggaagacttatctccttaagtctattagattcagaggcccatgcaaatcattacgtagcttccagatcctaggcactttatcagcttctacaaaacgatcggattacagtaatgacaagaaccactggcttattttggaggacgttaataatctatcaatcgatggcggctcggcggggattgttgatggcaacggaaaaatctggtggcaaaactcatgcaaaatcgacaaatctaagccatgcacaaaagcgccaacggctcttactctctacaacctaaacaatttgaatgtgaagaatctgagagtgagaaatgcacagcagattcagatttcgattgagaaatgcaacaatgttgatgttaagaatgttaagatcactgctcctggcgatagtcccaacacggatggtattcatatcgttgctactaaaaacattcgaatctccaattcagacattgggacaggtgatgattgcatatccattgaggatggatcgcaaaatgttcaaatcaatgatttaacttgcggccccggtcatggcatcagcattggaagcttgggggatgacaattccaaagcttatgtatcgggaattaatgtggatggtgctacgctctctgagactgacaatggagtaagaatcaagacttaccagggagggtcaggaactgctaagaacattaaattccaaaacattcgtatggataatgtcaagaatccgatcataatcgaccagaactactgcgacaaggacaaatgcgaacaacaagaatctgcggttcaagtgaacaatgtcgtgtatcggaacatacaaggtacgagcgcaacggatgtggcgataatgtttaattgcagtgtgaaatatccatgccaaggtattgtgcttgagaatgtgaacatcaaaggaggaaaagcttcttgcaaaaatgtcaatgttaaggataaaggcaccgtttctcctaaatgcccttaa

SEQ ID NO: 66401 - protein, 433 aa, Brassica napus
MARCHGSLAIFLCVLLMLACCQALSSNVDDGYGHEDGSFETDSLIKLNNDDDVLTLKSSDRPTTESSTVSVSNFGAKGDGKTDDTQAFKKAWKKACSTNGVTTFLIPKGKTYLLKSIRFRGPCKSLRSFQILGTLSASTKRSDYSNDKNHWLILEDVNNLSIDGGSAGIVDGNGKIWWQNSCKIDKSKPCTKAPTALTLYNLNNLNVKNLRVRNAQQIQISIEKCNNVDVKNVKITAPGDSPNTDGIHIVATKNIRISNSDIGTGDDCISIEDGSQNVQINDLTCGPGHGISIGSLGDDNSKAYVSGINVDGATLSETDNGVRIKTYQGGSGTAKNIKFQNIRMDNVKNPIIIDQNYCDKDKCEQQESAVQVNNVVYRNIQGTSATDVAIMFNCSVKYPCQGIVLENVNIKGGKASCKNVNVKDKGTVSPKCP

SEQ ID NO: 66402 - DNA, 1263 bp, Brassica napus
  CDS (1)..(1263)
atggctggcgcaagaagtttggtcaaggcaaatcatactaatgtaggctcattaattttaatggccttggtgtttggttcttgcgtagctaatggtgagtatctcagtgaccgccgtggtcttgtcgctgttgccggcaaccctacggtctttgatattactaagtttggagcagtgggaaatggtgccaccaattctttcaaggcgtttttaaatgcatggctccaagtgtgtgccagtcctgtaccagcaacgctactagtccctaaaggagagttcttgactggtccagtaatttttgctggtccatgcaaaagcaaagtgaccatcgaagttcaaggcacaatcaccgctacaccaagcggatacgcgacccctgaatggttcttattcgagcatgtcgacaatgtcctcctcaccggacccggcacattccacggcaaaggtgaagccgtatggaaagcagatggctgtggcaaaaaggtcgactgcaatcttcctccaacgtctctaaaattcagaaacatcttaaatcttgaaattgccggcattagctcggtcaacgcgaaggccttccacatgttcttggtgaaaactacaaatgtcaacattcacaacatcaacattattgcccctgctgaaagtcccaacaccgatggtatccatttgagcaatgcggtcaacgttaacatcgttcagagtacaataggaacaggagacgattgtatctctgtcggtcgtggttccaccaatgtaacagtcgaacacgtgacttgtggcccaggacacggactaagtgttggtagtctcggaaagtacccgcacgaggaggatgttagcggcattcactttaagagctgcacgatgaaaggtaccgacaacggtctaagaatcaagagttggggtggttcgtctccaagcaaggctgtggacattaagtttgaagatattacaatggaaagcgtcaagaacccaatcatcattgaccaaaactacggctcaagaggcggagattcaaaggttgcgataagcgatgtgttgttcaagaacgtaagaggaacaacaattactaaagatgaagtccagatcatgtgcagcaaatcagtaccatgcacaggagtcagcgtcattgacgtgaacttgaacttcgtaggtgataaaggaggacatccttcggcgtcaggaggcttgatcggagctctttgcaccaacgccaatgttatcttcggtggaaagcttagcttccctatgtgtcccaaataa

SEQ ID NO: 66403 - protein, 420 aa, Brassica napus
MAGARSLVKANHTNVGSLILMALVFGSCVANGEYLSDRRGLVAVAGNPTVFDITKFGAVGNGATNSFKAFLNAWLQVCASPVPATLLVPKGEFLTGPVIFAGPCKSKVTIEVQGTITATPSGYATPEWFLFEHVDNVLLTGPGTFHGKGEAVWKADGCGKKVDCNLPPTSLKFRNILNLEIAGISSVNAKAFHMFLVKTTNVNIHNINIIAPAESPNTDGIHLSNAVNVNIVQSTIGTGDDCISVGRGSTNVTVEHVTCGPGHGLSVGSLGKYPHEEDVSGIHFKSCTMKGTDNGLRIKSWGGSSPSKAVDIKFEDITMESVKNPIIIDQNYGSRGGDSKVAISDVLFKNVRGTTITKDEVQIMCSKSVPCTGVSVIDVNLNFVGDKGGHPSASGGLIGALCTNANVIFGGKLSFPMCPK

SEQ ID NO: 66404 - DNA, 1209 bp, Glycine max
  CDS (1)..(1209)
atgaagttcctatttgctgtgctagcaatttttgttgttgctttaccttgtgcgtggactaaactggagcttgatgcaggtcctagcttcaatgttatcgattatggtgccacgggcaatggtcaaactgatgattcccaagcttttctgaaagcatggaaagacgcgtgtaatgcaagttatggcaccgcaacacttctcatacccaaagagaaaactttcatgttacaaccggtgttgttccgtggtccttgcaagcctccaaccgttcacattaagctcaagggaaccatcattgccccaaacaagattgaggcttggaaattgccaaaaagtacaaggatggcatggattcgttttaggcacataagtggtcttgttatccgtggagggggatggggactaattgatggtcaagggtctccatggtggaattcttatttcaataccgaaattaagaggccaactgctttacattttcgtgaatgtgactatctatttcttagtggattgactcacattaacagtcccaaaaatcatataagcataaatagatgcaacaactcactcatctccaaaattcatatgattgccccagacgaaagcccaaacactgatgggattgatatctcacagtcatccaacattgtcataaagaattctaagatggaaactggtgatgattgcattgccattaaccatggatccaccttcatcagcataattggtgtcttttgtggaccaggccatggcatcagtattgggagcttaggaaaaaatggagcccatcaaacagtggaagaaatatatgtacgaaattgcaccttcaatagaacaacaaatggagctagaatcaaaacatggataggaggtcaagggtatgcaaggaagatcacttttaaggatattatacttatggaagctacaaatcctgtgattattgatcaacaatacaacccatatgacaatgtaggtggagtgagagtgagtgatgttagttaccacaatgtgaggggaacctcaagttccatgcatgcaatcaaactgcattgtgacaaaagcgtaggttgcaccaacattgaattgaaagggattaacataactaccattactggaaagaaaacttatgcatcatgcaaaaatgtaaaaggggtgtgctctttttgtaatccacatgtgtcatgtctttctcataaaggatcaaattag

SEQ ID NO: 66405 - protein, 402 aa, Glycine max
MKFLFAVLAIFVVALPCAWTKLELDAGPSFNVIDYGATGNGQTDDSQAFLKAWKDACNASYGTATLLIPKEKTFMLQPVLFRGPCKPPTVHIKLKGTIIAPNKIEAWKLPKSTRMAWIRFRHISGLVIRGGGWGLIDGQGSPWWNSYFNTEIKRPTALHFRECDYLFLSGLTHINSPKNHISINRCNNSLISKIHMIAPDESPNTDGIDISQSSNIVIKNSKMETGDDCIAINHGSTFISIIGVFCGPGHGISIGSLGKNGAHQTVEEIYVRNCTFNRTTNGARIKTWIGGQGYARKITFKDIILMEATNPVIIDQQYNPYDNVGGVRVSDVSYHNVRGTSSSMHAIKLHCDKSVGCTNIELKGINITTITGKKTYASCKNVKGVCSFCNPHVSCLSHKGSN

SEQ ID NO: 66406 - DNA, 1233 bp, Zea mays
  CDS (1)..(1233)
atggcgtgcacagacaatgcgatgagagccttgttcctcctggtcctcttctgcatcgtgcatggtgagaaggaagagtcaaagggcatcgatgcgaaagcgtccgggcctggtgggtccttcgacatcaccaagttgggcgcctccggcaatggcaagacagacagcacgaaggctgtgcaggaggcatgggcatcggcgtgcggcggcactgggaagcagacaatcctcatacccaagggcgacttccttgtcggacaactcaacttcacaggcccttgcaagggcgacgtgaccatccaggtggatggcaatctgctggcgaccacggacctaagccagtacaaggaacatggtaattggatcgagattctacgcgtggataacctggtcatcaccggcaagggaaaccttgacgggcagggcccagccgtgtggagcaagaactcctgcaccaagaagtacgactgcaagatccttcccaactcgctggtgatggacttcgtgaacaacggggaggtgtccgggatcacgctgctcaactccaagttcttccacatgaacatgtaccagtgcaagaacatgctgatcaaggacgtgaccgtgacggcgcccggggacagccccaacacggatggcatccacatgggcgactcatccgggatcaccatcaccaacaccgtcattggcgtcggcgacgactgcatctccatcggccctgggacctccaaggtgaacatcactggcgtgacctgcggccccggccacggcatcagcatcggcagcctagggcggtacaaggacgagaaggacgtcacggacatcaacgtcaaggattgcactcttaagaagacaatgttcggcgtccgcatcaaggcgtacgaggacgccgcctccgtgctcaccgtctccaagatccactacgagaatatcaagatggaggactcagccaaccccatcttcatcgacatgaagtactgccccaacaagttgtgtactgccaacggcgcctccaaggtcaccgtcaaggacatcaccttcaagaacatcactggcacctcctccaccccggaggccattagcctgctctgcactgccaaggtcccatgcaccggcgtcaccatggatgacgtcaacgtcgagtatagtggcaccaacaacaagaccatggctatatgcacgaacgccaagggcagcaccaagggttgcctcaaggagcttgcatgcttctag

SEQ ID NO: 66407 - protein, 410 aa, Zea mays
MACTDNAMRALFLLVLFCIVHGEKEESKGIDAKASGPGGSFDITKLGASGNGKTDSTKAVQEAWASACGGTGKQTILIPKGDFLVGQLNFTGPCKGDVTIQVDGNLLATTDLSQYKEHGNWIEILRVDNLVITGKGNLDGQGPAVWSKNSCTKKYDCKILPNSLVMDFVNNGEVSGITLLNSKFFHMNMYQCKNMLIKDVTVTAPGDSPNTDGIHMGDSSGITITNTVIGVGDDCISIGPGTSKVNITGVTCGPGHGISIGSLGRYKDEKDVTDINVKDCTLKKTMFGVRIKAYEDAASVLTVSKIHYENIKMEDSANPIFIDMKYCPNKLCTANGASKVTVKDITFKNITGTSSTPEAISLLCTAKVPCTGVTMDDVNVEYSGTNNKTMAICTNAKGSTKGCLKELACF

SEQ ID NO: 66408 - DNA, 1233 bp, Zea mays
  CDS (1)..(1233)
atggcgtgcacaaacaatgcgatgagagccttgttcctcctggtcctcttctgcatcgtgcatggtgagaaggaagagtcaaagggcatcgatgcgaaagcgtccgggcctggtgggtccttcgacatcaccaagttgggcgcctccggcaatggcaagacagacagcacgaaggctgtgcaggaggcatgggcatcggcgtgcggcggcactgggaagcagacaatcctcatacccaagggtgacttccttgtcggacaactcaacttcacaggcccttgcaagggcgacgtgaccatccaggtggatggcaatctgctggcgaccacggacctaagccagtacaaggaccatggtaattggatcgagattctacgtgtggataacctggtcatcaccggcaagggaaaccttgacgggcagggcccagccgtgtggagcaagaactcctgcaccaagaagtacgactgcaagatccttcccaactcgctggtgatggacttcgtgaacaacggggaggtgtccggggtcacgctgctcaactccaagttcttccacatgaacatgtaccggtgcaaggacatgctgatcaaggacgtgaccgtgacggcgcccggggacagccccaacacggatggcatccacatgggcgactcatccgggatcacgatcaccaacaccgtcattggcgtcggcgacgactgcatctccatcggccccgggacctccaaggtgaacatcaccggcgtgacctgcggccctggccacggcatcagcatcggcagcctagggcggtacaaggacgagaaggacgtcacggacatcaacgtcaaggattgcactcttaagaagacgatgttcggcgtccgcatcaaggcgtacgaggacgccgcctccgtgctcaccgtctccaagatccactacgagaatatcaagatggaggactcagccaaccccatcttcatcgacatgaagtactgccccaacaagttgtgtactgccaacggcgcctccaaggtcaccgtcaaggatgtcaccttcaagaacatcaccggcacctcctccaccccggaggccgttagcctgctctgcactgccaaggtcccatgcaccggcgtcaccatggatgacgtcaacgtcgagtatagcggcaccaacaacaagaccatggctatatgcacgaacgccaagggcagcaccaagggttgcctcaaggagcttgcatgcttctag

SEQ ID NO: 66409 - protein, 410 aa, Zea mays
MACTNNAMRALFLLVLFCIVHGEKEESKGIDAKASGPGGSFDITKLGASGNGKTDSTKAVQEAWASACGGTGKQTILIPKGDFLVGQLNFTGPCKGDVTIQVDGNLLATTDLSQYKDHGNWIEILRVDNLVITGKGNLDGQGPAVWSKNSCTKKYDCKILPNSLVMDFVNNGEVSGVTLLNSKFFHMNMYRCKDMLIKDVTVTAPGDSPNTDGIHMGDSSGITITNTVIGVGDDCISIGPGTSKVNITGVTCGPGHGISIGSLGRYKDEKDVTDINVKDCTLKKTMFGVRIKAYEDAASVLTVSKIHYENIKMEDSANPIFIDMKYCPNKLCTANGASKVTVKDVTFKNITGTSSTPEAVSLLCTAKVPCTGVTMDDVNVEYSGTNNKTMAICTNAKGSTKGCLKELACF

SEQ ID NO: 66410 - DNA, 1257 bp, Zea mays
  CDS (1)..(1257)
atggcgttcatcagcagtgcggcgatgaaggcagccgtggccgctctgctggtgttcgccgcggtgtcgcctgccgcgcgcgcggtggcggcggaggcggaggcgaaggcgaaggctgtgggaggcgcgccgtcggtgcccgctggctcgctggacatcgcgcagctgggcgccaagggcgacggcaagtcggacagcaccccgatggtgctcaaggcgtggaagcacgcgtgcgaggcgacggggcagcagaagatcgtcatccccaagggcaactacctgacgggcgcgctggacctggtgggcccctgcaagtcctccatcatcatccgcctcgacggcaacctgctcggcaccggcgacctcaacgcgtacaagaggaactggatcgagatccagaacgtcgacaacctgtccatcaacggccacggcaccatcgacgggcagggagccctggtgtggaacaagaacgagtgccagcgttcctacaactgcaaaatcctccccaacagcctggtgctggacttcgtgacgaacgcccagatccgcggcatcacgctgctgaacagcaagttcttccacatgaacatcttcgggagcaagaacgtggtgatcgacaaggtgacgatcaaggcccccggcaacagccccaacacggacggcagccacatcggcgactcgagcaacgtgaccatcagcggcaccaccatcgccgtcggcgacgactgcgtctccatcggccccgggagcaagaccatccgcgtgaagggcgtcaagtgcggaccgggccacggcatcagcgtcggcagcctggggcggtacaaggacgagaaggacgtggaggacgtgaaggtgacggggtgcacgctcgccggcaccaccaacggcctgcgcatcaagtcgtacgaggactccaagtcgtcgctcaaggccaccaagttcctgtaccaggacgtcaccatggacaacgtctcctaccccatcatcatagaccagaagtactgccccaacaacatctgcgtcaagtccggcgcctccaaggtggccgtcaacgacgtcgtcttcaagaacatccacggcacctccaacacgccggaggccatcacgctcaactgcgccaacaacctgccctgccagggcgtgcagctcatcaacgtcgacatcaagtacaacaggtccgacaacaagaccatgtccgtctgcaagaacgccatcggcaagtccattggcatggcgaaggagctcgcctgcgtctga

SEQ ID NO: 66411 - protein, 418 aa, Zea mays
MAFISSAAMKAAVAALLVFAAVSPAARAVAAEAEAKAKAVGGAPSVPAGSLDIAQLGAKGDGKSDSTPMVLKAWKHACEATGQQKIVIPKGNYLTGALDLVGPCKSSIIIRLDGNLLGTGDLNAYKRNWIEIQNVDNLSINGHGTIDGQGALVWNKNECQRSYNCKILPNSLVLDFVTNAQIRGITLLNSKFFHMNIFGSKNVVIDKVTIKAPGNSPNTDGSHIGDSSNVTISGTTIAVGDDCVSIGPGSKTIRVKGVKCGPGHGISVGSLGRYKDEKDVEDVKVTGCTLAGTTNGLRIKSYEDSKSSLKATKFLYQDVTMDNVSYPIIIDQKYCPNNICVKSGASKVAVNDVVFKNIHGTSNTPEAITLNCANNLPCQGVQLINVDIKYNRSDNKTMSVCKNAIGKSIGMAKELACV

SEQ ID NO: 66412 - DNA, 1233 bp, Zea mays
  CDS (1)..(1233)
atggcgtgtatagacaatgcaatgagagccttgttccttttagcgctcttctgtgtcgtgcatggtgagaaggcaaagtcaaaggacaacgatgcaaaagcgtccgggcccggtgggtccttcgacatcaccaagttgggcgcctccggcaatggcaagacggatagcacgaaggctgtgcaggaggcgtgggcatcggcgtgcggcggcaccgggaagcagacgatcctcatccccaagggcgacttcctcgtcggaccactcaacttcacaggcccatgcaagggcgacgtgaccatccaggtgaatggcaatctgctggcgaccacggacctaagccagtacaaggatcatggtaattggatcgagattctacgcgtggacaaccttgtcatcaccggcaagggaaagctcgacgggcaggggccagccgtgtggagcaagaactcctgcgtcaagaagtacgactgcaagatccttcccaactcgctggtgatggacttcgtgaacaacggggaggtgtccgggatcacgctgctcaactccaagttcttccacatgaacatgtacaagtgcaaggacatgctgatcaaggacgtcaatgtgacggcgcccggggacagccccaacacggacggcatccacatgggcgactcgtccggggtcaccatcaccaacaccgtcatcggcgtcggcgacgactgcatctccatcggccccgggacctccaaggtgaacatcaccggcgtgacctgcggccccggccacggcatcagcatcggcagcctagggcggtacaaggacgagaaggacgtcacggatatcaacgtcaaggactgcacgcttaagaagacggccaacggcgtccgcatcaaggcgtatgaggacgccgcctccgtgctcaccgcctccaagatccactatgagaatatcaagatggaggactcgggctaccccatcatcatcgacatgaagtactgccccaacaagttatgcaccgccaatggtgcctccaaggtcaccgtcaaggacgtcaccttcaagaacatcaccggcacctcctccaccccggaggccgtcaacctgctctgctccgccaagatcccatgcaccggcgtcaccatggacgacgtcaacatcaagtacagtggcaccaacaacaagaccatggccgtatgcaagaacgctaagggcagcgccaagggttgcctcaaggagctcgcatgcttctag

SEQ ID NO: 66413 - protein, 410 aa, Zea mays
MACIDNAMRALFLLALFCVVHGEKAKSKDNDAKASGPGGSFDITKLGASGNGKTDSTKAVQEAWASACGGTGKQTILIPKGDFLVGPLNFTGPCKGDVTIQVNGNLLATTDLSQYKDHGNWIEILRVDNLVITGKGKLDGQGPAVWSKNSCVKKYDCKILPNSLVMDFVNNGEVSGITLLNSKFFHMNMYKCKDMLIKDVNVTAPGDSPNTDGIHMGDSSGVTITNTVIGVGDDCISIGPGTSKVNITGVTCGPGHGISIGSLGRYKDEKDVTDINVKDCTLKKTANGVRIKAYEDAASVLTASKIHYENIKMEDSGYPIIIDMKYCPNKLCTANGASKVTVKDVTFKNITGTSSTPEAVNLLCSAKIPCTGVTMDDVNIKYSGTNNKTMAVCKNAKGSAKGCLKELACF

SEQ ID NO: 66414 - DNA, 28 bp, Artificial sequence
  primer
atgatttctgctaattcattacttattt

SEQ ID NO: 66415 - DNA, 24 bp, Artificial sequence
  primer
ttaacagcttgcaccagatccaga

SEQ ID NO: 66416 - protein, 375 aa, Artificial sequence
  consensus sequence
  Variant (2)..(8): Xaa in position 2 to 8 is any amino acid
  Variant (9)..(10): Xaa in position 9 to 10 is any or no amino acid
  Variant (12)..(14): Xaa in position 12 to 14 is any amino acid
  Variant (16)..(28): Xaa in position 16 to 28 is any amino acid
  Variant (29)..(29): Xaa in position 29 is any or no amino acid
  Variant (31)..(45): Xaa in position 31 to 45 is any amino acid
  Variant (46)..(73): Xaa in position 46 to 73 is any or no amino acid
  Variant (75)..(76): Xaa in position 75 to 76 is any amino acid
  Variant (77)..(77): Xaa in position 77 is any or no amino acid
  Variant (80)..(85): Xaa in position 80 to 85 is any amino acid
  Variant (86)..(94): Xaa in position 86 to 94 is any or no amino acid
  Variant (96)..(113): Xaa in position 96 to 113 is any amino acid
  Variant (114)..(116): Xaa in position 114 to 116 is any or no amino acid
  Variant (118)..(145): Xaa in position 118 to 145 is any amino acid
  Variant (146)..(157): Xaa in position 146 to 157 is any or no amino acid
  Variant (161)..(170): Xaa in position 161 to 170 is any amino acid
  Variant (171)..(171): Xaa in position 171 is any or no amino acid
  Variant (173)..(180): Xaa in position 173 to 180 is any amino acid
  Variant (184)..(188): Xaa in position 184 to 188 is any amino acid
  Variant (190)..(198): Xaa in position 190 to 198 is any amino acid
  Variant (199)..(199): Xaa in position 199 is any or no amino acid
  Variant (201)..(202): Xaa in position 201 to 202 is any amino acid
  Variant (206)..(206): Xaa in position 206 is any amino acid
  Variant (211)..(211): Xaa in position 211 is any amino acid
  Variant (213)..(217): Xaa in position 213 to 217 is any amino acid
  Variant (218)..(222): Xaa in position 218 to 222 is any or no amino acid
  Variant (224)..(235): Xaa in position 224 to 235 is any amino acid
  Variant (236)..(237): Xaa in position 236 to 237 is any or no amino acid
  Variant (240)..(240): Xaa in position 240 is any amino acid
  Variant (244)..(248): Xaa in position 244 to 248 is any amino acid
  Variant (249)..(249): Xaa in position 249 is any or no amino acid
  Variant (251)..(259): Xaa in position 251 to 259 is any amino acid
  Variant (260)..(261): Xaa in position 260 to 261 is any or no amino acid
  Variant (263)..(274): Xaa in position 263 to 274 is any amino acid
  Variant (275)..(275): Xaa in position 275 is any or no amino acid
  Variant (277)..(277): Xaa in position 277 is any amino acid
  Variant (279)..(286): Xaa in position 279 to 286 is any amino acid
  Variant (287)..(309): Xaa in position 287 to 309 is any or no amino acid
  Variant (311)..(319): Xaa in position 311 to 319 is any amino acid
  Variant (320)..(321): Xaa in position 320 to 321 is any or no amino acid
  Variant (323)..(333): Xaa in position 323 to 333 is any amino acid
  Variant (334)..(336): Xaa in position 334 to 336 is any or no amino acid
  Variant (338)..(339): Xaa in position 338 to 339 is any amino acid
  Variant (340)..(342): Xaa in position 340 to 342 is any or no amino acid
  Variant (344)..(359): Xaa in position 344 to 359 is any amino acid
  Variant (360)..(374): Xaa in position 360 to 374 is any or no amino acid
LXXXXXXXXXGXXXFXXXXXXXXXXXXXXGXXXXXXXXXXXXXXXXXXXXXXXXXXXXXXXXXXXXXXXXXXXGXXXWWXXXXXXXXXXXXXXXPXXXXXXXXXXXXXXXXXXXXXNXXXXXXXXXXXXXXXXXXXXXXXXXXXXXXXXXXXXXXXXNTDXXXXXXXXXXXIXXXXXXXXDDCXXXXXGXXXXXXXXXXCXXGHGXSIGSXGXXXXXXXXXXVXXXXXXXXXXXXXXNGXRIKXXXXXXGXXXXXXXXXXXIXXXXXXXXXXXXXQXYXXXXXXXXXXXXXXXXXXXXXXXXXXXXXXXVXXXXXXXXXXXGXXXXXXXXXXXXXXCXXXXXCXXXXXXXXXXXXXXXXXXXXXXXXXXXXXXXC

SEQ ID NO: 66417 - protein, 20 aa, Artificial sequence
  protein pattern
  Variant (2)..(9): Xaa in position 2 to 9 is any amino acid
  Variant (10)..(10): Xaa in position 10 is any or no amino acid
  Variant (14)..(14): Xaa in position 14 is Ile, Leu or Val
  Variant (15)..(15): Xaa in position 15 is Ala or Ser
  Variant (16)..(16): Xaa in position 16 is Ile or Val
  Variant (17)..(17): Xaa in position 17 is Glu, Gly or Asn
  Variant (18)..(18): Xaa in position 18 is any amino acid
  Variant (20)..(20): Xaa in position 20 is Asp, Glu, Asn, Ser or Thr
IXXXXXXXXXDDCXXXXXGX

SEQ ID NO: 66418 - protein, 14 aa, Artificial sequence
  protein pattern
  Variant (2)..(5): Xaa in position 2 to 5 is any or no amino acid
  Variant (8)..(8): Xaa in position 8 is Ala or Gly
  Variant (9)..(9): Xaa in position 9 is Phe or Ile
  Variant (10)..(10): Xaa in position 10 is Asp or His
  Variant (11)..(11): Xaa in position 11 is Ile or Val
  Variant (12)..(12): Xaa in position 12 is Ala, Gly, Asn, Ser, Thr or Val
  Variant (13)..(13): Xaa in position 13 is any amino acid
  Variant (14)..(14): Xaa in position 14 is Asp, Ser, Thr or Val
NXXXXTDXXXXXXX

SEQ ID NO: 66419 - DNA, 1356 bp, Saccharomyces cerevisiae
  CDS (1)..(1356)
atgttgaggacgaggcttactaattgcagtctatggaggccctactacacgtcatcgcttagtagagtaccaagagcacctccagataaagtcttggggttatctgaacacttcaaaaaggtaaaaaatgttaacaaaattgacctgaccgtaggaatatataaagatggttggggcaaagtgacgacgtttccctccgttgcaaaagctcaaaaattgattgaatctcatttagagttgaataagaatctttcatatttaccaataacaggttccaaagaatttcaggaaaacgttatgaaatttttgttcaaggaatcatgtccgcagtttgggccattttatttagcccatgatagaatcagctttgttcagactttgagtggtacaggcgccctagctgtagcagctaaattcttggcattatttatttcaagagatatttggatacctgacccatcatgggcaaatcataagaacatttttcagaacaatggttttgaaaatatttaccggtattcctattataaggacggtcagatagacatcgacggatggattgagcaattgaaaacctttgcatataacaaccagcaagaaaacaataagaacccaccttgcataatcttgcatgcgtgttgtcacaaccctacaggtctcgacccaactaaagagcaatgggaaaagattatagatactatatatgagctaaaaatggtacccattgttgatatggcttatcagggtttagagtctggtaacttactaaaggacgcatatttattgaggctatgtctcaatgtaaataaatatccaaattggagtaacggtatctttctttgtcaatcttttgccaagaacatgggcctttatggtgaacgagttggttccttaagcgttatcacgccggcaactgcgaacaatggaaagttcaaccctctacaacagaaaaactcattgcagcaaaatattgactcccaattaaaaaagattgtcagaggtatgtattcttctccaccaggatacggttctcgtgtggtaaatgtagtattatcagatttcaaattgaaacagcaatggttcaaggatgttgatttcatggttcagagattgcatcacgtcagacaggagatgtttgaccgtctagggtggccggatcttgtaaatttcgcacaacagcacggtatgttttactatacaaggtttagtccaaagcaagtcgaaatattgagaaacaattacttcgtctatttaacaggtgatggtagattgtcgcttagcggagtcaatgattcgaacgttgattacttatgtgaatctcttgaagcagtctcgaaaatggacaaactcgcataa

SEQ ID NO: 66420 - protein, 451 aa, Saccharomyces cerevisiae
MLRTRLTNCSLWRPYYTSSLSRVPRAPPDKVLGLSEHFKKVKNVNKIDLTVGIYKDGWGKVTTFPSVAKAQKLIESHLELNKNLSYLPITGSKEFQENVMKFLFKESCPQFGPFYLAHDRISFVQTLSGTGALAVAAKFLALFISRDIWIPDPSWANHKNIFQNNGFENIYRYSYYKDGQIDIDGWIEQLKTFAYNNQQENNKNPPCIILHACCHNPTGLDPTKEQWEKIIDTIYELKMVPIVDMAYQGLESGNLLKDAYLLRLCLNVNKYPNWSNGIFLCQSFAKNMGLYGERVGSLSVITPATANNGKFNPLQQKNSLQQNIDSQLKKIVRGMYSSPPGYGSRVVNVVLSDFKLKQQWFKDVDFMVQRLHHVRQEMFDRLGWPDLVNFAQQHGMFYYTRFSPKQVEILRNNYFVYLTGDGRLSLSGVNDSNVDYLCESLEAVSKMDKLA

SEQ ID NO: 66421 - DNA, 1389 bp, Arabidopsis thaliana
  CDS (1)..(1389)
atggcttctttaatgttatctctcggttccacttctctgttaccgcgcgagattaacaaggataagctaaagcttggaacttctgcttcgaacccgttcctaaaagcaaagtcttttagcagagtgactatgacggttgcagtgaagccttctcgtttcgagggtataactatggctccaccagaccctattcttggagtcagtgaagcattcaaagctgacactaacgggatgaaactcaatcttggtgttggtgcttatcgtactgaggaactccagccttatgtgcttaatgttgttaaaaaggcggagaatttgatgttggagagaggagataacaaagagtatcttccaattgaggggttggcagcattcaacaaggctactgctgagttgctatttggagctggtcatcctgttattaaggaacaaagagtagcaacaattcagggtctttcgggaacaggttcactgcgattagcagcggctcttatagagcgttatttccctggagcaaaagttgtgatctcatcaccaacctggggtaatcacaagaatatcttcaatgatgccaaagttccgtggtccgaataccgctactatgatccaaaaacaattggtttggattttgagggaatgatagcagatataaaggaagctccagaaggatccttcatcttgcttcacggatgtgctcacaacccaactggaattgacccaacaccagaacagtgggtaaaaattgctgatgtcattcaggaaaagaaccatatcccatttttcgatgttgcataccagggctttgctagtggaagccttgatgaagatgcagcatctgtgagattatttgctgagcggggaatggagttttttgttgctcagtcatatagtaaaaatttaggtttgtatgcagaaagaattggggcaatcaatgtcgtgtgctcctcagctgatgctgctacaagggtcaagagccagttgaaaaggattgctcggcctatgtactcgaatccaccagttcatggggcgagaatcgtggccaatgtagtgggtgatgtaactatgttcagtgaatggaaagcagagatggaaatgatggcaggaagaataaagacggttagacaagagctgtatgatagcctcgtttcaaaagacaagagcgggaaggactggtccttcattctgaagcaaattggcatgttctctttcaccggcctaaacaaagctcagagcgataacatgacggacaaatggcatgtgtatatgactaaagacgggaggatatcattggccggattatctctggccaaatgcgagtatcttgctgatgcgatcatcgactcataccataacgccttgttgtattgggagactcccatcgagttatag

SEQ ID NO: 66422 - protein, 462 aa, Arabidopsis thaliana
MASLMLSLGSTSLLPREINKDKLKLGTSASNPFLKAKSFSRVTMTVAVKPSRFEGITMAPPDPILGVSEAFKADTNGMKLNLGVGAYRTEELQPYVLNVVKKAENLMLERGDNKEYLPIEGLAAFNKATAELLFGAGHPVIKEQRVATIQGLSGTGSLRLAAALIERYFPGAKVVISSPTWGNHKNIFNDAKVPWSEYRYYDPKTIGLDFEGMIADIKEAPEGSFILLHGCAHNPTGIDPTPEQWVKIADVIQEKNHIPFFDVAYQGFASGSLDEDAASVRLFAERGMEFFVAQSYSKNLGLYAERIGAINVVCSSADAATRVKSQLKRIARPMYSNPPVHGARIVANVVGDVTMFSEWKAEMEMMAGRIKTVRQELYDSLVSKDKSGKDWSFILKQIGMFSFTGLNKAQSDNMTDKWHVYMTKDGRISLAGLSLAKCEYLADAIIDSYHNALLYWETPIEL

SEQ ID NO: 66423 - DNA, 1296 bp, Bombyx mori
  CDS (1)..(1296)
atggctcaagtgttaaagaaattaactacccaggtgctcaagcctaataatgtagacacgatcgttggttgtacaggccttagagccagcagcacctggtggaacaatgttcagatgggtccgccagatgtaatcttaggcattacagaagcatacaagaaggacacacatcctaaaaaagtaaatcttggtgttggagcatatagagatgatgagggaaaaccatttgttttgccttctgtcagaaaggcagaagaaattctccatagtagaggactcaatcatgagtatgctcccatcagtggtgaggccacatatactgatgctgtagctaaactggcttttggagaagacagccctgtcatcaaaaataagagcaactgtactgtacagacactgtccggcactggcgctctccgccttggactcgagttcataacgaaacactacgctaaggcaaaggagatctggctcccgacgcctacttggggaaaccacccgcaaatctgcaacaccctcaacttgccgcacaagaaataccgttacttcgatcccaagaccaatggtttcgatttgcagggagcactcgaggatatatcaaaaattcccgaaggttccattattctgttgcacgcgtgcgcacacaaccccaccggtgttgaccccaagcccagcgactgggaacaactttccaaggtgatcaaagaaaggaaattattcccgttcttcgacatggcgtatcaaggtttcgccaccggtgatgtcgacaatgacgctttcgcagtccgtctcttcgtcaaggaaggacaccaagtcatgttggcgcagagtttcgctaagaacatgggtctgtacggagagcgcgcgggcgccctgaccttcctgtgcggcgacgaggcgacggccgccaaggtgatgtcgcaggtcaagatcatggtccgcgtcatgtactccaaccctccgctgtacggcgcccgcctcgtgcaggagatactcaccaacgccgaactcaaaaagcaatggctcggagacgtaaagcagatggcggaccggatcatcacgatgcggagccagctccgcgccggcatcgagggcgccggcaacccgcacccctggcaacacatcaccgaccagatcggcatgttctgcttcaccggactcaagcccgagcaggtcgagcgtctgacgaaagagttccacgtgtacctgacgaaagacggacgcatttccgtcgccggcatctcctcgcaaaacgtgaactacatcgccgaggccatccacaaggtcacctcataa

SEQ ID NO: 66424 - protein, 431 aa, Bombyx mori
MAQVLKKLTTQVLKPNNVDTIVGCTGLRASSTWWNNVQMGPPDVILGITEAYKKDTHPKKVNLGVGAYRDDEGKPFVLPSVRKAEEILHSRGLNHEYAPISGEATYTDAVAKLAFGEDSPVIKNKSNCTVQTLSGTGALRLGLEFITKHYAKAKEIWLPTPTWGNHPQICNTLNLPHKKYRYFDPKTNGFDLQGALEDISKIPEGSIILLHACAHNPTGVDPKPSDWEQLSKVIKERKLFPFFDMAYQGFATGDVDNDAFAVRLFVKEGHQVMLAQSFAKNMGLYGERAGALTFLCGDEATAAKVMSQVKIMVRVMYSNPPLYGARLVQEILTNAELKKQWLGDVKQMADRIITMRSQLRAGIEGAGNPHPWQHITDQIGMFCFTGLKPEQVERLTKEFHVYLTKDGRISVAGISSQNVNYIAEAIHKVTS

SEQ ID NO: 66425 - DNA, 1383 bp, Oryza sativa (japonica cultivar-group)
  CDS (1)..(1383)
atgccatccgctaacgtgcgcggggcgcagcctagcgccgaccgcaggttaagtacgctggtgcgccacctactgccttcctccgcacgaacagcaaccaccaccagcacctcctcctccgccgccgacgccgactcctccctccaagctttccccaccatggcgtcgtcgtccgtcttcgctggcctcgcgcaggcgccggaggaccccatcctcggggtgacggtcgcgtacaacaaggatcccagccccgtgaaggtcaatctcggcgtcggcgcctaccggaccgaggaagggaagcccctggtgctgaatgtggtcaggcgcgctgagcagatgctgatcaacaacccgtcacgtgttaaggagtatttgccgatcactggactggccgatttcaataagctgagtgctaagcttatttttggtgctgacagtcctgccattcaagagaatagggtggctacagttcagtgcttgtcaggaactggttctttaagggtgggaggtgaatttcttgcaaggcattatcatgaacgcactatatacatcccacagccaacctgggggaatcaccccaaagtgttcactttagctggcctgactgttaggagttaccgctactatgatcctgcaacccgtggactggatttccaagggctgttagaagatctcggttcagctccttcaggtgcaattgtactgcttcatgcttgtgcccacaaccctactggagtagacccaactttggaccagtgggaacagatcaggcagttgatgagatcaaaagcattgctgccattctttgatagcgcttatcagggatttgcaagtggaagtcttgaccaagatgctcaatcagtgcgcatgtttgttgctgatggtggtgaattgctcatggctcagagctacgctaagaacatgggattgtatggagagcgtgtcggtgctttaagcatagtttgtggaagtgctgatgtagctgtcagggttgaaagtcaacttaagcttgtaattaggcctatgtattcaaaccctcctattcatggtgcatctatcgtggctaccatacttaaggacagtgcaatgttcaatgaatggactgtggagctgaagggcatggctgataggattattagcatgaggcaacagctttttgatgctctgaaaacgagagaaactcctggagactggagtcacatcattaagcagatcggaatgttcactttcactgggctcaacagtgatcaagtggctttcatgaggcaggaataccacatttacatgacatctgatgggaggatcagtatggctggtttgagcgggaggaccattccgcatcttgcagatgcaatccatgccgcagtcacaaaactgaagtga

SEQ ID NO: 66426 - protein, 460 aa, Oryza sativa (japonica cultivar-group)
MPSANVRGAQPSADRRLSTLVRHLLPSSARTATTTSTSSSAADADSSLQAFPTMASSSVFAGLAQAPEDPILGVTVAYNKDPSPVKVNLGVGAYRTEEGKPLVLNVVRRAEQMLINNPSRVKEYLPITGLADFNKLSAKLIFGADSPAIQENRVATVQCLSGTGSLRVGGEFLARHYHERTIYIPQPTWGNHPKVFTLAGLTVRSYRYYDPATRGLDFQGLLEDLGSAPSGAIVLLHACAHNPTGVDPTLDQWEQIRQLMRSKALLPFFDSAYQGFASGSLDQDAQSVRMFVADGGELLMAQSYAKNMGLYGERVGALSIVCGSADVAVRVESQLKLVIRPMYSNPPIHGASIVATILKDSAMFNEWTVELKGMADRIISMRQQLFDALKTRETPGDWSHIIKQIGMFTFTGLNSDQVAFMRQEYHIYMTSDGRISMAGLSGRTIPHLADAIHAAVTKLK

SEQ ID NO: 66427 - DNA, 1299 bp, Oryza sativa (japonica cultivar-group)
  CDS (1)..(1299)
atggcgatgtcgtcgtcccgctcggcggccgcgatccgggggcggcgggtcggggcgctggcgagggcgaggaggcacgcgacgagggcgatggcgtcgctgttcggccacgtcgagccggcttccaaggaccccatcctcggcgtcaccgaggccttcctcgccgacccctcccccgacaaagtcaacgtcggcgtcggcgcctaccgggacgacaacggcaagcccgtcgtgctcgagtgcgtgcgcgaggccgagcgccggatcgccggcaacctcaacatggagtaccttccaatgggaggaagtataaagatgattgaagagtcactaaagctggcatatggtgaggattctgatttcatcaaagataagaggattgctgcggtgcaggctctttcaggcacaggtgcatgccggctctttgccgatttccagaggcgtttcttgccaaattcacagatctacatacctacacctacatggtccaatcatcataacatttggagggatgctcaagtacctcaaaggacattcacctattaccatccagagtcaagagggcttgatttcgcaggactgatggatgatattaagaacgctccaaatggttcattctttttgcttcatgcttgtgcccataatcctactggagttgatcctacagaagaacaatggagagagatatcctaccaattcaagataaagaatcatttcccattctttgacatggcataccaaggatttgccagcggtgatccagagagagatgctaaggcaatccgaatcttccttgaagatgggcatcaaattggatgtgctcagtcatatgcaaagaacatgggactgtatgggcaaagggcagggtgcttgagtattctgtgtgaggatgagatgcaagcagtttctgttaagagccaattgcaacagattgcaaggccaatgtacagcaacccacctgttcatggtgcactggttgtctccataatccttaatgatccagaattaaagagtttatggttgaaagaggtcaagggtatggctgatcgaatcattggaatgcggaaggcactccgggaaaatctcgaaggcctaggttcaccattgtcatgggatcacatcaccaatcagattggaatgttctgctacagtgggatgacacctgaacaggtggatcgcttaaccaatgaataccatatttacatgacccgtaatggcagaataagcatggctggtgtaacaacaggaaatgtggcgtatttggctaatgctattcatgaggtcactaaaacgaaatga

SEQ ID NO: 66428 - protein, 432 aa, Oryza sativa (japonica cultivar-group)
MAMSSSRSAAAIRGRRVGALARARRHATRAMASLFGHVEPASKDPILGVTEAFLADPSPDKVNVGVGAYRDDNGKPVVLECVREAERRIAGNLNMEYLPMGGSIKMIEESLKLAYGEDSDFIKDKRIAAVQALSGTGACRLFADFQRRFLPNSQIYIPTPTWSNHHNIWRDAQVPQRTFTYYHPESRGLDFAGLMDDIKNAPNGSFFLLHACAHNPTGVDPTEEQWREISYQFKIKNHFPFFDMAYQGFASGDPERDAKAIRIFLEDGHQIGCAQSYAKNMGLYGQRAGCLSILCEDEMQAVSVKSQLQQIARPMYSNPPVHGALVVSIILNDPELKSLWLKEVKGMADRIIGMRKALRENLEGLGSPLSWDHITNQIGMFCYSGMTPEQVDRLTNEYHIYMTRNGRISMAGVTTGNVAYLANAIHEVTKTK

SEQ ID NO: 66429 - DNA, 1377 bp, Oryza sativa (japonica cultivar-group)
  CDS (1)..(1377)
atggcttccgcccccttcgccgtctcctcctcaccggcggcttccgccgtggccgcgcgctccaaggtgttgcgaggagggaggagcgaggcgaggactggatgccgcctggggatcacgaggaagaattttggacgtgtcatgatggcccttgcagtagatgtctctcgttttgaaggagtgccgatggcccctccagacccaattctcggggtttcagaagcatttaaggcagatcaaaatgatctgaagctcaaccttggtgttggtgcctatagaacagaagagttacagccttatgtcctcaatgtggtcaagaaggctgaaactcttatgttggagaaaggagaaaacaaggagtatctgccaattgaaggcttagctgcatttaacaaagcaactgcagaactattgtttggagctgataatccagtactcaagcaaggacgtgttgctactcttcagtctctctcaggaaccgggtcgctgcgccttgctgcagcatttatacaaagatatttccctgaagcaaaagtactgatatcatctcccacttggggcaatcacaagaacattttcaatgatgcaaaggtaccttggtcagagtaccgttattacgaccccaagactgttggcttggattttgagggaatgatagctgacatacaggctgccccagatggatcttttgttctgctgcatggttgcgctcacaacccaactggaatagacccaactccggaacaatgggagaaaattgcagatgtcattcaagagaagaaacacatgcctttctttgatgttgcatatcagggttttgccagtggaagccttgatgaagatgcatcttctgtcaggctttttgttcaacggggactggaagtgtttgttgcgcagtcttatagcaaaaaccttggtttatatgcagaaagaattggagcaataaatgttgtctgctcaacacctgaagtcgcaaacagggtgaagagccagctgaaacgattggcacggcccatgtattcgaatccccctattcatggtgctaggatagttgccaacgttgttggggatccaaccatgtttggtgaatggaaacaggagatggaagaaatggcagggcgtatcaagaatgtaagacagaagctttatgatagtttgtctgcaaaggacgacagtggcaaggactggtctttcattctgaggcagataggcatgttctcctacacgggcttgaacaaaactcagagtgataatatgaccgacaaatggcacatatacatgacaaaggatgggagaatttcgttggctggattgtccctggctaaatgcgagtacctagctgacgccatcatcgactccttccataacgttagctag

SEQ ID NO: 66430 - protein, 458 aa, Oryza sativa (japonica cultivar-group)
MASAPFAVSSSPAASAVAARSKVLRGGRSEARTGCRLGITRKNFGRVMMALAVDVSRFEGVPMAPPDPILGVSEAFKADQNDLKLNLGVGAYRTEELQPYVLNVVKKAETLMLEKGENKEYLPIEGLAAFNKATAELLFGADNPVLKQGRVATLQSLSGTGSLRLAAAFIQRYFPEAKVLISSPTWGNHKNIFNDAKVPWSEYRYYDPKTVGLDFEGMIADIQAAPDGSFVLLHGCAHNPTGIDPTPEQWEKIADVIQEKKHMPFFDVAYQGFASGSLDEDASSVRLFVQRGLEVFVAQSYSKNLGLYAERIGAINVVCSTPEVANRVKSQLKRLARPMYSNPPIHGARIVANVVGDPTMFGEWKQEMEEMAGRIKNVRQKLYDSLSAKDDSGKDWSFILRQIGMFSYTGLNKTQSDNMTDKWHIYMTKDGRISLAGLSLAKCEYLADAIIDSFHNVS

SEQ ID NO: 66431 - DNA, 1392 bp, Oryza sativa (japonica cultivar-group)
  CDS (1)..(1392)
atgcacacacgcagccgtcggcttggtttcccccccctgaatccaagtcacctcctcctcacacctcaccttccccctctctcctccgatcgcgcgcgcatggcgatgtcacgagccgccgccgctgccgcggggactcccgtggcgcggcggcgattgatgggggccgtggcggcgaggtcgatggcgtcgtggttcggccacgtggaaccggccgccaaggaccccatcctcggcgtcaccgaggcgttcctcgccgacccctccccggacaaagtcaacgtcggcgtcggcgcgtaccgggacgacagcgggaagcccgtggtgctggagtgcgtgcgcgaggcggagcggcggatcgccgggagcatgaacatggagtaccttccaatgggtggaagcataaagatgattgaagaatcacttaaactggcctatggggagaactgtgagttcatcaaggacaagaggatcgcagcagtgcaggctctttcaggaactggtgcatgtcgcctctttgcagatttccagaagcgtttcttgccagattcacagatttatatacccacacctacatgggccaaccatcacaatatttggagggatgcccaagtaccacaaaagacatttacctattaccatccagagtcaagaggacttgactttgcaggcctaatggatgatatcaagaatgctccagatggttcattctttttgcttcatgcttgtgcgcataatcccactggagtagatccttcagaagaacaatggagggagatatctcatcagttcaaggtgaagaaacattttccattcttcgacatggcataccaaggatttgctagtggtgatccagagagagatgccaaggcaattcgaatatttcttgaagatggacatcaaattggatgtgcacagtcatatgcgaaaaacatgggactttatggacaaagagcaggatgccttagtattctatgtgatgatgagatgcaagcagttgctgttaagagccagttacaacagattgctagacctttgtacagcaacccacccgttcatggtgcattaattgtttcaactattcttggtgatccggagttgaaaagtttatggctgaaagaggtcaagggtatggctgatcgtatcattggaatgcgaacagcactcaaagagaaccttgaaaagttgggttcaccaatgtcatgggaacatatcactaatcagattggaatgttctgctacagtggtatgacacctgaacaagtcgatcgcttgacaaaagagttccatatctacatgactcgtaacgggcggataagcatggctggagtaacaacaggaaatgttgcctatctggctaatgctattcatgaggttaccaagacaaagtga

SEQ ID NO: 66432 - protein, 463 aa, Oryza sativa (japonica cultivar-group)
MHTRSRRLGFPPLNPSHLLLTPHLPPLSSDRARMAMSRAAAAAAGTPVARRRLMGAVAARSMASWFGHVEPAAKDPILGVTEAFLADPSPDKVNVGVGAYRDDSGKPVVLECVREAERRIAGSMNMEYLPMGGSIKMIEESLKLAYGENCEFIKDKRIAAVQALSGTGACRLFADFQKRFLPDSQIYIPTPTWANHHNIWRDAQVPQKTFTYYHPESRGLDFAGLMDDIKNAPDGSFFLLHACAHNPTGVDPSEEQWREISHQFKVKKHFPFFDMAYQGFASGDPERDAKAIRIFLEDGHQIGCAQSYAKNMGLYGQRAGCLSILCDDEMQAVAVKSQLQQIARPLYSNPPVHGALIVSTILGDPELKSLWLKEVKGMADRIIGMRTALKENLEKLGSPMSWEHITNQIGMFCYSGMTPEQVDRLTKEFHIYMTRNGRISMAGVTTGNVAYLANAIHEVTKTK

SEQ ID NO: 66433 - DNA, 1194 bp, Neisseria meningitidis MC58
  CDS (1)..(1194): transl_table=11
atgttcttcaagcacatcgaagccgcccccgccgatccgattctcggtttgggcgaagcgttcaaagccgaaacccgccccgaaaaagtcaacctcggcatcggcgtttataaagacgcatccggcgcgacacccctcgtcaaagccgtcaaagaagccgaaaaacgcctgttggaaagcgaaaccaccaaaaactacctcaccatcgacggcgttgccgactacaacgcgcaaacccaaatcctgctgttcggcaaagaccacgaaatcatcgccagccgtcgcgccaaaacagcgcaaagcctcggcggtacgggcgcattgcgtattgcggccgagtttgccaaacgccagttgaacgcgcaaaccatctggatttccaatccgacttggcccaaccacaacgccatcgccaaagcggtcggtatccaagacaaaccttatcgttactatgatgccgccaaacacggtttggattgggacggcatgattgaggacttgagccaagcgcaaaaaggcgacatcgtcctgctgcacggctgctgccacaatcctaccggcatcgaccctacgcccgaacaatgggaaactttggcaaaactttctgccgaaaaaggctggttgccgctgtttgactttgcctaccaaggcttcggcaatggtttggaagaagatgcctacggcttgcgcgtgttcttgaaacacaatacagaattgctgattgccagctcttattccaaaaacttcggtatgtacaacgagcgcgtcggcgcgttcactttggtggccgaagatgaagaaacagcagcccgcgcccacagccaagtcaaaaccatcatccgtaccttgtattccaacccggcttcacacggtgcgaacaccattgcgctggtgttgaaaaatgatgatttgaaagcacaatggattgccgaactcgatgaaatgcgcggccgcatcaaagccatgcgccaaaaatttgtcgggttgctcaaagccaaaggtgcaagccaaaactttgatttcattatcaaacaaaacggtatgttctctttcagcggcttgactcccgaacaagtcgaccgcctgaaaaacgagtttgccatttatgccgtccgctccggccgcatcaacgtcgccggcattaccgacaacaacatcgattatctgtgcgaaagcatcgtgaaagtactgtaa

SEQ ID NO: 66434 - protein, 397 aa, Neisseria meningitidis MC58
MFFKHIEAAPADPILGLGEAFKAETRPEKVNLGIGVYKDASGATPLVKAVKEAEKRLLESETTKNYLTIDGVADYNAQTQILLFGKDHEIIASRRAKTAQSLGGTGALRIAAEFAKRQLNAQTIWISNPTWPNHNAIAKAVGIQDKPYRYYDAAKHGLDWDGMIEDLSQAQKGDIVLLHGCCHNPTGIDPTPEQWETLAKLSAEKGWLPLFDFAYQGFGNGLEEDAYGLRVFLKHNTELLIASSYSKNFGMYNERVGAFTLVAEDEETAARAHSQVKTIIRTLYSNPASHGANTIALVLKNDDLKAQWIAELDEMRGRIKAMRQKFVGLLKAKGASQNFDFIIKQNGMFSFSGLTPEQVDRLKNEFAIYAVRSGRINVAGITDNNIDYLCESIVKVL

SEQ ID NO: 66435 - DNA, 1194 bp, Neisseria meningitidis Z2491
  CDS (1)..(1194): transl_table=11
atgttcttcaagcacatcgaagccgcccccgccgatccgattctcggtttgggcgaagcattcaaagccgaaacccgccccgaaaaagtcaacctcggcatcggcgtgtacaaagacgcatccggcgcgacacctattgtcaaagccgtcaaagaagccgaaaaacgcctgttggaaagcgaaacaactaaaaactacctcaccatcgacggcgttgccgactacaacgagcaaacccaaattctgctgttcggcaaagaccacgaaatcatcgccagccgtcgcgccaaaacagcgcaaagccttggcggtacaggcgcattgcgtattgcggccgagtttgccaaacgtcagttgaacgcgcaaaccatctggatttccaatccgacttggcccaaccacaacgccatcgccaaagcggtcggtatccaagaccaaccttatcgctactatgatgccgccaaacacggtttggattgggacggtatgattgaagacttgagccaagcgcaaaaaggcgacatcgtcctgctgcacggctgctgccacaaccctaccggtatcgaccctacgcccgaacaatgggaaactctggcaaaactttctgccgaaaaaggctggttaccgctgtttgactttgcctaccaaggcttcggcaatggtttggaagaagatgcctacggcctgcgcgtgttcttgaaacacaatacagaattgctgattgccagctcttattccaaaaacttcggtatgtacaacgagcgcgtcggcgcgttcactttggtggccgaagatgaagcaaccgccgcccgcgcccacagccaagtcaaaaccattatccgtaccttgtattccaaccctgcttcacacggcgcgaacactattgcgctggtgttgaaaaatgatgatttgaaagcacaatggattgccgaactcgatgaaatgcgcggccgtatcaaagccatgcgccaaaaatttgtcgagttgctcaaagccaaaggtgcaactcaagactttgatttcattatcgaacaaaacggcatgttctccttcagcggcttgactcccgaacaagtcgaccgtttaaaaaacgagtttgccatttatgccgtccgctccggccgcatcaacgtcgccggcattaccgacgacaacatcgattatctgtgcgaaagtatcgtaaaagtactgtaa

SEQ ID NO: 66436 - protein, 397 aa, Neisseria meningitidis Z2491
MFFKHIEAAPADPILGLGEAFKAETRPEKVNLGIGVYKDASGATPIVKAVKEAEKRLLESETTKNYLTIDGVADYNEQTQILLFGKDHEIIASRRAKTAQSLGGTGALRIAAEFAKRQLNAQTIWISNPTWPNHNAIAKAVGIQDQPYRYYDAAKHGLDWDGMIEDLSQAQKGDIVLLHGCCHNPTGIDPTPEQWETLAKLSAEKGWLPLFDFAYQGFGNGLEEDAYGLRVFLKHNTELLIASSYSKNFGMYNERVGAFTLVAEDEATAARAHSQVKTIIRTLYSNPASHGANTIALVLKNDDLKAQWIAELDEMRGRIKAMRQKFVELLKAKGATQDFDFIIEQNGMFSFSGLTPEQVDRLKNEFAIYAVRSGRINVAGITDDNIDYLCESIVKVL

SEQ ID NO: 66437 - DNA, 1194 bp, Salmonella enterica subsp. enterica serovar Typhi str. CT18
  CDS (1)..(1194): transl_table=11
gtgtttcaaaaagttgacgcctatgccggcgatccgattctttcactgatggagcgttttaaagacgactcccgtcacgacaaagtaaatctgagcattggcctgtattacaacgaagacgggattatcccacagctcaaaacggtggccgaagccgaagcccggcttaacgcgcagccgcatggcgcctcgctgtacctgccgatggaaggactcaatacttatcgccatactatcgcgcctttgctctttggcgccgatcacccggttcttcagcaacagcgcgtggccactatccagacattaggtggttcaggcgcgctgaaagtgggcgcggattttctgaagcgttatttccccgacgcaggcgtatgggtgagcgaccctacctgggaaaaccatattgcgatatttgccggggcaggattcgaagtgagtacttacccctggtatgacgacgcgactaacggcatccgttttaacgatctgctggccacgctgaatacgttacctgcgcgcagtatcgtgctgctgcacccctgttgtcacaacccgaccggggcggatttaacgccttcgcaatgggatgcggtgattgagatagtgaaagcgcgcgatctgattccgttccttgatattgcctatcaggggtttggcgcaggcatggacgaggatgcttacgctattcgcgccattgccagcgccgggttacctgcgttagtcagtaattctttttcgaagattttctcgctgtatggcgagtgcgtcggcggcctgtcggtggtgtgtgaagatgccgaaatcgccgcgcgggttctgggacagctaaaagcgacggtgcgccgaatttactccagtccgccgtgtttcggcgctcaggtggtcgctacggtcctgggcgatgaggcgttaaaagcgagctggctggcggaagtcgacgcgatgcgtacccgcattatatcgatgcgccagacgctggtgaaagagctgaaggcggagatgcctgaccgcaacttcgattacttgttacagcagcgtggtatgttcagctataccgggttaagcgcggagcaggtcgatcggttgcgcgatgagtttggcgtttacctgattgccagtggccgcatgtgtgtcgctgggcttaatgcttcaaatgtacaccgcgtggcgaaggcatttgccgctgtcatgtaa

SEQ ID NO: 66438 - protein, 397 aa, Salmonella enterica subsp. enterica serovar Typhi str. CT18
MFQKVDAYAGDPILSLMERFKDDSRHDKVNLSIGLYYNEDGIIPQLKTVAEAEARLNAQPHGASLYLPMEGLNTYRHTIAPLLFGADHPVLQQQRVATIQTLGGSGALKVGADFLKRYFPDAGVWVSDPTWENHIAIFAGAGFEVSTYPWYDDATNGIRFNDLLATLNTLPARSIVLLHPCCHNPTGADLTPSQWDAVIEIVKARDLIPFLDIAYQGFGAGMDEDAYAIRAIASAGLPALVSNSFSKIFSLYGECVGGLSVVCEDAEIAARVLGQLKATVRRIYSSPPCFGAQVVATVLGDEALKASWLAEVDAMRTRIISMRQTLVKELKAEMPDRNFDYLLQQRGMFSYTGLSAEQVDRLRDEFGVYLIASGRMCVAGLNASNVHRVAKAFAAVM

SEQ ID NO: 66439 - DNA, 1230 bp, Schizosaccharomyces pombe 972h-
  CDS (1)..(1230)
atgtcagactacgggtttgcaaatattgaggaagctaaggcagatgcaatttttaaattaaatgctcaataccatcaggatgaagatcccaagaaggttaacatgagtgttggcgcctatcgtgacgatactggtaagccttggattttgcctgcagttaaaaaagcatctaaaatagtggaagaacaggcaagcttcaaccatgaatatttaccaattgctggattgcctcgtttcactaaggctgcggctgaagttcttttcagacccaatcctcatttattgtccgaggaccgtgttgcatctatgcagtcagtctctggtactggtgccaattttcttgctgctagtttcattgagactttctatgtaaagcacactggagcccatgtatacatctccaaccctacttggcctgtccatcgcactttgtgggaaaaattgggagtcactgtagatacatatccttattgggatgccaagaatagatcttttgattacgaaggcatgctaagtaccattaaatctgctcccgaaggaagtatatttttacttcatgcttgtgctcacaatcctactggtattgaccccactagggaacaatggctttctatattcgagagtctgctttctcgcaagcatctggtagtttttgacattgcttatcaaggttttgccagtggtgatctgaatcgtgactcttgggctctaaacgagtttgtcaaatataacaaggactttttcgtttgtcagtcatttgctaaaaatatgggtctttatggtgaacgtactggttgcatgcattacgttgcaaaggacgcttccactaaaaacaaggtcttatctcaattgtgtattgttcaacgtaacaccatttctaaccctcccgcttacggtgcacgtattgctgccgaaattcttaacagtcctcaattgtttgctgaatgggaacaagatttaaagactatgtcttctagaatcattgagatgaggaaacgtcttcgcgattctcttgttgcactcaaaacccccggttcttgggatcatattacacaacaaattggaatgttttcttttaccggtttaacgcctgcacaagtccaattttgccaggagcggtaccatctttatttcagtgcaaatggtcgtatttctatggctggtttgaacaattctaatgtagagcatgttgcacaggcatttaaccatgctgttcgcgagttgccttaa

SEQ ID NO: 66440 - protein, 409 aa, Schizosaccharomyces pombe 972h-
MSDYGFANIEEAKADAIFKLNAQYHQDEDPKKVNMSVGAYRDDTGKPWILPAVKKASKIVEEQASFNHEYLPIAGLPRFTKAAAEVLFRPNPHLLSEDRVASMQSVSGTGANFLAASFIETFYVKHTGAHVYISNPTWPVHRTLWEKLGVTVDTYPYWDAKNRSFDYEGMLSTIKSAPEGSIFLLHACAHNPTGIDPTREQWLSIFESLLSRKHLVVFDIAYQGFASGDLNRDSWALNEFVKYNKDFFVCQSFAKNMGLYGERTGCMHYVAKDASTKNKVLSQLCIVQRNTISNPPAYGARIAAEILNSPQLFAEWEQDLKTMSSRIIEMRKRLRDSLVALKTPGSWDHITQQIGMFSFTGLTPAQVQFCQERYHLYFSANGRISMAGLNNSNVEHVAQAFNHAVRELP

SEQ ID NO: 66441 - DNA, 1314 bp, Schizosaccharomyces pombe 972h-
  CDS (1)..(1314)
atgttggccaggaatttgcgttgtttgcatccaaatacatttgcatcgttaaaaaccaacgtttcctaccatggagtaaaatgcttggcaagtcagagcaagcgtggattcaaggtttgggcagatgtacctatgggaccaccggatcccatctttggtattacagaggcctataaaaaggatggagatgttaagaaaatgaacttgggtgctggtacatatcgtgatgatgccggaaagccttatgttctgcccagtgttcgtcaggcagaaactgagctgttgagtcagaaactcgacaaagaatatgcacccatcacaggaattcccagtttccgtgtgcaagcaacaaaattggcttatggcgatgtttacgagtctataaaggataggctggtttctgctcaatccattagtggtaccggtgccttgtgtatagcagctaatttccttgcttcattttatccatcaaagactatttacgtatctgaccctacttggggaaatcacaagaatgtattttctcgagctggcttgaccgttaagtcctacaagtattatgatcctgctactcgtgggttggacattaaaggcatgttgtccgatttaacttcagctcctgatggctctattatattattgcatgcttgtgctcacaatccaactggtgtagatcctacgaaagctcagtgggatgatatcctcaaaacaatgcaaaagaaaaaccattttgctcttttagacatggcttaccaaggatttgccagtggtgattttgctcgtgatgcttatgccactcgtctgttcgcctccagcaatgtccccatgttactctgccaatcctttgctaaaaacatgggtctatatggtgaacgtgctggctgctttagcattttagccaacgatgctgaggaagccgctcgtatcgaaagccaaactaagattctcattcgtgctttgtattccaaccctcccgtcaatggggccagaattgccaaccatatattgagcaaccctgcacttcgtgaacagtgggctggtgaagttgtaggcatgtccgaacgtcttaagagtatgcgtaaggctcttcgcaacatccttgaaaaggaccttaagaataaacacagctggaagcatatcactgaccaaattggtatgttttgttatactggtttaaatccccagcaagttgatgttttggctaaacagtatcacatttacctcactaagaatggtcgtattagcatctccggtctcaacacttccaatgtaagatactttgccgaagctatcaatgccgttacttcgaattag

SEQ ID NO: 66442 - protein, 437 aa, Schizosaccharomyces pombe 972h-
MLARNLRCLHPNTFASLKTNVSYHGVKCLASQSKRGFKVWADVPMGPPDPIFGITEAYKKDGDVKKMNLGAGTYRDDAGKPYVLPSVRQAETELLSQKLDKEYAPITGIPSFRVQATKLAYGDVYESIKDRLVSAQSISGTGALCIAANFLASFYPSKTIYVSDPTWGNHKNVFSRAGLTVKSYKYYDPATRGLDIKGMLSDLTSAPDGSIILLHACAHNPTGVDPTKAQWDDILKTMQKKNHFALLDMAYQGFASGDFARDAYATRLFASSNVPMLLCQSFAKNMGLYGERAGCFSILANDAEEAARIESQTKILIRALYSNPPVNGARIANHILSNPALREQWAGEVVGMSERLKSMRKALRNILEKDLKNKHSWKHITDQIGMFCYTGLNPQQVDVLAKQYHIYLTKNGRISISGLNTSNVRYFAEAINAVTSN

SEQ ID NO: 66443 - DNA, 1182 bp, Drosophila melanogaster
  CDS (1)..(1182)
atgggcccacccgatgccatcttgggtgtcacggaagccttcaagaaggacaccaaccccaagaagatcaacttgggcgctggcgcctatcgcgatgacaacacccagcccttcgtgctccccagtgttcgggaggccgagaagagagtggtgagccgtagtctggacaaggagtacgccacaatcatcggcattcccgagttctacaacaaggccatcgagctggcattgggcaagggatccaagcgtttggcggccaagcacaacgtgaccgcccagtccatcagtggaactggagctctgcgcatcggagccgccttcctggccaagttctggcagggcaaccgcgagatctacatcccgtcgccatcgtggggcaaccatgtggccattttcgagcacgccggtctgccggtgaaccgataccgctactacgacaaggacacctgtgccctggactttggcggcctgatcgaggatctgaagaaaatccccgagaagagcattgttcttctgcacgcctgcgcccacaaccccactggagtggatcccactctggagcagtggcgtgagatctcggctctggtcaagaaacgcaatctgtatcccttcatcgacatggcctaccaaggcttcgccaccggagacattgaccgcgacgcccaggcggtccgcaccttcgaggccgatggccacgacttctgcctggcccagagtttcgccaagaacatgggattgtatggtgagcgcgctggcgccttcaccgtgctgtgctccgacgaggaggaggctgctcgcgtgatgtcccaagttaagatcctgatccgtggtctgtactccaatcccccggtgcacggagctcgtattgccgccgagatcctcaacaacgaggacttgcgcgcccagtggctgaaggatgtgaagctgatggccgaccgcatcatcgatgtgcgcaccaagctcaaggacaatctaattaagctgggatccagccagaactgggaccacattgtcaaccaaatcggcatgttctgcttcacgggcctgaagccggagcaggtgcagaagctgatcaaggatcacagcgtctatctcaccaacgatggacgtgtttcgatggcgggagtcaccagcaagaatgtcgagtacctggctgagagcatacacaaggttaccaagtaa

SEQ ID NO: 66444 - protein, 393 aa, Drosophila melanogaster
MGPPDAILGVTEAFKKDTNPKKINLGAGAYRDDNTQPFVLPSVREAEKRVVSRSLDKEYATIIGIPEFYNKAIELALGKGSKRLAAKHNVTAQSISGTGALRIGAAFLAKFWQGNREIYIPSPSWGNHVAIFEHAGLPVNRYRYYDKDTCALDFGGLIEDLKKIPEKSIVLLHACAHNPTGVDPTLEQWREISALVKKRNLYPFIDMAYQGFATGDIDRDAQAVRTFEADGHDFCLAQSFAKNMGLYGERAGAFTVLCSDEEEAARVMSQVKILIRGLYSNPPVHGARIAAEILNNEDLRAQWLKDVKLMADRIIDVRTKLKDNLIKLGSSQNWDHIVNQIGMFCFTGLKPEQVQKLIKDHSVYLTNDGRVSMAGVTSKNVEYLAESIHKVTK

SEQ ID NO: 66445 - DNA, 1251 bp, Drosophila melanogaster
  CDS (1)..(1251)
atgtccatctacgccgacgttccaaaaggacccgccatcgaggtcttcgccctgacgcaggccttcaaggacgacagcaatcccaacaaggtcaatttgtcggtgggcgcttacaggacagatgctggagttccttgggttttgcctgtggtgcgcaagacggaaatcagcattgccagcgatgagcaggttaaccacgagtatttgccagtgactggactcgaaacattcaccaatgcggccactgaattggttctgggtgccgattccccagccatcaaggagaatcgcgcctttggagtgcagaccatttcgggcacgggtgccctgcgcgttgccgccgatttcctgcacacacaactgaatcgcaatgtggtttactactcgaaccccacctgggagaatcaccacaagatcttttgcgatgccggctttacgaccgttaaatcgtaccgctactgggaccaaaataaacgcgagttggacttcaagaacatgctggccgatctgaacgatgctccgcccggtgctgtgatcattctgcacgcctgtgcccacaatcccaccggcattgatcccacccaggagcagtggactgagctggccgatctgatggagaagaagaagttgttcccgctgttcgactcggcttaccagggctttgccagtggtgatcccgatcgcgatgcctgggccgctaggtacttcgtgcagcgtggcttcgagctcttcatctgccagtcgttcgccaagaactttggcctctactgcgaacgtaccggcaatctggctgtggtgcaaaagaatggtgctaccaaggcagcggttcactctcagctgacgctgctcattcgtggacagtactcgaatccgcccgcgtatggagctcgcatcgtttccaaagtcctaaacacaccggagttgcgcaaggagtggatggcctccatccaggcaatgtcgagccgcatccgcgagatgcgtacagctttgcgggacaagctggttgccttgggcacccccggcacctgggatcacattgtcaaccagatcggcatgttctcctacaccggtctgaacgagagccatgttcgtgtgctgatcgaccagtaccacatttacctgctgaagacgggacgcatcagcatgagtggcctgaataagggcaacgttgaatatgtggccaaggcgatccatgccgctgtcaccggatcaggagaaagtgcatcatgtccttgcgaaaacaaattgtaa

SEQ ID NO: 66446 - protein, 416 aa, Drosophila melanogaster
MSIYADVPKGPAIEVFALTQAFKDDSNPNKVNLSVGAYRTDAGVPWVLPVVRKTEISIASDEQVNHEYLPVTGLETFTNAATELVLGADSPAIKENRAFGVQTISGTGALRVAADFLHTQLNRNVVYYSNPTWENHHKIFCDAGFTTVKSYRYWDQNKRELDFKNMLADLNDAPPGAVIILHACAHNPTGIDPTQEQWTELADLMEKKKLFPLFDSAYQGFASGDPDRDAWAARYFVQRGFELFICQSFAKNFGLYCERTGNLAVVQKNGATKAAVHSQLTLLIRGQYSNPPAYGARIVSKVLNTPELRKEWMASIQAMSSRIREMRTALRDKLVALGTPGTWDHIVNQIGMFSYTGLNESHVRVLIDQYHIYLLKTGRISMSGLNKGNVEYVAKAIHAAVTGSGESASCPCENKL

SEQ ID NO: 66447 - DNA, 1194 bp, Shewanella oneidensis MR-1
  CDS (1)..(1194): transl_table=11
atgattttctctcaggtagtgctcgctccagcagatcccatccttggtttaaccgatacttttaaagctgatccacgtcaagataaagtcaaccttggtgtcggcatttataaggatgaagcagggcagactccggtattgcaatcggttaagaaagcagaagccatactgctagaacaagagaagactaaaaactatttaggcatagaaggggtccaaacctacaaccgcgttgtacaagagttgttatttggtgaaggtagtgagctagtggcttctggccgtgccgcaaccgcccaagcgcctggtggtacaggggcattgcgtatagccgccgagtttttattgagaaacacgccatctcgcactatttgggtaagtaatcccacttgggctaaccatcaaaatatttttgaaactgcagggttaacggttaaagagtttggatattacaacgccagtgctcacgatatcgatttcgatggcatgatgaccgatctcgccaatgcacaggcgggtgacattattctactgcacggctgctgtcataacccaacgggtattgacttgactttagcgcaatgggatttagtggctaacctctgtgctgacaaacaattagtgcctttgtttgactttgcttaccaaggttttggaacaggtattgaagaagatgctgcaggcctgcgtttagtcgcttcaaaagttcctgagctgttagtcgcaaattctttctctaaaaactttgggctttataatgaacgtatcggtgctgtgactgtggttgctcacaatgcagatgaagctgttcgcgcttttagccaagtgaaacgtacaattcgggcaaactattcaaatcccccagcccatggtgcgttaattgttagcaccattttaagtgatgcagctttgaaagccctttgggtacaagagctgaccgaaatgcgtgagcgtatagcccttatgcgtactctatttgtgcagagcttaaaagatgagggtgtgactcaagattttagctttatttcgcgccaaaatggtatgtttagcttctctggcttgaataagtcgcaagtggcccgtttaaaagacgaatttggagtttatattgtcggttctggtcgtattagtgtggcgggtatgacgaaagccaatatgcctgcgatctgtaaagcgattgctcaggtcgtataa

SEQ ID NO: 66448 - protein, 397 aa, Shewanella oneidensis MR-1
MIFSQVVLAPADPILGLTDTFKADPRQDKVNLGVGIYKDEAGQTPVLQSVKKAEAILLEQEKTKNYLGIEGVQTYNRVVQELLFGEGSELVASGRAATAQAPGGTGALRIAAEFLLRNTPSRTIWVSNPTWANHQNIFETAGLTVKEFGYYNASAHDIDFDGMMTDLANAQAGDIILLHGCCHNPTGIDLTLAQWDLVANLCADKQLVPLFDFAYQGFGTGIEEDAAGLRLVASKVPELLVANSFSKNFGLYNERIGAVTVVAHNADEAVRAFSQVKRTIRANYSNPPAHGALIVSTILSDAALKALWVQELTEMRERIALMRTLFVQSLKDEGVTQDFSFISRQNGMFSFSGLNKSQVARLKDEFGVYIVGSGRISVAGMTKANMPAICKAIAQVV

SEQ ID NO: 66449 - DNA, 1275 bp, Drosophila melanogaster
  CDS (1)..(1275)
atgtcgcagatctgtaagcgcggtttgttgatcagcaaccgattggcgcccgccgccctccgctgcaaatcaacatggttctccgaggtgcagatgggcccacccgatgccatcttgggtgtcacggaagccttcaagaaggacaccaaccccaagaagatcaacttgggcgctggcgcctatcgcgatgacaacacccagcccttcgtgctccccagtgttcgggaggccgagaagagagtggtgagccgtagtctggacaaggagtacgccacaatcatcggcattcccgagttctacaacaaggccatcgagctggcattgggcaagggatccaagcgtttggcggccaagcacaacgtgaccgcccagtccatcagtggaactggagctctgcgcatcggagccgccttcctggccaagttctggcagggcaaccgcgagatctacatcccgtcgccatcgtggggcaaccatgtggccattttcgagcacgccggtctgccggtgaaccgataccgctactacgacaaggacacctgtgccctggactttggcggcctgatcgaggatctgaagaaaatccccgagaagagcattgttcttctgcacgcctgcgcccacaaccccactggagtggatcccactctggagcagtggcgtgagatctcggctctggtcaagaaacgcaatctgtatcccttcatcgacatggcctaccaaggcttcgccaccggagacattgaccgcgacgcccaggcggtccgcaccttcgaggccgatggccacgacttctgcctggcccagagtttcgccaagaacatgggattgtatggtgagcgcgctggcgccttcaccgtgctgtgctccgacgaggaggaggctgctcgcgtgatgtcccaagttaagatcctgatccgtggtctgtactccaatcccccggtgcacggagctcgtattgccgccgagatcctcaacaacgaggacttgcgcgcccagtggctgaaggatgtgaagctgatggccgaccgcatcatcgatgtgcgcaccaagctcaaggacaatctaattaagctgggatccagccagaactgggaccacattgtcaaccaaatcggcatgttctgcttcacgggcctgaagccggagcaggtgcagaagctgatcaaggatcacagcgtctatctcaccaacgatggacgtgtttcgatggcgggagtcaccagcaagaatgtcgagtacctggctgagagcatacacaaggttaccaagtaa

SEQ ID NO: 66450 - protein, 424 aa, Drosophila melanogaster
MSQICKRGLLISNRLAPAALRCKSTWFSEVQMGPPDAILGVTEAFKKDTNPKKINLGAGAYRDDNTQPFVLPSVREAEKRVVSRSLDKEYATIIGIPEFYNKAIELALGKGSKRLAAKHNVTAQSISGTGALRIGAAFLAKFWQGNREIYIPSPSWGNHVAIFEHAGLPVNRYRYYDKDTCALDFGGLIEDLKKIPEKSIVLLHACAHNPTGVDPTLEQWREISALVKKRNLYPFIDMAYQGFATGDIDRDAQAVRTFEADGHDFCLAQSFAKNMGLYGERAGAFTVLCSDEEEAARVMSQVKILIRGLYSNPPVHGARIAAEILNNEDLRAQWLKDVKLMADRIIDVRTKLKDNLIKLGSSQNWDHIVNQIGMFCFTGLKPEQVQKLIKDHSVYLTNDGRVSMAGVTSKNVEYLAESIHKVTK

SEQ ID NO: 66451 - DNA, 1296 bp, Drosophila melanogaster
  CDS (1)..(1296)
atgagtagaaccattattatgacgcttaaggacattgtgcatgtgtggtccaacgacccgggagaacggatgtgccgagcgaacagagtatcaacatggttctccgaggtgcagatgggcccacccgatgccatcttgggtgtcacggaagccttcaagaaggacaccaaccccaagaagatcaacttgggcgctggcgcctatcgcgatgacaacacccagcccttcgtgctccccagtgttcgggaggccgagaagagagtggtgagccgtagtctggacaaggagtacgccacaatcatcggcattcccgagttctacaacaaggccatcgagctggcattgggcaagggatccaagcgtttggcggccaagcacaacgtgaccgcccagtccatcagtggaactggagctctgcgcatcggagccgccttcctggccaagttctggcagggcaaccgcgagatctacatcccgtcgccatcgtggggcaaccatgtggccattttcgagcacgccggtctgccggtgaaccgataccgctactacgacaaggacacctgtgccctggactttggcggcctgatcgaggatctgaagaaaatccccgagaagagcattgttcttctgcacgcctgcgcccacaaccccactggagtggatcccactctggagcagtggcgtgagatctcggctctggtcaagaaacgcaatctgtatcccttcatcgacatggcctaccaaggcttcgccaccggagacattgaccgcgacgcccaggcggtccgcaccttcgaggccgatggccacgacttctgcctggcccagagtttcgccaagaacatgggattgtatggtgagcgcgctggcgccttcaccgtgctgtgctccgacgaggaggaggctgctcgcgtgatgtcccaagttaagatcctgatccgtggtctgtactccaatcccccggtgcacggagctcgtattgccgccgagatcctcaacaacgaggacttgcgcgcccagtggctgaaggatgtgaagctgatggccgaccgcatcatcgatgtgcgcaccaagctcaaggacaatctaattaagctgggatccagccagaactgggaccacattgtcaaccaaatcggcatgttctgcttcacgggcctgaagccggagcaggtgcagaagctgatcaaggatcacagcgtctatctcaccaacgatggacgtgtttcgatggcgggagtcaccagcaagaatgtcgagtacctggctgagagcatacacaaggttaccaagtaa

SEQ ID NO: 66452 - protein, 431 aa, Drosophila melanogaster
MSRTIIMTLKDIVHVWSNDPGERMCRANRVSTWFSEVQMGPPDAILGVTEAFKKDTNPKKINLGAGAYRDDNTQPFVLPSVREAEKRVVSRSLDKEYATIIGIPEFYNKAIELALGKGSKRLAAKHNVTAQSISGTGALRIGAAFLAKFWQGNREIYIPSPSWGNHVAIFEHAGLPVNRYRYYDKDTCALDFGGLIEDLKKIPEKSIVLLHACAHNPTGVDPTLEQWREISALVKKRNLYPFIDMAYQGFATGDIDRDAQAVRTFEADGHDFCLAQSFAKNMGLYGERAGAFTVLCSDEEEAARVMSQVKILIRGLYSNPPVHGARIAAEILNNEDLRAQWLKDVKLMADRIIDVRTKLKDNLIKLGSSQNWDHIVNQIGMFCFTGLKPEQVQKLIKDHSVYLTNDGRVSMAGVTSKNVEYLAESIHKVTK

SEQ ID NO: 66453 - DNA, 1314 bp, Drosophila melanogaster
  CDS (1)..(1314)
atgtttattatcttaaaacgacttaattatcccggtttattacaaaacttccagctatccacgatgtccatctacgccgacgttccaaaaggacccgccatcgaggtcttcgccctgacgcaggccttcaaggacgacagcaatcccaacaaggtcaatttgtcggtgggcgcttacaggacagatgctggagttccttgggttttgcctgtggtgcgcaagacggaaatcagcattgccagcgatgagcaggttaaccacgagtatttgccagtgactggactcgaaacattcaccaatgcggccactgaattggttctgggtgccgattccccagccatcaaggagaatcgcgcctttggagtgcagaccatttcgggcacgggtgccctgcgcgttgccgccgatttcctgcacacacaactgaatcgcaatgtggtttactactcgaaccccacctgggagaatcaccacaagatcttttgcgatgccggctttacgaccgttaaatcgtaccgctactgggaccaaaataaacgcgagttggacttcaagaacatgctggccgatctgaacgatgctccgcccggtgctgtgatcattctgcacgcctgtgcccacaatcccaccggcattgatcccacccaggagcagtggactgagctggccgatctgatggagaagaagaagttgttcccgctgttcgactcggcttaccagggctttgccagtggtgatcccgatcgcgatgcctgggccgctaggtacttcgtgcagcgtggcttcgagctcttcatctgccagtcgttcgccaagaactttggcctctactgcgaacgtaccggcaatctggctgtggtgcaaaagaatggtgctaccaaggcagcggttcactctcagctgacgctgctcattcgtggacagtactcgaatccgcccgcgtatggagctcgcatcgtttccaaagtcctaaacacaccggagttgcgcaaggagtggatggcctccatccaggcaatgtcgagccgcatccgcgagatgcgtacagctttgcgggacaagctggttgccttgggcacccccggcacctgggatcacattgtcaaccagatcggcatgttctcctacaccggtctgaacgagagccatgttcgtgtgctgatcgaccagtaccacatttacctgctgaagacgggacgcatcagcatgagtggcctgaataagggcaacgttgaatatgtggccaaggcgatccatgccgctgtcaccggatcaggagaaagtgcatcatgtccttgcgaaaacaaattgtaa

SEQ ID NO: 66454 - protein, 437 aa, Drosophila melanogaster
MFIILKRLNYPGLLQNFQLSTMSIYADVPKGPAIEVFALTQAFKDDSNPNKVNLSVGAYRTDAGVPWVLPVVRKTEISIASDEQVNHEYLPVTGLETFTNAATELVLGADSPAIKENRAFGVQTISGTGALRVAADFLHTQLNRNVVYYSNPTWENHHKIFCDAGFTTVKSYRYWDQNKRELDFKNMLADLNDAPPGAVIILHACAHNPTGIDPTQEQWTELADLMEKKKLFPLFDSAYQGFASGDPDRDAWAARYFVQRGFELFICQSFAKNFGLYCERTGNLAVVQKNGATKAAVHSQLTLLIRGQYSNPPAYGARIVSKVLNTPELRKEWMASIQAMSSRIREMRTALRDKLVALGTPGTWDHIVNQIGMFSYTGLNESHVRVLIDQYHIYLLKTGRISMSGLNKGNVEYVAKAIHAAVTGSGESASCPCENKL

SEQ ID NO: 66455 - DNA, 1197 bp, Pseudomonas putida KT2440
  CDS (1)..(1197): transl_table=11
gtgttcaaacatgtcgatgcctatgccggcgacccgatcctctcgttgatggaaaccttcaaggccgacccgcgcgccgacaaggtcaacctgagtattggcctgtactacgatgaggccggcgtggtgccgcaactggcggcggtggatgcggtggaaaaacgcattgccggtcaggaccacgaagcctccctgtacctgccaatggaaggcctggccagctaccgccaagccatccaggcgctgctgttcggtgctgatcacccggccgtgaccggcggtcgtgtggccaccgtacagaccgtgggtggctccggcgccctgaaagtcggtgccgatttcctcaagcgctacttcccgcagtccgaagtctgggtcagcaacccgacctgggacaaccaccgcgccatcttcgaaggtgcaggcttcaaggtgcacacctatccgtactttgaccaggccacccgtggcgtggacttcgacggcatgctggccaccttgcagagcctgccggccaacagcgtggtactgctgcacccgtgctgccacaaccctaccggtgccgatctgcagcagcaccagtggcaacaagtggtcgaagtggtcaaggcacgccagctgatcccgttcctcgacatcgcttatcaaggcttcgccgaaggcctggtggaagatgcctacgccatccgcgaaatggcccgtgccggcgtgccgtgcctggtcagcaactccttctcgaaaatcttctcgctgtatggcgagcgggtgggcggcctgtcggtggtgtgcgatgacgaggccactgcccagagcgtgcttggccagctgaaggccaccgtgcgccgcaactactccagcccgcccaacttcggcgcccagctggttgccggcgtactgagcgatgctggcctgaatgcccagtgggccgaagaagtcgaagtgatgcgcaagcgtattctcgacatgcgccaggcgctggtcgatgccctggccgtgctgctgccgggccaggacttccagttcttcctgcgccagcgcggcatgttcagctacaccggctttagcgtcgagcaggtacgtcgcctgcgtgacgagttcggcgtgtacctgatcgacagcggccgtgtgtgcatgtccggcctgcgcccggccaacctgcaacgggttgccgaagcgttcgctgccgttcagaagtaa

SEQ ID NO: 66456 - protein, 398 aa, Pseudomonas putida KT2440
MFKHVDAYAGDPILSLMETFKADPRADKVNLSIGLYYDEAGVVPQLAAVDAVEKRIAGQDHEASLYLPMEGLASYRQAIQALLFGADHPAVTGGRVATVQTVGGSGALKVGADFLKRYFPQSEVWVSNPTWDNHRAIFEGAGFKVHTYPYFDQATRGVDFDGMLATLQSLPANSVVLLHPCCHNPTGADLQQHQWQQVVEVVKARQLIPFLDIAYQGFAEGLVEDAYAIREMARAGVPCLVSNSFSKIFSLYGERVGGLSVVCDDEATAQSVLGQLKATVRRNYSSPPNFGAQLVAGVLSDAGLNAQWAEEVEVMRKRILDMRQALVDALAVLLPGQDFQFFLRQRGMFSYTGFSVEQVRRLRDEFGVYLIDSGRVCMSGLRPANLQRVAEAFAAVQK

SEQ ID NO: 66457 - DNA, 1191 bp, Escherichia coli CFT073
  CDS (1)..(1191): transl_table=11
atgtttgagaacattaccgccgctcctgccgacccgattctgggcctggccgatctgtttcgtgccgatgaacgtcccggcaaaattaacctcgggattggtgtctataaagatgagacgggtaaaaccccggtactgaccagcgtgaaaaaggctgaacagtatctgctcgaaaatgaaaccaccaaaaattacctcggcattgacggcctccctgaatttggtcgctgcactcaggaactgctgtttggtaaaggtagcgccctgatcaatgacaaacgtgctcgcacggcacagactccgggtggcactggcgcactacgcgtggctgccgatttcctggcaaaaaataccagcgttaagcgtgtgtgggtgagcaacccaagctggccgaaccataagagcgtctttaactctgcaggtctggaagttcgtgaatacgcttattatgatgcggaaaatcacactcttgacttcgatgcactgattaacagcctgaacgaagctcaggctggcgacgtagtgctgttccatggctgctgccataacccaaccggcatcgaccctacgctggaacaatggcagacactggcacaactctccgttgagaaaggctggttaccgctgtttgacttcgcttaccagggttttgcccgtggtctggaagaagatgctgaaggactgcgcgctttcgcggctctgcataaggagctgattgttgccagttcctactctaaaaactttggcctgtacaacgagcgtgttggcgcttgtactctggttgctgctgacagtgaaactgttgaacgcgcattcagccaaatgaaagcggcgattcgtgctaactactctaacccaccagcacacggcgcttctgttgttgccaccatcctgagcaacgatgcgttacgtgcgatttgggaacaagaactgactgatatgcgccagcgtattcagcgtatgcgtcagttgttcgtcaatacgctgcaggaaaaaggcgcaaatcgcgacttcagctttatcatcaaacagaacggcatgttctccttcagtggcctgacaaaagaacaagtgctgcgtctgcgccaagagtttggcgtatatgctgttgcttctggtcgcgtaaacgtagctgggatgacaccagataacatggcgccgctgtgcgaagcgattgtggcagtgctgtaa

SEQ ID NO: 66458 - protein, 396 aa, Escherichia coli CFT073
MFENITAAPADPILGLADLFRADERPGKINLGIGVYKDETGKTPVLTSVKKAEQYLLENETTKNYLGIDGLPEFGRCTQELLFGKGSALINDKRARTAQTPGGTGALRVAADFLAKNTSVKRVWVSNPSWPNHKSVFNSAGLEVREYAYYDAENHTLDFDALINSLNEAQAGDVVLFHGCCHNPTGIDPTLEQWQTLAQLSVEKGWLPLFDFAYQGFARGLEEDAEGLRAFAALHKELIVASSYSKNFGLYNERVGACTLVAADSETVERAFSQMKAAIRANYSNPPAHGASVVATILSNDALRAIWEQELTDMRQRIQRMRQLFVNTLQEKGANRDFSFIIKQNGMFSFSGLTKEQVLRLRQEFGVYAVASGRVNVAGMTPDNMAPLCEAIVAVL

SEQ ID NO: 66459 - DNA, 1245 bp, Vibrio parahaemolyticus RIMD 2210633
  CDS (1)..(1245): transl_table=11
ttgctgaaaggtataaatacgagcagaccccttcgattaacatggatgaagattatgtttgaaaaagtagttgccgctccggccgaccctatccttggccttactgaagaatttaaaaaagatcctcgcgctgaaaagattaaccttggcgttggtatttacaaaaacgaacaaggcgaaacacctgttcttgctaccgtaaagaaagccgaagcagcactgattgaaacggaaaaaaccaaatcatacctaaccatcgaagggactgctgagtacggtctggcggtacaaaaactacttttcggtgcagacgctgaaatcgtagcggaaaaacgcgcgaaaacagctcaagcgcctggtggtacaggtgcattacgcgtggcgggtgaatttattaaacgccaacttggtaacgtaaaaatctggatcagcaacccaacttgggcaaaccacaacggcgtgtttaccgctgcaggtctagaaacggctcaatacacttactacaacgcagaaactaaagacaaagacttcgatgcaatgctaaacgatcttcaagctgcatctgaaggtgacatcgttcttctacacggctgctgccacaacccaactggcatcgatccaactgctgaagaatgggaaacactagcgaagctgattgctgagaagaaactgcttcctctgttcgactttgcataccagggctttgctaagggtgtagaagaagacgcagctggcctacgtattttcgcgaaatacaacaaagaaattctcgttgcgagctcgttctcgaaaaacttcggcctatacaatgaacgtgtaggcgcattcacgcttgttgctgaatctgaagaagtggcaacaacagcattctctcaagtaaaagcgatcatccgctctatctactctaacccaccagctcacggtagtgctgttgttactcatattctaaacaacaaagaactgcgtgccgaatgggaagcggaagtacaagaaatgcgtgaccgtattcaagagatgcgcgagctgttcgtagcaactctgaaagaagaaggtgtggatgcagatttcagctttatcgaacgtcaaaacggcatgttctcgttctctggtctatctaaagagcaagttaaccgtctgaaagatgagttcgcaatttacatcgttggttctggccgtatcagcgtagctggtatgacaaaatcaaacatgggcccactatgtaaaggtatcgcagcggttctataa

SEQ ID NO: 66460 - protein, 414 aa, Vibrio parahaemolyticus RIMD 2210633
MLKGINTSRPLRLTWMKIMFEKVVAAPADPILGLTEEFKKDPRAEKINLGVGIYKNEQGETPVLATVKKAEAALIETEKTKSYLTIEGTAEYGLAVQKLLFGADAEIVAEKRAKTAQAPGGTGALRVAGEFIKRQLGNVKIWISNPTWANHNGVFTAAGLETAQYTYYNAETKDKDFDAMLNDLQAASEGDIVLLHGCCHNPTGIDPTAEEWETLAKLIAEKKLLPLFDFAYQGFAKGVEEDAAGLRIFAKYNKEILVASSFSKNFGLYNERVGAFTLVAESEEVATTAFSQVKAIIRSIYSNPPAHGSAVVTHILNNKELRAEWEAEVQEMRDRIQEMRELFVATLKEEGVDADFSFIERQNGMFSFSGLSKEQVNRLKDEFAIYIVGSGRISVAGMTKSNMGPLCKGIAAVL

SEQ ID NO: 66461 - DNA, 1218 bp, Arabidopsis thaliana
  CDS (1)..(1218)
atgaattccatcttgtcaagcgtccttcctgctcccgaagatcctgttctcagtgtaatttttgcttgtagagatgatcctagtccggttaagttgaatttgagcgcaggtacctatcgaactgaggaaggaaagcctcttgttcttgatgttgtgagaagagcagagcaacagttagccaacgacctgtctagggacaaggaatatcttcccctcaatggacttcctgaatttaataaattaagtaccaagctcatcttaggtgatgatagtcctgcattgaaagagaatagagttgttacaacccaatgtttgtctggtactggttctttgagagttggagctgagtttctagcaacacacaacaaagaaagtgtcattttcgttccaaacccaacgtgggggaaccatccccgtatttttactttggcgggtttgtctgtccagtatttccgttattatgatccgaagagccgaggactcgacttcaaaggcatgctcgaggatcttggcgctgcacctcctggagctatagtggtacttcaagcttgtgcgcataaccccacaggagttgacccaacattcgaacaatgggaaaagattcgacgactagtgagatcgaaaagcttattacctttctttgatagtgcatatcagggttttgctagtggtagccttgacgcagatgcacaagcggttcgtatgtttgtagccgatggaggtgaatgtttgatagctcaaagttatgccaaaaatatgggcctttatggggagcgtattggctctcttacgatcgtatgcacatcagaagatgtcgctaagaaagttgagaaccaagtgctacttgttgtgaggcctatgtatcttacaccacctattcatggtgcatctattgttgccacaattctaaaaaacagtgatatgtacaatgactggaccattgagctgaaaggaatggctgaccgcataattagcatgcgtcaacagttatatgcagctctagaagctagaggaacacctggtgattggagtcacattattaaacatattgggatgtttacttttaccggattgagtgaggagcaagttcgcttgatggccaaagaatatcacatttacatgacttatgatgggaggataagcatggcaagtctaagttcgaagacagtgcctcaactcgctgatgctatacatgctgttgttactcgcatcgcctaa

SEQ ID NO: 66462 - protein, 405 aa, Arabidopsis thaliana
MNSILSSVLPAPEDPVLSVIFACRDDPSPVKLNLSAGTYRTEEGKPLVLDVVRRAEQQLANDLSRDKEYLPLNGLPEFNKLSTKLILGDDSPALKENRVVTTQCLSGTGSLRVGAEFLATHNKESVIFVPNPTWGNHPRIFTLAGLSVQYFRYYDPKSRGLDFKGMLEDLGAAPPGAIVVLQACAHNPTGVDPTFEQWEKIRRLVRSKSLLPFFDSAYQGFASGSLDADAQAVRMFVADGGECLIAQSYAKNMGLYGERIGSLTIVCTSEDVAKKVENQVLLVVRPMYLTPPIHGASIVATILKNSDMYNDWTIELKGMADRIISMRQQLYAALEARGTPGDWSHIIKHIGMFTFTGLSEEQVRLMAKEYHIYMTYDGRISMASLSSKTVPQLADAIHAVVTRIA

SEQ ID NO: 66463 - DNA, 1194 bp, Rhodopirellula baltica SH 1
  CDS (1)..(1194): transl_table=11
gtgcaccgattcgactccatctccgttgccccgcccgacgccattttgggactgaccgaagcgttcaaagccgatgaacgcgaaaccaaaatgaatttgtccgtgggcgtgtaccaagacgcttccggcaccacccccgtgcttcgctgcgtcaaagaagccgaaaaacggctgttggatacagaatcgaccaagggatacctctcgatcgacggcctgccggactaccgcgaagccgcccgccgattgatcttctccgaccaaatcgctgccgagcgagtggcagcggttcagacgccgggcggaaccggagccctccgtgtggcggcagaattcctggccactcagtgcggaccgctacgaattttcttgcccacgccaacctgggccaaccacaacgcgatcatggccgcggccggactgccggtggaaacgtattcctacctggcgtctgacaaaaagacgctggacttcgacgcactcatcgaagacctgaagaccaaacccaaggccggcgatgcggttctgctgcatgcgtgctgccacaacccaaccggagtcgacccgacaccggaacagtgggaacaaatcgcgagcgtggtctccgaaaagaaactgatcccattgctggactttgcctaccaagggttcggcgaaggcctggacgaagacgccatcggtgtgcgcacgattctgcgacagatggatgaagccatcgtctgctcgtcattcagcaaaaactttggcctgtacagcgaacgagttggaacagcgtgcttggtatccgggtcagccgaaacgaccaaagccgctctcagccaactcaaacgagtcgtccgagccaactacagcaacccacctcggcacggcggcgcgatcgtggccactgtgttggccgatgagggactgacccaaatgtggcacgaagagctcgccgaaatgcgaactcggatcgcctccctacgaaaacaattcgttgatggaatggccgcgacgggagtcgaccaagacttctcgttcttgctggaccaaaaaggcatgttctctttcagtggtttgtcaccgatgcaggtcgaccaactgcgaagcgaacatggcgtgtatctggtcggtagcggtcgaatcaacgtcgccggaatgaacgaatcgaagatggaatggttgtgcaatgccgtggcggcggtattgcgatag

SEQ ID NO: 66464 - protein, 397 aa, Rhodopirellula baltica SH 1
MHRFDSISVAPPDAILGLTEAFKADERETKMNLSVGVYQDASGTTPVLRCVKEAEKRLLDTESTKGYLSIDGLPDYREAARRLIFSDQIAAERVAAVQTPGGTGALRVAAEFLATQCGPLRIFLPTPTWANHNAIMAAAGLPVETYSYLASDKKTLDFDALIEDLKTKPKAGDAVLLHACCHNPTGVDPTPEQWEQIASVVSEKKLIPLLDFAYQGFGEGLDEDAIGVRTILRQMDEAIVCSSFSKNFGLYSERVGTACLVSGSAETTKAALSQLKRVVRANYSNPPRHGGAIVATVLADEGLTQMWHEELAEMRTRIASLRKQFVDGMAATGVDQDFSFLLDQKGMFSFSGLSPMQVDQLRSEHGVYLVGSGRINVAGMNESKMEWLCNAVAAVLR

SEQ ID NO: 66465 - DNA, 1221 bp, Candidatus Blochmannia floridanus
  CDS (1)..(1221): transl_table=11
atgtttaaatcaatgataatggctccaccagacccaattcttggattatcaaaaatttatcattctgacactaaaaaaaacaaaattaatcttggtattggagtatatatagaaaaatttcatgcagctccaattttagaaagcgttaaacaagctgaagatttattactcaaaaaagaaattagtaaaaattatcttgctattgaaggttctaatgactttaataatgccaatcaaacattattatttggaccaaatgactcaataatatcaaaaaataggattagaactgttcaagctcctggaggaactggagcattgagaatagccgcggaatgtattgcaaaatatgataatactataaataaaaaaagacgaatatggattagcgaacctagctgggtaaatcataaaaatattttttttgctgctggattagaagtatgtacttatccatattatcaaaaatctacacactccattgaatttgataaactgattgatactttcaacaatatagtaaaacctggagatatagttttattacacggttgttgtcataatccaaccggaatggatcctactatagaacaatggaaaatgttatctgaatgtgcagaaaaaaatagatggatacctttgtttgatctggcatatcaaggatttgataatggattacaagaagacttgataggattacatatgttttgtaaaaacaatccagaattaatagtctgtaattcttactccaaaaattttggtttgtataacgaacgtgtaggagcatgtactataattactgaaaacaataatcatgctgattgtgtgctaagccaactacgagcgaccattagggcaatttattctaatccaccagcacatggagctgccattgtatctacaattttacaaaataaaacactacgtttcatttgggaaaaagaattaaaaaatatgagagatcatattaaaaatatgcgtaaattgttatttaatacactgaataaatataaaaatagtaaagtaataaatcaagattttagttttattaataatcaaaaaggtatgtttgcctatataggattaaactctaatcaagtaattaaattacgtgaagaattaggaatttatttagtagattctggtaggctaaacttagcaggtttatcacacaaaaatatcgattacatatgtaatgcaatatgtaacttatacatttaa

SEQ ID NO: 66466 - protein, 406 aa, Candidatus Blochmannia floridanus
MFKSMIMAPPDPILGLSKIYHSDTKKNKINLGIGVYIEKFHAAPILESVKQAEDLLLKKEISKNYLAIEGSNDFNNANQTLLFGPNDSIISKNRIRTVQAPGGTGALRIAAECIAKYDNTINKKRRIWISEPSWVNHKNIFFAAGLEVCTYPYYQKSTHSIEFDKLIDTFNNIVKPGDIVLLHGCCHNPTGMDPTIEQWKMLSECAEKNRWIPLFDLAYQGFDNGLQEDLIGLHMFCKNNPELIVCNSYSKNFGLYNERVGACTIITENNNHADCVLSQLRATIRAIYSNPPAHGAAIVSTILQNKTLRFIWEKELKNMRDHIKNMRKLLFNTLNKYKNSKVINQDFSFINNQKGMFAYIGLNSNQVIKLREELGIYLVDSGRLNLAGLSHKNIDYICNAICNLYI

SEQ ID NO: 66467 - DNA, 1209 bp, Chromobacterium violaceum ATCC 12472
  CDS (1)..(1209): transl_table=11
atgacctcttcgatcttcgccggcgtggagctggcgccgcgcgaccccatcctcggactcaatgaggcgttcaacgccgatacccgcagcaccaaggtcaatcttggcgtgggcgtgtattccgacgacaacggcaagattccactgctggccgcggtgcaggcggccgagaaagctcgcctcgaagcattgccggcgcgcggctaccagccgatcgaaggccccgccgcttacgatgtcgccgtgcagaagctgctgttcggcgagagcagcgaactgctggccgccggccgcgtggtgaccgcccaggcgctgggcggcaccggcgcgctgaagatcggcgcggacttcctgaaacgcctgaatccggccgccaaggtgtacatcagcgacccgtcctgggaaaaccaccgcgcgctgttcgagtccgccggctttgccgtggaaaactacccgtattatcacgcagccagccgcggcgtggatttcgccgcgatgaaggcgcatttgtcctcgctggatgcgggctccatcatcgtgctgcatgcctgctgccacaatcccaccggcgccgacctgtccgccgcgcaatgggaagaagtggtgtcgatctgccgcgagcgcagcctggtgcccttcctggacatggcctaccagggcttcgccgacggcatcgacgccgatgcgctggcggtgcgcctgttcgccgcctcgaatctgcagttcttcgtcgccagctccttctccaagagcttctcgctgtacggagagcgtgtcggcgcgctgtccatcatcacggcagccaaggacgagtcggtccgcgtcttgtcccagctgaagcgcgtgatccgcaccaactactccaatccgcccatccatggcgcggccatcgtcgccgccgtgctgtccagcccggcgctgcgcgcgcaatgggaggaagagctggcgggcatgcgcgatcgcattcgcgacatgcgattggccttgctggaggcgatcaaggcgcaaggcgtggccgtcgacttttccttcatcacggcccagcgcggcatgttctcctacaccggcctgagcgccgcccaggtggaccgcctgcgcgaggagttcggcatttacgcggtatccactggccgcatctgcctggcggccctgaacagcaagaacgtaggctatgtggcctccgccatcgccaaggtggttcaggcctga

SEQ ID NO: 66468 - protein, 402 aa, Chromobacterium violaceum ATCC 12472
MTSSIFAGVELAPRDPILGLNEAFNADTRSTKVNLGVGVYSDDNGKIPLLAAVQAAEKARLEALPARGYQPIEGPAAYDVAVQKLLFGESSELLAAGRVVTAQALGGTGALKIGADFLKRLNPAAKVYISDPSWENHRALFESAGFAVENYPYYHAASRGVDFAAMKAHLSSLDAGSIIVLHACCHNPTGADLSAAQWEEVVSICRERSLVPFLDMAYQGFADGIDADALAVRLFAASNLQFFVASSFSKSFSLYGERVGALSIITAAKDESVRVLSQLKRVIRTNYSNPPIHGAAIVAAVLSSPALRAQWEEELAGMRDRIRDMRLALLEAIKAQGVAVDFSFITAQRGMFSYTGLSAAQVDRLREEFGIYAVSTGRICLAALNSKNVGYVASAIAKVVQA

SEQ ID NO: 66469 - DNA, 1200 bp, Photorhabdus luminescens subsp. laumondii TTO1
  CDS (1)..(1200): transl_table=11
atgttccagaatgttgatgcttatgctggtgatccgattctttcgctggctgaagaatttaaaaaagatcctcgtgcggaaaaaattaatctgagcatcgggctttattacgatgagcagggagtgactccgcaattgcaggcagtggctaccgcagaagaacaacttagagcgttgtcacagactgcttctctttatctgccaatggagggattggaatcctatcgtcttgcggttcaggaactgttatttggtaaagatcatccggtgttgaaacagcgggtggtggcaacgattcaatcattaggtggttctggcgctcttaaaattggtgctgactttttgcatcgttatttccctgattcagaagtgtggtgcagtgatccaacttgggaaaaccacgcagctatttttgcgggggcaggtattaaggtgaactattacccttattttgatacacagaccaaaggggtaaaattcagtgaaatgctggaaacattcaggaaactgccggcaaaaagcattattgtgatgcacccttgttgccataacccaaccggatcggatctgacctatgatcaatgggatcaagttgttcaaattgttaaagagagagagctcctgccattccttgatattgcttatcaggggcttgcggatgggatggaaaaagatgcttatgccattcgtgctatggcgacagccggtttgccttgtctggtgagcaactctttctccaagatattttctatgtatggtgagcgagtgggtggcttgtctgttatttgtgatgatgagcagaccaaagaacgggtattggggcagttgaaagcaggtgtgcgtcgcgtttactctagcccaccgagttttggtgcacaggttgtggcgaaagtactgactgatcctgctttgaaggcacaatggttaacagaagttgagcatatgcgcttgcgtattttggaaatgcgcacggtgctggtggatgctctgaaaacggcattaccagagaaaaactttgagtattttctgaaacagcgcgggatgttcagctataccggttttagccagaaacaggtggatcgcttgcgccaagaatttgctgtttatctggtcggtaatggccgagtctgtatggcgggcgtcaaccatcgtaatgttgcacgtattgctgaaacatttgcggcggtaaataagtcataa

SEQ ID NO: 66470 - protein, 399 aa, Photorhabdus luminescens subsp. laumondii TTO1
MFQNVDAYAGDPILSLAEEFKKDPRAEKINLSIGLYYDEQGVTPQLQAVATAEEQLRALSQTASLYLPMEGLESYRLAVQELLFGKDHPVLKQRVVATIQSLGGSGALKIGADFLHRYFPDSEVWCSDPTWENHAAIFAGAGIKVNYYPYFDTQTKGVKFSEMLETFRKLPAKSIIVMHPCCHNPTGSDLTYDQWDQVVQIVKERELLPFLDIAYQGLADGMEKDAYAIRAMATAGLPCLVSNSFSKIFSMYGERVGGLSVICDDEQTKERVLGQLKAGVRRVYSSPPSFGAQVVAKVLTDPALKAQWLTEVEHMRLRILEMRTVLVDALKTALPEKNFEYFLKQRGMFSYTGFSQKQVDRLRQEFAVYLVGNGRVCMAGVNHRNVARIAETFAAVNKS

SEQ ID NO: 66471 - DNA, 1272 bp, Strongylocentrotus purpuratus
  CDS (1)..(1272)
atggctttcaagatagcagtaaaatcctctttcctacaatcatgtgtatccaaacacgtcagatttttcggatcaacagcatctgcaaagtcaagcttgtgggatggagttgagatgggacctccagatccaatccttggtgtttcagaggccttcaaacgagataccaatacaaacaagatcaatcttggtgtaggtgcatatcgtgatgatgaaggaaaaccatttgttctacagtcagtcaaacaggtggaggacaaagtgaggaatatgagtctagacaaggaatatctgcctatcacaggtttagctgactttgctaaaggagctgccaagttggcctttgggcaggatagtcacactagccaagagggcagaaatgttactgtgcagaccatctctggaacaggatctcttcgtgttgggggtagtttccttcagaaattctttcctggtaacaaggttgtctacttgccatcaccatcatggggtaaccacacaccaatcttcaaacatgctggtttagatgtggcaagttaccgctattatgatagggcaacatgcggatttgatgcagctggggccatggaagatatatcgaatatcccagagaactccattatactgttccatgcgtgtgcacacaaccctacaggtgtagatcccaagcaagaacaatggaaggagctgtcaaagattgttaaggacaggaagttgtttcctttctttgacatggcttaccaagggtttgcatcaggtagtctggacaaagatgcctggccagtacgttacttcatggatgaaggacactccctagtcctctcacaatcattcgctaaaaacatgggtctctatggtgagcgagttggaggttttacagtactctgttcatcagctgaggaagccaagagagtcgaatcacaaatcaagatcttgatcagacccatgtactctaatccacctctcaatggagctaggatagcatcaactatcctcaatacaccagagctatatgaattgtggttgggtgaactacgccagatgtctggacgtatcatctctatgagagagcagcttgttgccaatttgtcaagggtcattcatgtcattcaccatgtgtcagattcaattgtatatttttgttttcaggttgagcgtctgaccaaggacttctccatctacctgacaaaggatgggcgaatctcggtagctgggatctcatcgaataacaatgcctacctggcgcatgctatgcatgaagtcactaagtaa

SEQ ID NO: 66472 - protein, 423 aa, Strongylocentrotus purpuratus
MAFKIAVKSSFLQSCVSKHVRFFGSTASAKSSLWDGVEMGPPDPILGVSEAFKRDTNTNKINLGVGAYRDDEGKPFVLQSVKQVEDKVRNMSLDKEYLPITGLADFAKGAAKLAFGQDSHTSQEGRNVTVQTISGTGSLRVGGSFLQKFFPGNKVVYLPSPSWGNHTPIFKHAGLDVASYRYYDRATCGFDAAGAMEDISNIPENSIILFHACAHNPTGVDPKQEQWKELSKIVKDRKLFPFFDMAYQGFASGSLDKDAWPVRYFMDEGHSLVLSQSFAKNMGLYGERVGGFTVLCSSAEEAKRVESQIKILIRPMYSNPPLNGARIASTILNTPELYELWLGELRQMSGRIISMREQLVANLSRVIHVIHHVSDSIVYFCFQVERLTKDFSIYLTKDGRISVAGISSNNNAYLAHAMHEVTK

SEQ ID NO: 66473 - DNA, 1290 bp, Strongylocentrotus purpuratus
  CDS (1)..(1290)
atggctttcaagatagcagtaaaatcctctttcctacaatcatgtgtatccaaacacgtcagatttttcggatcaacagcatctgcaaagtcaagcttgtgggatggagttgagatgggacctccagatccaatccttggtgtttcagaggccttcaaacgagataccaatacaaacaagatcaatcttggtgtaggtgcatatcgtgatgatgaaggaaaaccatttgttctacagtcagtcaaacaggtggaggacaaagtgaggaatatgagtctagacaaggaatatctgcctatcacaggtttagctgactttgctaaaggagctgccaagttggcctttgggcaggatagtcacactagccaagagggcagaaatgttactgtgcagaccatctctggaacaggatctcttcgtgttgggggtagtttccttcagaaattctttcctggtaacaaggttgtctacttgccatcaccatcatggggtaaccacacaccaatcttcaaacatgctggtttagatgtggcaagttaccgctattatgatagggcaacatgcggatttgatgcagctggggccatggaagatatatcgaatatcccagagaactccattatactgttccatgcgtgtgcacacaaccctacaggtgtagatcccaagcaagaacaatggaaggagctgtcaaagattgttaaggacaggaagttgtttcctttctttgacatggcttaccaagggtttgcatcaggtagtctggacaaagatgcctggccagtacgttacttcatggatgaaggacactccctagtcctctcacaatcattcgctaaaaacatgggtctctatggtgagcgagttggaggttttacagtactctgttcatcagctgaggaagccaagagagtcgaatcacaaatcaagatcttgatcagacccatgtactctaatccacctctcaatggagctaggatagcatcaactatcctcaatacaccagagctatatgaattgtggttgggtgaactacgccagatgtctggacgtatcatctctatgagagagcagcttattgcttgccgaggatgtacatgtacctattgtcattccaattgtgcatgttttgatttatttcttccaattgtatatttttgttttcaggttgagcgtctgaccaaggacttctccatctacctgacaaaggatgggcgaatctcggtagctgggatctcatcgaataacaatgcctacctggcgcatgctatgcatgaagtcactaagtaa

SEQ ID NO: 66474 - protein, 429 aa, Strongylocentrotus purpuratus
MAFKIAVKSSFLQSCVSKHVRFFGSTASAKSSLWDGVEMGPPDPILGVSEAFKRDTNTNKINLGVGAYRDDEGKPFVLQSVKQVEDKVRNMSLDKEYLPITGLADFAKGAAKLAFGQDSHTSQEGRNVTVQTISGTGSLRVGGSFLQKFFPGNKVVYLPSPSWGNHTPIFKHAGLDVASYRYYDRATCGFDAAGAMEDISNIPENSIILFHACAHNPTGVDPKQEQWKELSKIVKDRKLFPFFDMAYQGFASGSLDKDAWPVRYFMDEGHSLVLSQSFAKNMGLYGERVGGFTVLCSSAEEAKRVESQIKILIRPMYSNPPLNGARIASTILNTPELYELWLGELRQMSGRIISMREQLIACRGCTCTYCHSNCACFDLFLPIVYFCFQVERLTKDFSIYLTKDGRISVAGISSNNNAYLAHAMHEVTK

SEQ ID NO: 66475 - DNA, 1299 bp, Strongylocentrotus purpuratus
  CDS (1)..(1299)
atggctttcaagatagcagtaaaatcctctttcctacaatcatgtgtatccaaacacgtcagatttttcggatcaacagcatctgcaaagtcaagcttgtgggatggagttgagatgggacctccagatccaatccttggtgtttcagaggccttcaaacgagataccaatacaaacaagatcaatcttggtgtaggtgcatatcgtgatgatgaaggaaaaccatttgttctacagtcagtcaaacaggtggaggacaaagtgaggaatatgagtctagacaaggaatatctgcctatcacaggtttagctgactttgctaaaggagctgccaagttggcctttgggcaggatagtcacactagccaagagggcagaaatgttactgtgcagaccatctctggaacaggatctcttcgtgttgggggtagtttccttcagaaattctttcctggtaacaaggttgtctacttgccatcaccatcatggggtaaccacacaccaatcttcaaacatgctggtttagatgtggcaagttaccgctattatgatagggcaacatgcggatttgatgcagctggggccatggaagatatatcgaatatcccagagaactccattatactgttccatgcgtgtgcacacaaccctacaggtgtagatcccaagcaagaacaatggaaggagctgtcaaagattgttaaggacaggaagttgtttcctttctttgacatggcttaccaagggtttgcatcaggtagtctggacaaagatgcctggccagtacgttacttcatggatgaaggacactccctagtcctctcacaatcattcgctaaaaacatgggtctctatggtgagcgagttggaggttttacagtactctgttcatcagctgaggaagccaagagagtcgaatcacaaatcaagatcttgatcagacccatgtactctaatccacctctcaatggagctaggatagcatcaactatcctcaatacaccagagctatatgaattgtggttgggtgaactacgccagatgtctggacgtatcatctctatgagagagcagcttgttgccaatttgcagagccgaggatgtacatgtacctattgtcattccaattgtgcatgttttgatttatttcttccaattgtatatttttgttttcaggttgagcgtctgaccaaggacttctccatctacctgacaaaggatgggcgaatctcggtagctgggatctcatcgaataacaatgcctacctggcgcatgctatgcatgaagtcactaagtaa

SEQ ID NO: 66476 - protein, 432 aa, Strongylocentrotus purpuratus
MAFKIAVKSSFLQSCVSKHVRFFGSTASAKSSLWDGVEMGPPDPILGVSEAFKRDTNTNKINLGVGAYRDDEGKPFVLQSVKQVEDKVRNMSLDKEYLPITGLADFAKGAAKLAFGQDSHTSQEGRNVTVQTISGTGSLRVGGSFLQKFFPGNKVVYLPSPSWGNHTPIFKHAGLDVASYRYYDRATCGFDAAGAMEDISNIPENSIILFHACAHNPTGVDPKQEQWKELSKIVKDRKLFPFFDMAYQGFASGSLDKDAWPVRYFMDEGHSLVLSQSFAKNMGLYGERVGGFTVLCSSAEEAKRVESQIKILIRPMYSNPPLNGARIASTILNTPELYELWLGELRQMSGRIISMREQLVANLQSRGCTCTYCHSNCACFDLFLPIVYFCFQVERLTKDFSIYLTKDGRISVAGISSNNNAYLAHAMHEVTK

SEQ ID NO: 66477 - DNA, 1221 bp, Nasonia vitripennis
  CDS (1)..(1221)
atgaatactgtattcactggaattgaattgggaccgcccattgaagtttttgcactcagcaaagcttttacagatgatccacacacaccaaaggtcaatttgacaattggagcttacagaacaaacgaaggcaaaccatgggtgttaccagtagtacgcaaggttgaatctgctttagctgcagatgaaactttaaatcacgaatatcttcctgtattaggattagatagttttagtcaagctgctacagctatggttttaggaaaagattctccagctatatctgaaggtcgagtgattggggtacaaactctgtctggtacaggagcactcagagtagcagctgaattcctagctcgcattttgcatttcgatacattttattacagtaaaccaacttgggaaaaccatagattagtttttttaaatggaggtttcaagaaaaactgtgaataccgttattgggatccaaatactcgtggtattaacttagatggtatgttagaagacctgaaaaatgctccagaaaactcagtcattattcttcattcttgtgcgcataatcctactggctgtgatcctactcatgaacaatggaagaaaattgctgatgtgattgaagagaagcgcttgttcccactattcgacagtgcttatcaaggctttgcaagtggtgatttggattatgatgcttatgctgtgagattatttgtaagtcgtgggatagaattcatatgtactcaaagttttgctaaaaactttggattgtataacgagagagtaggaaatttcgtattagtagcaaataataccaaactgattcctgaaatgaaatctcaattgactctcattgtaagaggaatgtacagcaaccctcctaaccatggagctagagtagtttctacagtactcaacaatcctgaactttatgagcaatggaaagaacatatccgtacaatgtctggaagaatcaaagaaatgagaaagggtctttatgaaagattacaaaaattgaaaactcctggtacctgggaacatgtaataaatcaaattggaatgttctcttatactggtctctcagaaaaacaagtcgagtatttgataaaaaattatcatatctatttactgagaagtggacgaatcaacatgtgtggtatcaatgaaaaaaatttggattatgtagctgaggctattcacaatgctgtaacaaaactatcctaa

SEQ ID NO: 66478 - protein, 406 aa, Nasonia vitripennis
MNTVFTGIELGPPIEVFALSKAFTDDPHTPKVNLTIGAYRTNEGKPWVLPVVRKVESALAADETLNHEYLPVLGLDSFSQAATAMVLGKDSPAISEGRVIGVQTLSGTGALRVAAEFLARILHFDTFYYSKPTWENHRLVFLNGGFKKNCEYRYWDPNTRGINLDGMLEDLKNAPENSVIILHSCAHNPTGCDPTHEQWKKIADVIEEKRLFPLFDSAYQGFASGDLDYDAYAVRLFVSRGIEFICTQSFAKNFGLYNERVGNFVLVANNTKLIPEMKSQLTLIVRGMYSNPPNHGARVVSTVLNNPELYEQWKEHIRTMSGRIKEMRKGLYERLQKLKTPGTWEHVINQIGMFSYTGLSEKQVEYLIKNYHIYLLRSGRINMCGINEKNLDYVAEAIHNAVTKLS

SEQ ID NO: 66479 - DNA, 1320 bp, Nasonia vitripennis
  CDS (1)..(1320)
  misc_feature (1259)..(1259): n is a, g, c or t
  misc_feature (1260)..(1260): n is a, g, c or t
  misc_feature (1261)..(1261): n is a, g, c or t
  misc_feature (1262)..(1262): n is a, g, c or t
  misc_feature (1263)..(1263): n is a, g, c or t
  misc_feature (1264)..(1264): n is a, g, c or t
  misc_feature (1265)..(1265): n is a, g, c or t
  misc_feature (1266)..(1266): n is a, g, c or t
  misc_feature (1267)..(1267): n is a, g, c or t
  misc_feature (1268)..(1268): n is a, g, c or t
  misc_feature (1269)..(1269): n is a, g, c or t
  misc_feature (1270)..(1270): n is a, g, c or t
  misc_feature (1271)..(1271): n is a, g, c or t
  misc_feature (1272)..(1272): n is a, g, c or t
  misc_feature (1273)..(1273): n is a, g, c or t
  misc_feature (1274)..(1274): n is a, g, c or t
  misc_feature (1275)..(1275): n is a, g, c or t
  misc_feature (1276)..(1276): n is a, g, c or t
  misc_feature (1277)..(1277): n is a, g, c or t
  misc_feature (1278)..(1278): n is a, g, c or t
  misc_feature (1279)..(1279): n is a, g, c or t
  misc_feature (1280)..(1280): n is a, g, c or t
  misc_feature (1281)..(1281): n is a, g, c or t
  misc_feature (1282)..(1282): n is a, g, c or t
  misc_feature (1283)..(1283): n is a, g, c or t
  misc_feature (1284)..(1284): n is a, g, c or t
  misc_feature (1285)..(1285): n is a, g, c or t
  misc_feature (1286)..(1286): n is a, g, c or t
  misc_feature (1287)..(1287): n is a, g, c or t
  misc_feature (1288)..(1288): n is a, g, c or t
  misc_feature (1289)..(1289): n is a, g, c or t
  misc_feature (1290)..(1290): n is a, g, c or t
  misc_feature (1291)..(1291): n is a, g, c or t
  misc_feature (1292)..(1292): n is a, g, c or t
  misc_feature (1293)..(1293): n is a, g, c or t
  misc_feature (1294)..(1294): n is a, g, c or t
  misc_feature (1295)..(1295): n is a, g, c or t
  misc_feature (1296)..(1296): n is a, g, c or t
  misc_feature (1297)..(1297): n is a, g, c or t
  misc_feature (1298)..(1298): n is a, g, c or t
  misc_feature (1299)..(1299): n is a, g, c or t
  misc_feature (1300)..(1300): n is a, g, c or t
  misc_feature (1301)..(1301): n is a, g, c or t
  misc_feature (1302)..(1302): n is a, g, c or t
  misc_feature (1303)..(1303): n is a, g, c or t
  misc_feature (1304)..(1304): n is a, g, c or t
  misc_feature (1305)..(1305): n is a, g, c or t
  misc_feature (1306)..(1306): n is a, g, c or t
  misc_feature (1307)..(1307): n is a, g, c or t
  misc_feature (1308)..(1308): n is a, g, c or t
atggcgcagggcgcgagattctcagcctccttggcgtgcaatctgctcaagagcaacggcaatgccgccgtttccgtgagacacggatcatggtggtctcatgttgagatgggaccacctgatgccatccttggtgtcacagaggctttcaagcgagaccagaatccaaagaaaatcaatcttggagtaggtgcttaccgagatgacaatggcaaaccttttgtgttgccaagtgttttgaaggctgaagaaaacctgcgcagcaaaggcttggacaaggaatactccccaatttctggaagtccagaattctgtaaacataccatcaacttggcacttggagatgataatcaagtagttccaaatggccttaactccactgtgcaaggaatttctggaacaggctccctctgtattggtgccaattttctctctcacttcttccctggtagaaaggacatttatttgcctacaccatcgtggggaaaccacacacctctcttcaaattggcaggattgactgtcaagcagtacaagtactatgaccccaagacatgtggacttgacttccagggtgttctagatgacatttctaaaatcccggaaaaatccataattcttttgcacgcctgtgctcacaatcctaccggtgtggatcctaaaccagagcaatgggctgaattatctcagcttatcaagaagaagaatctattcccgttctttgatatggcttatcaaggctttgcatctggtgatgtattgaaagactcgctagcagtaagattatttatcaaagaaggccatcacattgcattagctcaatcttttgctaagaacatgggattgtatggtgagcgtgtcggagccttcacactggtcaacggtgacaaagatgaagcagcgcgtacgctttctcaaatcaaaattctcatcaggccgatgtactccaatccaccgattaacggcgctcgcatcgtcaccgaaattttgggcaacccagagctcaagaagcagtggttggtcgatgtcaagggaatggctgatcgtatcatctcagtacgtaccacacttcgtgacaatttgaagaagaacggcagcacccgcgactggtctcacattaccgatcaaatcggaatgttctgcttcactggactgaaggcccccgaggtcgaaaggcttactaaggaatttagtatttatcttaccaaagatggtagaatatcgatggctggagtaacgtcaaaaaacgtagagtattnnnnnnnnnnnnnnnnnnnnnnnnnnnnnnnnnnnnnnnnnnnnnnnnnntttatggaatga

SEQ ID NO: 66480 - protein, 439 aa, Nasonia vitripennis
  misc_feature (420)..(420): The Xaa at location 420 stands for Stop, Cys, Leu, Phe, Ser, Trp, or Tyr.
  misc_feature (421)..(421): The Xaa at location 421 stands for Stop, Ala, Arg, Asn, Asp, Cys, Gln, Glu, Gly, His, Ile, Leu, Lys, Met, Phe, Pro, Ser, Thr, Trp, Tyr, or Val.
  misc_feature (422)..(422): The Xaa at location 422 stands for Stop, Ala, Arg, Asn, Asp, Cys, Gln, Glu, Gly, His, Ile, Leu, Lys, Met, Phe, Pro, Ser, Thr, Trp, Tyr, or Val.
  misc_feature (423)..(423): The Xaa at location 423 stands for Stop, Ala, Arg, Asn, Asp, Cys, Gln, Glu, Gly, His, Ile, Leu, Lys, Met, Phe, Pro, Ser, Thr, Trp, Tyr, or Val.
  misc_feature (424)..(424): The Xaa at location 424 stands for Stop, Ala, Arg, Asn, Asp, Cys, Gln, Glu, Gly, His, Ile, Leu, Lys, Met, Phe, Pro, Ser, Thr, Trp, Tyr, or Val.
  misc_feature (425)..(425): The Xaa at location 425 stands for Stop, Ala, Arg, Asn, Asp, Cys, Gln, Glu, Gly, His, Ile, Leu, Lys, Met, Phe, Pro, Ser, Thr, Trp, Tyr, or Val.
  misc_feature (426)..(426): The Xaa at location 426 stands for Stop, Ala, Arg, Asn, Asp, Cys, Gln, Glu, Gly, His, Ile, Leu, Lys, Met, Phe, Pro, Ser, Thr, Trp, Tyr, or Val.
  misc_feature (427)..(427): The Xaa at location 427 stands for Stop, Ala, Arg, Asn, Asp, Cys, Gln, Glu, Gly, His, Ile, Leu, Lys, Met, Phe, Pro, Ser, Thr, Trp, Tyr, or Val.
  misc_feature (428)..(428): The Xaa at location 428 stands for Stop, Ala, Arg, Asn, Asp, Cys, Gln, Glu, Gly, His, Ile, Leu, Lys, Met, Phe, Pro, Ser, Thr, Trp, Tyr, or Val.
  misc_feature (429)..(429): The Xaa at location 429 stands for Stop, Ala, Arg, Asn, Asp, Cys, Gln, Glu, Gly, His, Ile, Leu, Lys, Met, Phe, Pro, Ser, Thr, Trp, Tyr, or Val.
  misc_feature (430)..(430): The Xaa at location 430 stands for Stop, Ala, Arg, Asn, Asp, Cys, Gln, Glu, Gly, His, Ile, Leu, Lys, Met, Phe, Pro, Ser, Thr, Trp, Tyr, or Val.
  misc_feature (431)..(431): The Xaa at location 431 stands for Stop, Ala, Arg, Asn, Asp, Cys, Gln, Glu, Gly, His, Ile, Leu, Lys, Met, Phe, Pro, Ser, Thr, Trp, Tyr, or Val.
  misc_feature (432)..(432): The Xaa at location 432 stands for Stop, Ala, Arg, Asn, Asp, Cys, Gln, Glu, Gly, His, Ile, Leu, Lys, Met, Phe, Pro, Ser, Thr, Trp, Tyr, or Val.
  misc_feature (433)..(433): The Xaa at location 433 stands for Stop, Ala, Arg, Asn, Asp, Cys, Gln, Glu, Gly, His, Ile, Leu, Lys, Met, Phe, Pro, Ser, Thr, Trp, Tyr, or Val.
  misc_feature (434)..(434): The Xaa at location 434 stands for Stop, Ala, Arg, Asn, Asp, Cys, Gln, Glu, Gly, His, Ile, Leu, Lys, Met, Phe, Pro, Ser, Thr, Trp, Tyr, or Val.
  misc_feature (435)..(435): The Xaa at location 435 stands for Stop, Ala, Arg, Asn, Asp, Cys, Gln, Glu, Gly, His, Ile, Leu, Lys, Met, Phe, Pro, Ser, Thr, Trp, Tyr, or Val.
  misc_feature (436)..(436): The Xaa at location 436 stands for Stop, Ala, Arg, Asn, Asp, Cys, Gln, Glu, Gly, His, Ile, Leu, Lys, Met, Phe, Pro, Ser, Thr, Trp, Tyr, or Val.
MAQGARFSASLACNLLKSNGNAAVSVRHGSWWSHVEMGPPDAILGVTEAFKRDQNPKKINLGVGAYRDDNGKPFVLPSVLKAEENLRSKGLDKEYSPISGSPEFCKHTINLALGDDNQVVPNGLNSTVQGISGTGSLCIGANFLSHFFPGRKDIYLPTPSWGNHTPLFKLAGLTVKQYKYYDPKTCGLDFQGVLDDISKIPEKSIILLHACAHNPTGVDPKPEQWAELSQLIKKKNLFPFFDMAYQGFASGDVLKDSLAVRLFIKEGHHIALAQSFAKNMGLYGERVGAFTLVNGDKDEAARTLSQIKILIRPMYSNPPINGARIVTEILGNPELKKQWLVDVKGMADRIISVRTTLRDNLKKNGSTRDWSHITDQIGMFCFTGLKAPEVERLTKEFSIYLTKDGRISMAGVTSKNVEYXXXXXXXXXXXXXXXXXFME

SEQ ID NO: 66481 - DNA, 1293 bp, Anopheles gambiae str. PEST
  CDS (1)..(1293)
atggcctgctcgaaagctctgcagcgtagctcagctgttctgttgcgaaatgtgctcccggcccaaggtcagctggctgtacgtgcgagctcctggtggagcggcgtacagatgggaccgccggacgttatcctgggcgtgacggaagcgtacaagcgcgacacgaacccgaaaaagatcaacctgggcgtcggtgcgtaccgtgacgacagcggcaaaccgttcgtgctgcccagcgtgaaaaaggccgagcagcggcttgcacagaagcagctcgatcacgaatactcgcccatcggtggaacggccgaattttgcaaacacagcatcctgctggcgctgggcgaatcgagcgagcacgtcgcgaatgggctgaacgccacggtgcagggcatcagtggaaccggtgcgctacgcatcggtggtgccttcctggccagcttcttccccggcccgaaggatatctatctgccgacaccgtcctggggcaaccatgggcccatcttccgccactcggggctgaacgtgaaggcgtaccgctactacgatccatcaacctgtggctttgattttgctggcgcgctggaagatctgtcgaaaatcccagaaaagtcaatagtattactacatgcgtgcgcccacaatcccaccggcgtcgacccgaaaccggaacagtgggccgagatgtcggccctcatcaagaagcgcaatctgttcccgttcttcgacatggcctaccagggctttgcgagcggtgacgtcgacaaggatgcgctggcggtgcgcgagttcttgcgcgatggccatcagattgcgctggcccaaagtttcgccaagaacatgggcctgtacggtgagcgggcgggagcgttctcgctggtcacgggcagcaaggacgaagccgaccgtacgatgtcgcagatcaagatcctgatccgaccgatgtactcgaacccgcccattcacggtgcccggctggtggccgaaattttgggcgacaaatcgctccgccaggagtggctcggtgacgtgaagctgatggccgatcgtatcatctccgtgcgctcctcgctgcgcaacaacctgaaggagctgggctcgtcgcgcaactggtcgcacattaccgaccagatcggcatgttctgcttcacgggcatgaatcagcagcagtgcgagcgtttgtcgaaggagttcagcgtttacctcacgaaggacggccgtatttcgatggcgggcgttacctcgaagaatgtgggctatctggccgaagcgatccatgccgttacgaagtag

SEQ ID NO: 66482 - protein, 430 aa, Anopheles gambiae str. PEST
MACSKALQRSSAVLLRNVLPAQGQLAVRASSWWSGVQMGPPDVILGVTEAYKRDTNPKKINLGVGAYRDDSGKPFVLPSVKKAEQRLAQKQLDHEYSPIGGTAEFCKHSILLALGESSEHVANGLNATVQGISGTGALRIGGAFLASFFPGPKDIYLPTPSWGNHGPIFRHSGLNVKAYRYYDPSTCGFDFAGALEDLSKIPEKSIVLLHACAHNPTGVDPKPEQWAEMSALIKKRNLFPFFDMAYQGFASGDVDKDALAVREFLRDGHQIALAQSFAKNMGLYGERAGAFSLVTGSKDEADRTMSQIKILIRPMYSNPPIHGARLVAEILGDKSLRQEWLGDVKLMADRIISVRSSLRNNLKELGSSRNWSHITDQIGMFCFTGMNQQQCERLSKEFSVYLTKDGRISMAGVTSKNVGYLAEAIHAVTK

SEQ ID NO: 66483 - DNA, 1215 bp, Magnaporthe grisea 70-15
  CDS (1)..(1215)
atggtttttgaagcgatacagccgggtcctccggatcccatgaacctgctcaagacaacggccgacgcagacaccagtccggacaaggttgatctcggagttggaatctacagaaacgaaaagggaaactatcaggagctggcgtccgtgagggaggccaaggtgcaactgctacaaaatgaccctggacatgattacgaatgcacaaccggcaacgtagactttatcaaacacgcagccggcgtcatgttcggccgggacagcgccctcctcgccgccggcaagatcgcctcggtacagaccatatccggcacgggcgcggtgcacctcgcagcgcagttcatctcgcgcttcgtgcacccttcgccgaccgtctacgtgggcacgccgacctggggcaactacaagccgctgtgcgagctggtggggctgcagatcgtcgagttccagcagtacgactcggaaaaacgcacgctcgacttccccgccatcctggccgccgtccgctccgccccgagggcaagcgtcttcatcttccaggcctgctgccacaacccgacggggatggacccgacgcgcgcgcagtgggacgagctgcgggcggcggtgcgggacatgggccactttcccgtgtttgacaatgcgtaccagggcctcggggacgggctggacgaggacgcgtatgtggtgcggtcgtgggccgccgagggcatcgagatgtttgtctgccagtcatttagcaagaactttgccctgtacggggagcggtgcggcgtcctgcatgctttctgcccggccggggcgggtgcggcgcgcaacgttcacgatcagctgaggtgcttgatccgctgggagttttcgtcctcgccggcatatgggtcgaggctggtgactaggatcttgagttctgaagagctcaggtcgaaatgggaaaatgaactctccgtcatgcggcaaagactcaagggtaaccgtgagcttctattcaaactgctgactgaggaatacaagacgcccgggaactggcaacacatactcgaggaaaaaggcctcttctcctacttccgactaagccccgcccagtgtcgcgctctggtcgacaagcatcatatatatctccctacaaacggccgcatcaacatatccgggctaaatgatgcaaacgcgaaaagggttgccagcaaaatcgacgaggtcgtacgggatacccagtag

SEQ ID NO: 66484 - protein, 404 aa, Magnaporthe grisea 70-15
MVFEAIQPGPPDPMNLLKTTADADTSPDKVDLGVGIYRNEKGNYQELASVREAKVQLLQNDPGHDYECTTGNVDFIKHAAGVMFGRDSALLAAGKIASVQTISGTGAVHLAAQFISRFVHPSPTVYVGTPTWGNYKPLCELVGLQIVEFQQYDSEKRTLDFPAILAAVRSAPRASVFIFQACCHNPTGMDPTRAQWDELRAAVRDMGHFPVFDNAYQGLGDGLDEDAYVVRSWAAEGIEMFVCQSFSKNFALYGERCGVLHAFCPAGAGAARNVHDQLRCLIRWEFSSSPAYGSRLVTRILSSEELRSKWENELSVMRQRLKGNRELLFKLLTEEYKTPGNWQHILEEKGLFSYFRLSPAQCRALVDKHHIYLPTNGRINISGLNDANAKRVASKIDEVVRDTQ

SEQ ID NO: 66485 - DNA, 1374 bp, Magnaporthe grisea 70-15
  CDS (1)..(1374)
atgtcggcaaaagccacccggggcagcacctcttcgagcaccccacagaacagctcttcctcatcccaatctcagtcccaatccaccgcagtttcgaggatacggaatattgcaaaccacatgatggcatcaccaagcacaatcttcacggccgatgtcgttcctcaggccccagaagaccctctctttgggttgatggccgcctacagggccgatgaaagccccgacaaggtcgacttgggaattggtgcatacagggacgacaacgcaaagccgtgggtgcttcctgttgtcaagaaggccgatgaaatcatccgcaacgaccccagcgccaaccatgaatatctcccgatcaccggtctggcctccttcaccagcaaggctggcgagctgatgctcggcgccgatacacctgccaaaggccgcgtcacatctgtgcagaccatctccggcactggagctctgcacctcggagccctcttcctccagaagttctatcgcaaggtctatagcaactcggtcgtgcacctgtcgaaccccacctgggccaaccacaaccagatcttctccaacgtccaagtgccgacgacgacgtacccatactttgacaagggcaccaagggccttgacttcgaaggcatgaaggctacgttgaacaatgccgcagaacactccatcatccttctgcacgcttgtgcacacaatcccaccggtgttgaccccacgcagggccagtggcgcgagattgccgagatcatgaaggccaaaaagcacttcccgtttttcgactgtgcttaccaaggcttcgcttcgggcgatctggaccgcgatgcctgggccgttcgctactttgtggagcagggattcgagctcgtaattgcccagtctttcgccaaaaacttcggcttgtacggtgagcgggcgggctgcttccactacgtgtcggcgcctgcagccgaggctgccgaaacgaccaagagggttgcatcacaactcgccatcctccagcgctccgaaatctcgaacccaccaatctacggcgcccgcgtcgccagcatcgtgctcaacgacccggcgctcatgtccgaatggagagaaaatctgaggaccatgtcgggccgcatcattactatgcgcaacgagcttcgggcaaagctcgaagcgctgggcacccccggcacatggaaccacatcacggaccagatcgggatgttcagcttcacgggtctgaccgaggcacaggtcctgaagatccggagcgactaccacgtttacatgacgaagaatggtcgtatcagcatggcgggactcaactcgcgcaacattgactactttgctaaggcagttgataaggtggtgagggagacgcaataa

SEQ ID NO: 66486 - protein, 457 aa, Magnaporthe grisea 70-15
MSAKATRGSTSSSTPQNSSSSSQSQSQSTAVSRIRNIANHMMASPSTIFTADVVPQAPEDPLFGLMAAYRADESPDKVDLGIGAYRDDNAKPWVLPVVKKADEIIRNDPSANHEYLPITGLASFTSKAGELMLGADTPAKGRVTSVQTISGTGALHLGALFLQKFYRKVYSNSVVHLSNPTWANHNQIFSNVQVPTTTYPYFDKGTKGLDFEGMKATLNNAAEHSIILLHACAHNPTGVDPTQGQWREIAEIMKAKKHFPFFDCAYQGFASGDLDRDAWAVRYFVEQGFELVIAQSFAKNFGLYGERAGCFHYVSAPAAEAAETTKRVASQLAILQRSEISNPPIYGARVASIVLNDPALMSEWRENLRTMSGRIITMRNELRAKLEALGTPGTWNHITDQIGMFSFTGLTEAQVLKIRSDYHVYMTKNGRISMAGLNSRNIDYFAKAVDKVVRETQ

SEQ ID NO: 66487 - DNA, 1287 bp, Magnaporthe grisea 70-15
  CDS (1)..(1287)
atgctttcaaccatgagaattgcctcgcggcaggtcgccggtaggcggatggctgtccgccctcttgctgctttgcgcccagcttcaacttgggccaacgtccagatgggccctccagatgccattttgggtatcactgaagctttcaaggccgacagcaacaacaagaagatcaacctcggtgttggcgcctaccgcgatgacgctggcaagccctacgtgctgccgtcagtcaggcaagccgaggagaaggttattgcagctcgcatgaacaaggagtacgccggaatcactggtgtgcctgaattcacttcaggagctcttaccctggcctacggcaaggactcgaccgccctcgaccgcactgccatcacccagtccatttctggcactggtgctctgcgcatcggcgccgagttcctttccaagttctaccctggcgcgaagaacatctacatccccaccccgtcatgggccaaccacggcgccgtcttcacacaggccggcctgaaggttgagaagtaccgctactacaacaaggacaccatcggcctcgactttgagggtctggtcgccgacgtcaaggccgcacccaagggctccatcttcctcttccacgcctgcgcccacaaccccaccggtgtcgaccctactcctgagcagtggcgcgagattgagactgtcgtcaagtcggccggtcactacgccttcttcgacatggcttaccagggattcgcttcaggtgacatccacaaggacgcttttgcgctgcgccacttcgtcgcccagggtcacaacgtctgcttggcccagtccttcgccaagaacatgggtctgtacggcgagcgcgtcggtgctttctccatcgtgtgcgactcggccgaggagaagaagcgcgttgactcgcagctcaagatcctcgtgcgccccatgtactcgaaccccccaatccacggtgccaggatcgccgcccagatcctcaacaccccggccctctacgaccagtggctggctgaggtcaagggcatggctgaccgcatcattaccatgagggctctgcttaaggagaaccttgagaagctcggcagcaagcacgactggtcccacatcaccagccagattggcatgttcgcctacaccggtctgacccccgagcagatggagcagctcgccaagagccactcggtctacgccaccaaggacggccgtattcggtcgctggtatcaccagcgagaacgttggccgtcttgctgaggctatcttcaagatcaagggttagatggtaa

SEQ ID NO: 66488 - protein, 428 aa, Magnaporthe grisea 70-15
MLSTMRIASRQVAGRRMAVRPLAALRPASTWANVQMGPPDAILGITEAFKADSNNKKINLGVGAYRDDAGKPYVLPSVRQAEEKVIAARMNKEYAGITGVPEFTSGALTLAYGKDSTALDRTAITQSISGTGALRIGAEFLSKFYPGAKNIYIPTPSWANHGAVFTQAGLKVEKYRYYNKDTIGLDFEGLVADVKAAPKGSIFLFHACAHNPTGVDPTPEQWREIETVVKSAGHYAFFDMAYQGFASGDIHKDAFALRHFVAQGHNVCLAQSFAKNMGLYGERVGAFSIVCDSAEEKKRVDSQLKILVRPMYSNPPIHGARIAAQILNTPALYDQWLAEVKGMADRIITMRALLKENLEKLGSKHDWSHITSQIGMFAYTGLTPEQMEQLAKSHSVYATKDGRIRSLVSPARTLAVLLRLSSRSRVRW

SEQ ID NO: 66489 - DNA, 1137 bp, Gibberella zeae PH-1
  CDS (1)..(1137)
atgggatcctattcaccaacttcgcggtttaaggaccttgacactatccctcttgacccccattatgcgctcaaagaaacctttcaagccgatccagacccaagaaaggtaatccttgggtcgggtttatatcgcgacgacgattcaaagccttgggtgctcccagtagtcaaaaaggtactctttggtccacaaagcctcaatgaaagtcgtctggtctcaatccaaaccatctcaggaacgggagccaactttcttggggcacgcttcctggctgaaaccctgaagccatctgctgtgtggctttcagaccccagctgggtcaatcatgccaacatttgggggctcgttaatgtcaacgttaaacgatacccttactggaatgcaaagaccaagagtctagacttcaataacatgattgagaagcttcagactgacgctattgctggagatgttatactgctccacgcttgtgctcacaaccccactggtgtcgatcctaacaaggagcaatggagaaagattgctgacgtttgtgaacgaaaacaactttttccgctcttcgactgtgcctaccagggattcgcgacaggaaatcttgatgatgacgcatgggcaattcgccattttattgaccgtggtaccatggaactcgccgtttgccagtctttctccaagaacatgggcttatacggggagcgtgttggcgcattgcacatgttttgcgcaacatctacagacgctgaaaaggttcgtggccatctctgtcgtctccagcgaggtcagatctctcagcctcccacaaacggagcgagaattgcagcaaccatactctcagactccaagttgttccaagattgggtcacagaccttggagaaatgagcagccggatcaaggagatgcgaaaatctctctatgataacctcatgattcttgacacgccaggaaaatgggatcatatcgtttcgcagattggcatgttttcatacacgggattgactccagagcaagttgcttctattcaacaagatagccacgtttacattttgaaatcaggccgtatctcggtcgcaggactcaactctaagaatgttgacaaatcagttgtcgaattcgcaatagttgggatgaagtag

SEQ ID NO: 66490 - protein, 378 aa, Gibberella zeae PH-1
MGSYSPTSRFKDLDTIPLDPHYALKETFQADPDPRKVILGSGLYRDDDSKPWVLPVVKKVLFGPQSLNESRLVSIQTISGTGANFLGARFLAETLKPSAVWLSDPSWVNHANIWGLVNVNVKRYPYWNAKTKSLDFNNMIEKLQTDAIAGDVILLHACAHNPTGVDPNKEQWRKIADVCERKQLFPLFDCAYQGFATGNLDDDAWAIRHFIDRGTMELAVCQSFSKNMGLYGERVGALHMFCATSTDAEKVRGHLCRLQRGQISQPPTNGARIAATILSDSKLFQDWVTDLGEMSSRIKEMRKSLYDNLMILDTPGKWDHIVSQIGMFSYTGLTPEQVASIQQDSHVYILKSGRISVAGLNSKNVDKSVVEFAIVGMK

SEQ ID NO: 66491 - DNA, 1245 bp, Gibberella zeae PH-1
  CDS (1)..(1245)
atggtttctactacaaatttccctgccgaagtcgtgccccaggcacccgaagatcctctctttggtcttgcacgagagtacaaggccgacgacagccccaacaagattgatcttggtattggcgcatacagagacgagaatgcaaagccctgggtgttgcccgtcgtcaagaaggccgatgagatcctccgaaacgaccctgagctcaaccacgagtacgcccccatcgcgggtattgccagcttcacatccaaggctgccgagctagtctttggccccgattcttctgccatccaagacaagcgctcaacaacactacagacaatctctggtaccggtgccgtgcacttgggagctcttttccttgccaagttctacaagggcaaccagactgtctacctctcaaatcccacatgggcgaaccaccaccagatcttcaagaatgttggcatgtcgatcgacacatacccctacttccacaaggagactaagggtctcgattttgaggggttcaagaagactctgcaatccgctcccgagggttccgtctttgtgcttcacgcatgcgcacacaaccctaccggtgtcgaccctacgcaagatcagtggactgagattgcttcaatcatgaaggagaagaaccacttccccttctttgacaccgcctaccaaggatttgcctctggcgatcttgtcaaggatgcatgggccatccgctactttgtcgatcagggctttgagcttgttgttgctcagagtttcgccaagaactttggtctctacggagagcgtgccggttgcttccacgccgtcacatctcccgctcctgaggcttcaaacacaatcactcgcattggctctcaattggctatcctccagcgatcggagatctccaaccctcctctgtacggtgcccgtatcgtcagcactgttctcaacgatcgcgacctcttcgctgagtgggaagagaacctgcgcaccatgtctggccgcatcatcagcatgcgcgacgtcctccgagccaagcttgaagagctcgagacccctggtacctggaaccacatcaccgaccagatcggcatgttcagcttcactggcttgagcgagaagcaagtacttcagcttcgagaagaattccacgtctacatgaccaagaacggtcgtatcagcatggctggtctcaacgaaaacaacgttgagtactttgcaaaggctgttgataaggttgttcgtgacgctgcttag

SEQ ID NO: 66492 - protein, 414 aa, Gibberella zeae PH-1
MVSTTNFPAEVVPQAPEDPLFGLAREYKADDSPNKIDLGIGAYRDENAKPWVLPVVKKADEILRNDPELNHEYAPIAGIASFTSKAAELVFGPDSSAIQDKRSTTLQTISGTGAVHLGALFLAKFYKGNQTVYLSNPTWANHHQIFKNVGMSIDTYPYFHKETKGLDFEGFKKTLQSAPEGSVFVLHACAHNPTGVDPTQDQWTEIASIMKEKNHFPFFDTAYQGFASGDLVKDAWAIRYFVDQGFELVVAQSFAKNFGLYGERAGCFHAVTSPAPEASNTITRIGSQLAILQRSEISNPPLYGARIVSTVLNDRDLFAEWEENLRTMSGRIISMRDVLRAKLEELETPGTWNHITDQIGMFSFTGLSEKQVLQLREEFHVYMTKNGRISMAGLNENNVEYFAKAVDKVVRDAA

SEQ ID NO: 66493 - DNA, 1275 bp, Gibberella zeae PH-1
  CDS (1)..(1275)
atgctgtccaccctccgagtcgccagccgccgggctgcccgccctgcccagtacaacctggctgccattcgcgctgcctccaactgggccaacgtccctcaaggtcctcctgatgccattcttggtatcactgaagccttcaaggccgacaagttcgacaagaagatcaacctgggtgttggtgcctaccgtgacgatgctggcaagccctacgtgctcccttccgttcgtgaggccgagatgaaggtcgtcgagtccaagttgaacaaggagtacgccggcatcactggtgttcctgagttccctcccgccgccgccaagctggcctacggcgccaacagccccgccctggatcgcatcaccatcacccagaccatctctggtaccggtgctctccgtgtcggtgccgctttcctcgccaagttcttccctggcgaaaagaagatctacatcccccagccttcgtgggcaaaccacaaggccgtcttcaaccacgccggcctcgaggttgagcagtaccgctactacgacaagaagaccatcggccttgacttcgagggcttgattgctgatgtcaagtctgcccccaacggcagtgtcttccttttccacgcctgtgctcacaaccccactggtgttgaccctacccaggagcagtggaagcagatctctgacgtcgtcaaggagaagggtcacttcgccttcttcgacatggcttaccagggctttgccagtggtgacaccgacaaggatgctttcgctgttcgctacttcgttgagcagggccacaacattgctctttgccagtctttcgccaagaacatgggtctctatggtgagcgtattggtgccttctccatggtatgtgccgatgccgacgagaagaagcgcgtcgactctcagctcaagattctcattcgacctctgtactccaaccctcccatccacggtgcccgcatcgccgccgagattctgaacagccccactctctacaagcagtggctcggtgaggtcaaggagatggctgaccgcatcatcaccatgcgtgctctcctcaaggataaccttgagaagctcggctccaagcacgactggtctcacatcaccagccagatcggcatgttcgcctacactggtcttacttccgaggagatgactcgcctcgctgaggagttctccgtttatgccaccaaggacggccgtatctctgttgctggtatcacctctgaaaacgttggccgcctcgctgaggccatctacaaggtcaagggttaa

SEQ ID NO: 66494 - protein, 424 aa, Gibberella zeae PH-1
MLSTLRVASRRAARPAQYNLAAIRAASNWANVPQGPPDAILGITEAFKADKFDKKINLGVGAYRDDAGKPYVLPSVREAEMKVVESKLNKEYAGITGVPEFPPAAAKLAYGANSPALDRITITQTISGTGALRVGAAFLAKFFPGEKKIYIPQPSWANHKAVFNHAGLEVEQYRYYDKKTIGLDFEGLIADVKSAPNGSVFLFHACAHNPTGVDPTQEQWKQISDVVKEKGHFAFFDMAYQGFASGDTDKDAFAVRYFVEQGHNIALCQSFAKNMGLYGERIGAFSMVCADADEKKRVDSQLKILIRPLYSNPPIHGARIAAEILNSPTLYKQWLGEVKEMADRIITMRALLKDNLEKLGSKHDWSHITSQIGMFAYTGLTSEEMTRLAEEFSVYATKDGRISVAGITSENVGRLAEAIYKVKG

SEQ ID NO: 66495 - DNA, 1272 bp, Gibberella zeae PH-1
  CDS (1)..(1272)
atgtcgtgcttctcatccctgccaccacagcctacagacgagatctttgatcttctcggtgcttacaggaaagactctaaccctgaccgcgtcaacctcggtgtcggcgtctactgcaccgacgaaggcaaatcctggcctcttgacgttgtcacccgcgtggagaaggatctcttcgaagaggctagcttgaccagacacgattatcttcccatcgagggagaccagcagttcctcaagcttgcgagggatcttgtttttgcccatcaggatgagttgagcgtcgcttccgtacagaccgtctccggaaccggagcgaaccatatcggtgctcgtttcgtcgcggattaccttcgaccgcaaaatatctgggtgtcggaccctacctgggcgaaccaccacatgatctgggagtctgttggactcaagcccaagctgtatccctactacaaaaagtcggattgttcgttggactttgagggtatgatcaagactcttgaggaagaagctcaacctcgcgatgccgtcttgttgcacgcatgtgcacacaaccctaccggtcttgatcccacaaaggagcagtggaagatcatcgctgaggtctgtcagcgaaagcaactgttcccctttttcgacgccgcctaccaaggcttcgcatccggcagtcccgcggaagacgcctgggccatccgctacttttaccaacagcagccacgacctgacatgattgtcgcgcaatccttttccaagaactttggtctttacggtcatagaacaggagcaattcatttggtgcttgcggagccctccaaggagatcagggacaacgcttactccaccctttcgtatcttttgcgatctgaaatctccatggctcccaagtatggttctacaattgtcaagacggttttggatagtgaggagttgactgctgcttggatggctgatttgcaagtcatgagcagtcgtatcaagagcatgcgccaggctctgtatgatgagttggtgcgcttggagacacctggcacatggaaccacatcattgaccagattggcatgttctcatacactggcttgaccccctttgaggtaaaggtccttcgggagcgcttccacatctacctgctcaagtcgggacgtatttccatttctggcttgaacaagagaaatgtcaactacgttgccaaggccatccacgatgtccgagtaaatggccatgagctcaatggcaccaacggaacaaatggaacaaacggtgtcaacggacactag

SEQ ID NO: 66496 - protein, 423 aa, Gibberella zeae PH-1
MSCFSSLPPQPTDEIFDLLGAYRKDSNPDRVNLGVGVYCTDEGKSWPLDVVTRVEKDLFEEASLTRHDYLPIEGDQQFLKLARDLVFAHQDELSVASVQTVSGTGANHIGARFVADYLRPQNIWVSDPTWANHHMIWESVGLKPKLYPYYKKSDCSLDFEGMIKTLEEEAQPRDAVLLHACAHNPTGLDPTKEQWKIIAEVCQRKQLFPFFDAAYQGFASGSPAEDAWAIRYFYQQQPRPDMIVAQSFSKNFGLYGHRTGAIHLVLAEPSKEIRDNAYSTLSYLLRSEISMAPKYGSTIVKTVLDSEELTAAWMADLQVMSSRIKSMRQALYDELVRLETPGTWNHIIDQIGMFSYTGLTPFEVKVLRERFHIYLLKSGRISISGLNKRNVNYVAKAIHDVRVNGHELNGTNGTNGTNGVNGH

SEQ ID NO: 66497 - DNA, 1290 bp, Apis mellifera
  CDS (1)..(1290)
atggctcaaaataagattaaatttgcattcagttataatttatttaacaagaacaaagttgctttatatggcattagatcaatgggtacatggtggcctcatgtaaaaatgggcccaccagatgcaattttaggtcttacagaagcatacaaaaaagatcaaaatccaaataaagttaatttaggagttggtgcttatcgagatgataatggtaaaccatttgttttaccaagtgtacgaaaggcagaagaaaaaattaaaactaaaaatatggataaagaatatgcaccaattgcaggaagttcagatttttgtaaacaaagtattaaattggcacttggtgataacagtgatgttgttaaaaatggtttaaatgctactgttcaaggagtttctggtacaggttcactttatattggatcactttttctatcgcaattcttttctagtaataaagaaatatatgtgccaaaacctacttggggaaatcatagtcaaatatttagacttgctgggcttccaatgaaattttatcgttattatgatccaaaaacatgtggattagatttcaatggtgctttagaagatttatctaaaataccaggaaaatctattgttctttttcatgcttgtgctcataatcccactggtgttgatcctaatcaagatcaatggaaagaattggctgaaacagtaaagaggagaaatctctttcccttttttgatatggcatatcaagggtttgcttcaggcagcctagagaatgatgcttttgctgttagatactttgtgaaaaatggaattgatattatgttagcccaatcatatgcaaaaaatatgggtttatatggtgaacgtgtaggagcattatcaataattacatccaacaaagaagaagcagatcgtgtactttcacaattgaaaattataattagaccagcatactccaatccaccaattaatggtgctagaattgttaatgaaatcttagaagattctgatttaagaaaacaatggcttattgatgtaaaaacaatggctgaccgtattatttctatgcgtcaaacattgactgataatcttagaaaatgtggtagtactcgtgattggtcacatattacaaatcaaattggaatgttttgttttactggtcttaaaagttctgaggcagaaaaacttataagagactatagcatttatttgacaaaggatggtagaatatctgtggcaggagtaacaacaaaaaatgtagaatatgttgcagaagctatgcataatgttacaaaataa

SEQ ID NO: 66498 - protein, 429 aa, Apis mellifera
MAQNKIKFAFSYNLFNKNKVALYGIRSMGTWWPHVKMGPPDAILGLTEAYKKDQNPNKVNLGVGAYRDDNGKPFVLPSVRKAEEKIKTKNMDKEYAPIAGSSDFCKQSIKLALGDNSDVVKNGLNATVQGVSGTGSLYIGSLFLSQFFSSNKEIYVPKPTWGNHSQIFRLAGLPMKFYRYYDPKTCGLDFNGALEDLSKIPGKSIVLFHACAHNPTGVDPNQDQWKELAETVKRRNLFPFFDMAYQGFASGSLENDAFAVRYFVKNGIDIMLAQSYAKNMGLYGERVGALSIITSNKEEADRVLSQLKIIIRPAYSNPPINGARIVNEILEDSDLRKQWLIDVKTMADRIISMRQTLTDNLRKCGSTRDWSHITNQIGMFCFTGLKSSEAEKLIRDYSIYLTKDGRISVAGVTTKNVEYVAEAMHNVTK

SEQ ID NO: 66499 - DNA, 1257 bp, Candida glabrata CBS 138
  CDS (1)..(1257)
atgtctgccaccatatttaacaacatcgaagaacttcctgctgatgcccttttcggtatcaagcaaaggtacaatcaagataccagagccaccagagttgacttgggtattggtgcgtaccgtgatgaccaaggcaaaccatgggtgttgccttcggttagaatggctgaaagggcaatccaagaggatccaagctacaatcatgaatacttgggtatcaatggtcttccaagtttgtcttccgctgctgctaatgttatatttggtgaagactccccagctttgaaagaaggcagaaccatctcagttcaatctttgtctggtacaggtgctttgcacattgctgccaagtttatctctaagttcgctgctgacaagaagatttatttgtctcagccaacttgggctaaccacaacgccatcttcaaggcacaaggtttagagactgcttcttatccatactggaagagttctaccaagtcccttgacttggaaggtttcatctcagccatcgaaagtgcgccaaagggttctatattcctgctgcatgcatgtgcacacaacccaactggtttggacccatctgagaagcaatggcccgttatcctggatgctctggtcaagggcgatcacttggccttattcgactccgcttaccaaggttttgcctccggtgacttggacaaggacgcctttgctgtgcgtttgggtgtcgaaaagttggcctccacttcaccaatctttgtatgccagtctttcgccaagaacgtcggtatgtatggtgaaagagtcggttgtttccacttgatcctacctaagcagaatgccaatctcgcaccaatcaagtctgctatcacatctcaaatatctagtattatcagaagtgaagtgtccaactccccagcttatggtgccaagatcgtttctaagattttgaacacaccagagcttactaagcaatggcacgaagacatggttaccatgtcatctagaatcaaggagatgagaatcgcattgagagaccatctagttaagttgggaactccaggtacttgggaccacatcgtcgagcaatgcggtatgttctctttcacaggcttgaccccagagatggttaagagactggaggtccagcacgctgtctacttggtctccagtggtagagcctctattgccggcctaaactccggcaacgttgagtacaccgcaaaggccatcgacgaagtagtccgtcactactcaacttccaagttgtga

SEQ ID NO: 66500 - protein, 418 aa, Candida glabrata CBS 138
MSATIFNNIEELPADALFGIKQRYNQDTRATRVDLGIGAYRDDQGKPWVLPSVRMAERAIQEDPSYNHEYLGINGLPSLSSAAANVIFGEDSPALKEGRTISVQSLSGTGALHIAAKFISKFAADKKIYLSQPTWANHNAIFKAQGLETASYPYWKSSTKSLDLEGFISAIESAPKGSIFLLHACAHNPTGLDPSEKQWPVILDALVKGDHLALFDSAYQGFASGDLDKDAFAVRLGVEKLASTSPIFVCQSFAKNVGMYGERVGCFHLILPKQNANLAPIKSAITSQISSIIRSEVSNSPAYGAKIVSKILNTPELTKQWHEDMVTMSSRIKEMRIALRDHLVKLGTPGTWDHIVEQCGMFSFTGLTPEMVKRLEVQHAVYLVSSGRASIAGLNSGNVEYTAKAIDEVVRHYSTSKL

SEQ ID NO: 66501 - DNA, 1260 bp, Candida glabrata CBS 138
  CDS (1)..(1260)
atggtaaaaatttcagctacggtgtacaacgatgtcgaaccgatcaagaccgacatattatttgcaacaaagcaaaggtacttgaaggataccagaggtttcaaagttgatttgggtgttggagcatatcgcgctgacaatggtaagccatggattcttccctcggtacgtaaggctgaaaggttggtacaagaggaagatgattatgaccacgaatatctaaatatttgtggtcttgacagtttaacaaacagcgctgctaaagttatacttggggaggattgtccagcattgagagaaagtagggttatctctgtacaatctctgtcaggtgcaggtgccttacatgtggctgctaaatttattaaaaagtacacacctgaaaagaaaatttacttgtcaaacccaacttggcctattcatcagtcaatatttgaaaatgtggatttagagactgattcctacccatattgggatgctaccaataaaagcttggattttgagggtttcataaaggcaattgatcatgccccaagaggatccatatttgttctgcatgcttgtgcacacaacccaacgggacttgatccaacgcaagagcaatggcatcaaattattgaatccattcagaaaggtgatcacatcccactatttgactctgcttatcaaggctttgcgtccggcgatcttgaaagagatgcatatgctatacgctacaccataaatcaattaagagactgtgcacctatatttgtagcacaatcatttgctaaaaatgttggaatgtatggtgagagagttggttgtctgcacttagttctaccggcgcagaaggaggatattgtaccaataaaggatgctataacctcccaactttcgagaattatcagaagtgaaatttcaactccaccagcatacggtgctaaggttgtatcaaaaatatttactacaccagaactgaaggagcaatggtatcaagatttggtgaccatgtcaagtagaatcatatcggttaggacacgtttacgtgacctattagctgagtacaatacacctggaaactgggatcatattgttcagcagtgtggtatgttctcatttacaggactaactcctgagatgaccaagcgattggaaactgaacatgcagtttatatggtgcctactggtagggcatctgttgcaggcctaaatactgggaatgtacaacatgttgctaaggctataaatgaagtggttaatcactttatgaaagattag

SEQ ID NO: 66502 - protein, 419 aa, Candida glabrata CBS 138
MVKISATVYNDVEPIKTDILFATKQRYLKDTRGFKVDLGVGAYRADNGKPWILPSVRKAERLVQEEDDYDHEYLNICGLDSLTNSAAKVILGEDCPALRESRVISVQSLSGAGALHVAAKFIKKYTPEKKIYLSNPTWPIHQSIFENVDLETDSYPYWDATNKSLDFEGFIKAIDHAPRGSIFVLHACAHNPTGLDPTQEQWHQIIESIQKGDHIPLFDSAYQGFASGDLERDAYAIRYTINQLRDCAPIFVAQSFAKNVGMYGERVGCLHLVLPAQKEDIVPIKDAITSQLSRIIRSEISTPPAYGAKVVSKIFTTPELKEQWYQDLVTMSSRIISVRTRLRDLLAEYNTPGNWDHIVQQCGMFSFTGLTPEMTKRLETEHAVYMVPTGRASVAGLNTGNVQHVAKAINEVVNHFMKD

SEQ ID NO: 66503 - DNA, 1362 bp, Candida glabrata CBS 138
  CDS (1)..(1362)
atgactctgaactacgcgagtgtgcaatgtgtgctgaggatgcgaagcgccgtgatgttaggccgcaggcggttgtcgcggaaagcattaaaacaaagtactttatttgatatccccatggcgccaccggatggtgttttggggctgacggaaactttcaatgcagacgagaacccaaataagattaatttgacagttggggtatataaagatggatggggtcaggtgacaaccttcccttcagtggctcaagctcaaaagattatagacatggatgtgggaatgaacactgatctatcatatttaccgataagtgggtgtgaggatttcaagaagcatacaattaattttctgtatagggacagctgcccgcaagacggccctgcattgattaagaatgatcgaatcagttttatacaaacgctaagtggaactggtgcattagctgtcgcatctaggcttttatcatcttttatttcgagaaagatatggatacccaaaccgtcttggcctaatcacaccaatatatttacccaaaacggttttaccaatcctagattttatagctactatgacagaggcgatttgacgattggaagatggttacaggaattgaggcatgaagttggtaaagactcaaataccaaaacaccacattgtattgttttacatgcctgctgccataatccgaccggccttgatccgacaaaaaagcaatgggaggatataatggatactatttatgaattaggaatgattccaattatagacatggcataccaaggtttagaatcgggcaagctgatagatgacgcatatttactaagactatgtctggacaccagcaggtacaggtcctgggataacggtctatatctgtgccaatcttttgccaaaaacatgggattgtatggagaaagagttggatctttaagtattgtggcacctgaacatgttcctggtgtgaaagaggtcctggactcacaacttaaacagattatcagaagtatgtattcctcccctcctggatatggttcaagagtcgctaaattagtcttatcgaatgataagctcaagtatcaatggtattctgatgttgagacaatggtgaatagactaaaatcggtgagggaaatgatacatgagaggttacaatgggaagagatagttaattttgagcaacaacatggtatgttctatttcacaaaattaggacctgatattgtaaaaaaactcagggaacaatactctatatatttaacgaacgatggcagaatgtccttaagtggcgttaataagagcaatgttgactacttatgcaattccatcaaggctgtgacatctagtaaaacattactgtaa

SEQ ID NO: 66504 - protein, 453 aa, Candida glabrata CBS 138
MTLNYASVQCVLRMRSAVMLGRRRLSRKALKQSTLFDIPMAPPDGVLGLTETFNADENPNKINLTVGVYKDGWGQVTTFPSVAQAQKIIDMDVGMNTDLSYLPISGCEDFKKHTINFLYRDSCPQDGPALIKNDRISFIQTLSGTGALAVASRLLSSFISRKIWIPKPSWPNHTNIFTQNGFTNPRFYSYYDRGDLTIGRWLQELRHEVGKDSNTKTPHCIVLHACCHNPTGLDPTKKQWEDIMDTIYELGMIPIIDMAYQGLESGKLIDDAYLLRLCLDTSRYRSWDNGLYLCQSFAKNMGLYGERVGSLSIVAPEHVPGVKEVLDSQLKQIIRSMYSSPPGYGSRVAKLVLSNDKLKYQWYSDVETMVNRLKSVREMIHERLQWEEIVNFEQQHGMFYFTKLGPDIVKKLREQYSIYLTNDGRMSLSGVNKSNVDYLCNSIKAVTSSKTLL

SEQ ID NO: 66505 - DNA, 1257 bp, Kluyveromyces lactis NRRL Y-1140
  CDS (1)..(1257)
atgagaataccaacgcgaagagggctgtcggccttgtcaagagtaactagggctcctgctgataagattctaggtttaacagagaagtttaacgttgacagacatccaaacaagataaatctgaccgttgggatctataaggacaaccggggccgtgtgaccaccttccctagtgtagcttctgcccaatcattacttgagacgagtctcgatctgaataatgatttatcgtatttgcctatcactgggtcgcaggattaccaaaacaatgtgttaaatttcttgtatcgagagtcaagtgacgggagtgaattattggagaacaacagaatcacgtttgtgcaaactttgagtggtaccggtgcattagctgtagcttcaaaactcttggcaacgtttgtgtcgaaaaccgtatggataccaaatccatcttgggctaatcattcgaacgttttccaatggaacggattcaatcagatcaaatattatacgtactacgaggatgggaaattgagtatcgataaatggctcaaggaactcaaggagagttgtagttctagggaccccgactggcccccctctatagtgttacacgcttgctgtcataatccaacaggagtggaccctacgttggaacaatggcaacagatattgccagtgatccatgatttaggaataactcccataatagacatggcgtaccaaggaatggaatcagggaaccttatacaggatgcttatctattaagaatgtgtctagaatacgaatggcccaacggtctatttgtgtgccaatcgtttgctaagaacatgggcttatacggtgaacgtgtaggttcgttaagtgtcgttgtcccaccaaatcccttggatctcaaatcaaccatcgactctcaactaaagaagattgtaagaggtatatactcttctccaccgggatatgggtctcgtgtagcgaacttggtgctaagcaatccaaaattgaagcagcaatggttcgtagacgttaagaatatgtctgatagactatggaacgttagaattcaaatgcatgagagattgaattggcccaatcttgttgattttaaaacacaacatgggatgttttattacacagggttaaacccatatcaggttcaaattctgcaggagaggtacggtatttatttaactgaagacggcaggatgtcgttatctggagttaacgacggtaatattgattatttatgcgattctttgcgccaagtggttcaataa

SEQ ID NO: 66506 - protein, 418 aa, Kluyveromyces lactis NRRL Y-1140
MRIPTRRGLSALSRVTRAPADKILGLTEKFNVDRHPNKINLTVGIYKDNRGRVTTFPSVASAQSLLETSLDLNNDLSYLPITGSQDYQNNVLNFLYRESSDGSELLENNRITFVQTLSGTGALAVASKLLATFVSKTVWIPNPSWANHSNVFQWNGFNQIKYYTYYEDGKLSIDKWLKELKESCSSRDPDWPPSIVLHACCHNPTGVDPTLEQWQQILPVIHDLGITPIIDMAYQGMESGNLIQDAYLLRMCLEYEWPNGLFVCQSFAKNMGLYGERVGSLSVVVPPNPLDLKSTIDSQLKKIVRGIYSSPPGYGSRVANLVLSNPKLKQQWFVDVKNMSDRLWNVRIQMHERLNWPNLVDFKTQHGMFYYTGLNPYQVQILQERYGIYLTEDGRMSLSGVNDGNIDYLCDSLRQVVQ

SEQ ID NO: 66507 - DNA, 1266 bp, Kluyveromyces lactis NRRL Y-1140
  CDS (1)..(1266)
atgtccagaaccatacttaacaacatccaagaattgccaggcgatgctttattcgctatcaaacaacgtttagctgaagaccctagatctgctaaggtcgatttgggtattggtgcctatagagatgaggatggtaaaccatgggtattaccagctgttcgtaaagctgaaacattgatccattctgacgcatctttcaaccatgaatatttgggtattgccggtttacctgctttgacttcaggtgcagccaaagtgatcttgggcgatgattcatctgctttggctgagaaaagagttgtttctgctcagtctctatccggtactggtgccttacacattgcagctaaattcatccaaaagttcttacctgggaagttgttgtatgtttctgatccaacctgggctaaccatgtctctatctttgagtcacaaggtgtcaaaactgctacgtatccttactgggatgctgctaccaaatctttggatttggaaggatttatcaaggctatagaatcaagtccaagaggctccgtgttcttgcttcatgcttgtgctcataatccaactggtttggatccaaccgaagctcaatgggagaaaattctcagtgcctgtgtgaagaatgatatcatcccattgttcgactctgcctaccagggtttcgcatctggtagtctaacgaatgatgcttttgccgtcagacttggtgtgaagaaattcgctgaatctgctccaattttcatctgtcaatcatttgccaagaatgttggtatgtacggtgaacgttgtggatgcattcatttgattgttccaagacaagaatctaacgttaatgtttccactattaccaaagctgttgcatctcaaatcagtaaaatcaccagatcagaggtttctaaccctcctgcttacggtgccaagatcgttgccaaaattttgaacaatgctgaattgactgaacaatggcataaggatatggttacaatgtctcaaagaatcaccaaaatgagacactccttacgtgacaagttactcgagttacagactccaggtaactgggatcacatcgtcaaccaatgtggtatgttctcttacaccggtttaacaaagccaatggtggaaagattagaaaaagaacatggtgtatacatggttgctagtggtagagcttccattgctgggttgaatgaaaagaacgttgaacatgtggctaaggctattaatgaagtcgttcgtcatttcaatgaatcatccaaattataa

SEQ ID NO: 66508 - protein, 421 aa, Kluyveromyces lactis NRRL Y-1140
MSRTILNNIQELPGDALFAIKQRLAEDPRSAKVDLGIGAYRDEDGKPWVLPAVRKAETLIHSDASFNHEYLGIAGLPALTSGAAKVILGDDSSALAEKRVVSAQSLSGTGALHIAAKFIQKFLPGKLLYVSDPTWANHVSIFESQGVKTATYPYWDAATKSLDLEGFIKAIESSPRGSVFLLHACAHNPTGLDPTEAQWEKILSACVKNDIIPLFDSAYQGFASGSLTNDAFAVRLGVKKFAESAPIFICQSFAKNVGMYGERCGCIHLIVPRQESNVNVSTITKAVASQISKITRSEVSNPPAYGAKIVAKILNNAELTEQWHKDMVTMSQRITKMRHSLRDKLLELQTPGNWDHIVNQCGMFSYTGLTKPMVERLEKEHGVYMVASGRASIAGLNEKNVEHVAKAINEVVRHFNESSKL

SEQ ID NO: 66509 - DNA, 1221 bp, Debaryomyces hansenii CBS767
  CDS (1)..(1221)
ttgaaaatgacaatcaaaagtaatttttctaatttaacgagagaagcaccagatccaatcgtggaaaccatgaccatgtatgcacaagatacttctccagataagattgatgtatcgataggtgtatacaaaggagagaagggagagtcatatgtttttcctgcggtgtctaaggctaagaagcacttatttgaaaatgatccgggacatagctataccaatatggcaggtattccagaatatacgagcggagcacgtaaggttgtgtttggagaaaaatatggtaccgaaggaaagattgcatcgttacagactatttcagggacaggggcttgccatatggcatttcttcttcttcgtgaagcggggctcactaacttctatgttggtacaccatgttggtcgaactatgggccaatgattacgcatgttggctcaaaatactccacatacactcactatgacgaaagtctccgtgggattgattttgatgctgttcttgaggcacttcagaatgcaccatcaaaatctgtattcttatttcaagcgtgttgtcataaccctacaggagcggatttttccaaagatcagtggaagcaaattgcttcaattgttaagtccagagatatcttccctgtttttgatattgcataccaaggattttcaagcggcgataaggatgttgatgcctggcctgtgaggtatttctacgagcaaaatttagaatttttagtttgccaatcattctccaagaacatgggattatacagtgaaagagcaggatgtcttcatgctgtggtacaagatacggattacgttccaaacgtgcaaagtcaacttgtggcactctttagatcggagtgctcttttgctccagcatatggtgcaagaattgccagtattatcatcaacgagcctggattagaaaatcagtggggccaagaagtttccgatgtgaccacaagattgaagaatattagaaagcagattttggataaatttctcgaattaggtactcctggtaagtgggatcatgtagtaaagcagcaagggttgttttggtattctggattatcacccgaacaaaacgataagcttatagaagaccatcatatttattcaacttcaattggcagagttaatattgccgggttaaatgaaagtagtgttgataaatttgttggcgccattgacaaggttgtcagagattctattggttaa

SEQ ID NO: 66510 - protein, 406 aa, Debaryomyces hansenii CBS767
LKMTIKSNFSNLTREAPDPIVETMTMYAQDTSPDKIDVSIGVYKGEKGESYVFPAVSKAKKHLFENDPGHSYTNMAGIPEYTSGARKVVFGEKYGTEGKIASLQTISGTGACHMAFLLLREAGLTNFYVGTPCWSNYGPMITHVGSKYSTYTHYDESLRGIDFDAVLEALQNAPSKSVFLFQACCHNPTGADFSKDQWKQIASIVKSRDIFPVFDIAYQGFSSGDKDVDAWPVRYFYEQNLEFLVCQSFSKNMGLYSERAGCLHAVVQDTDYVPNVQSQLVALFRSECSFAPAYGARIASIIINEPGLENQWGQEVSDVTTRLKNIRKQILDKFLELGTPGKWDHVVKQQGLFWYSGLSPEQNDKLIEDHHIYSTSIGRVNIAGLNESSVDKFVGAIDKVVRDSIG

SEQ ID NO: 66511 - DNA, 1296 bp, Debaryomyces hansenii CBS767
  CDS (1)..(1296)
atgttatcaagggtacaattaaagcgcataccaaattgcagacagttttctgtgatgaacagggcttgcaaatggaacgatattccattagcaccaccggataaaatcttgggtatcagcgaagcatttgttaaggattccaacaccaagaaaatcaatttgggagttggtgcatacagaaacaactctggtaagccaattgtgttcgaatcggtcaaaaatgctgaggccaagttattagaaacagaaaccgaaaaggaatacactggtattatcggtaacaagaacttccaaaaagtggtcagaaactttattttcaacaacagcggtaaggacgccaatggggccagattgattgacgaaaacagaatcgtcaccagtcaaaccatttctggtaccggttctttgagggttattgctgatttcttacacagattcaacacggccaagaaaatatacgtgccaaagccaacctgggccaaccacattgctgttttcactgatgctggtatgagtaccgaatactacgattactacaataaggaaatcaacaacttggactacgataagttgaagcaatcgttgtctaacgccgaagaaggttctgtggtcttgttgcacgcttgttgccacaaccctactggtatggacttgtcatccgaacaatgggacgaagtcttagccatcgtccaacaaaagcaattgttcccattagttgatatggcctaccagggtttcgcgtccggtaacccatacaaggacattggattgattcgtagattgaacgagttagtcgtcaacggtgacatttccacctacgctttatgtcaatctttcgctaagaacatgggtttgtacggtgaaagaactggttctatctccattgtcaccgaatctgctgaacattccactgcgattgagtcccaattgaagaagttaatcagaccaatctactcgtcgcctccaatccacggttccaagattgtggaaaccatcttcgccgacgaatccttgtacaactcttggttaagtgacttggaccaagttgtttccagattaaacaccgtcagaaccaagttatacgagaaattggacaagtccaactacaactgggaccacttattaaaacaaagaggtatgttcgtttacactggtttatcagctgaacaagttattgaattgagagaaaagtactctgtttacgctactgaagacggtagattctccatttctggtatcaacgacaacaacgttgattacttggccgatgccatgaaccaagttgttaacaaataa

SEQ ID NO: 66512 - protein, 431 aa, Debaryomyces hansenii CBS767
MLSRVQLKRIPNCRQFSVMNRACKWNDIPLAPPDKILGISEAFVKDSNTKKINLGVGAYRNNSGKPIVFESVKNAEAKLLETETEKEYTGIIGNKNFQKVVRNFIFNNSGKDANGARLIDENRIVTSQTISGTGSLRVIADFLHRFNTAKKIYVPKPTWANHIAVFTDAGMSTEYYDYYNKEINNLDYDKLKQSLSNAEEGSVVLLHACCHNPTGMDLSSEQWDEVLAIVQQKQLFPLVDMAYQGFASGNPYKDIGLIRRLNELVVNGDISTYALCQSFAKNMGLYGERTGSISIVTESAEHSTAIESQLKKLIRPIYSSPPIHGSKIVETIFADESLYNSWLSDLDQVVSRLNTVRTKLYEKLDKSNYNWDHLLKQRGMFVYTGLSAEQVIELREKYSVYATEDGRFSISGINDNNVDYLADAMNQVVNK

SEQ ID NO: 66513 - DNA, 1263 bp, Debaryomyces hansenii CBS767
  CDS (1)..(1263)
atgtcaaaatatttttcaagtattaaagaattacctccagatccattatttgggttgaaagctagatacacggccgatgaccgttcagataaagtagatttgggaatcggtgcttatagagataataacgggaagccatggatattaccagcggttagaaaggcagaagtgaagttggttaactcggaagaatacaaccacgagtatttatcgatttcggggtatcagccatttttgaccgagagtgctaaagttattttgggaaacaactcagctgccatcaaggaatcaagagtgaccagtcaacaatcgttgtctggtaccggggctttgcacttggctggagcctttttgaaggaatttttcaccactgaatcgaagaaagctccaacggtgtacttatcgaatcctacgtgggccaaccataaccaaattttcactagtttgggtttgcaggtagagaagtatccatactgggacaatgataccaaatcattgaacttgaaggggttcttgtcgactattcaagaagcacctaagaactcgatttttgtgttgcatgcgtgtgcccataatcctactggactcgatgccaccaaggagcaatgggaggaaattctcgaagcattggccaagaatgaacacttagcattatacgactctgcctaccaagggttcgctagtggtaacttggataacgatgggtttgctgtaagattggctgtcgactcgaagaagttgaaaaccccaattgttatctgtcaatcttttgcaaagaattgtggtatgtacggtgaaagagttggtgcaattcacgtcatcccagccgagaatgataagtcgttgaacaacgctataaagtcgcaattgaacaagctcaccaggtcggaaatttctaatcccccagcgtacggagccaaggttgttgcaaccattttgaccgactcagaattgagacagcaatgggaagacgacttggtcaccatgagttcgagaatcaacaaaatgagaaccaggttgagagatttgttgacaaaccaatacagcactcctggcaactgggatcacattgtctcccaatcaggtatgttctcgttcacaggattgaccccagatatggtgtccagattggaaaagaaccacggaatctacttggttagctccggtagagcctccgttgctggtttgaatgatggcaacgtcgaacaggtcgctaaggctatcgacgaagttgttcgtttctactccaagtccaagttataa

SEQ ID NO: 66514 - protein, 420 aa, Debaryomyces hansenii CBS767
MSKYFSSIKELPPDPLFGLKARYTADDRSDKVDLGIGAYRDNNGKPWILPAVRKAEVKLVNSEEYNHEYLSISGYQPFLTESAKVILGNNSAAIKESRVTSQQSLSGTGALHLAGAFLKEFFTTESKKAPTVYLSNPTWANHNQIFTSLGLQVEKYPYWDNDTKSLNLKGFLSTIQEAPKNSIFVLHACAHNPTGLDATKEQWEEILEALAKNEHLALYDSAYQGFASGNLDNDGFAVRLAVDSKKLKTPIVICQSFAKNCGMYGERVGAIHVIPAENDKSLNNAIKSQLNKLTRSEISNPPAYGAKVVATILTDSELRQQWEDDLVTMSSRINKMRTRLRDLLTNQYSTPGNWDHIVSQSGMFSFTGLTPDMVSRLEKNHGIYLVSSGRASVAGLNDGNVEQVAKAIDEVVRFYSKSKL

SEQ ID NO: 66515 - DNA, 1302 bp, Yarrowia lipolytica CLIB122
  CDS (1)..(1302)
atgctccgaaccatcgcccgaacccacgctgtggccgccaccaaggtcgtgcgagcctccactttttctgccacccccgccgcctcttttgtgcgattccagtccgtctgggccaaggtcccccagggtccccccgacgccattctcggaatcaccgaggcgttcaagaaggacgcctttgagcagaagatcaacctcggtgttggcgcctaccgagatgacggcggaaagcccttcgttcttccctccgtccgagaggccgagaaggaggtggtgaacaaggccctcgacaaggagtacgcccccatcaccggagtccccgccttcaccaaggctgctgccgagctcgcttacggcgccgactcccccgccgtcctcgaggaccgaattgccatcacccagaccatctccggtaccggtgctctgcgaatcggagccgagttcctcaacaagttctactcctccaagaagattctgctcccccagccttcttgggctaaccacaaggccgttttcaccgccgccggcctcgagcccgccacctaccggtactacgaccccaagaacattgccctcgactttgagggtctgctcgccgacctggaggctgcccccaacggaaccgccgtccttctgcacgcctgtgcccacaaccccaccggtgttgaccccactcccgagcagtggcgaaagattgaggaggtcgtcaaggccaagggccacttccccttcttcgacatggcctaccagggctttgccaccggtgacgtcaaccgagacgcctaccccatccgatactttgtcgagcagggccacgaggttgctctgtgccagtccttcgccaagaacatgggtctttacggtgagcgagtcggtgctttctctcttgtctgccaggacaccgccgagaagaaccgagttgactctcagctgaagattatcatccgacccttctactccaacccccccgtccacggtgcccgaatcgccgccaccatcctcaacaaccccgagctcaagaagcagtggctcggtgaggtcaagcagatggccgaccgaatgatcaagatgcgagctctgctcaaggagaacctcgagagacttggctcccagcagaactgggaccacgtcacctctcagattggtatgttctgctacaccggtctgtctcctgagcaggttgagcgacttgccaaggagttctccgtctacggaaccaaggacggccgaatctccattgccggaatcacctctcagaacgtcggccgactggcccaggctatctacgaggtgaccaaatag

SEQ ID NO: 66516 - protein, 433 aa, Yarrowia lipolytica CLIB122
MLRTIARTHAVAATKVVRASTFSATPAASFVRFQSVWAKVPQGPPDAILGITEAFKKDAFEQKINLGVGAYRDDGGKPFVLPSVREAEKEVVNKALDKEYAPITGVPAFTKAAAELAYGADSPAVLEDRIAITQTISGTGALRIGAEFLNKFYSSKKILLPQPSWANHKAVFTAAGLEPATYRYYDPKNIALDFEGLLADLEAAPNGTAVLLHACAHNPTGVDPTPEQWRKIEEVVKAKGHFPFFDMAYQGFATGDVNRDAYPIRYFVEQGHEVALCQSFAKNMGLYGERVGAFSLVCQDTAEKNRVDSQLKIIIRPFYSNPPVHGARIAATILNNPELKKQWLGEVKQMADRMIKMRALLKENLERLGSQQNWDHVTSQIGMFCYTGLSPEQVERLAKEFSVYGTKDGRISIAGITSQNVGRLAQAIYEVTK

SEQ ID NO: 66517 - DNA, 1290 bp, Aspergillus nidulans FGSC A4
  CDS (1)..(1290)
atgctttctactctaaaagtcgccagccgccaggctgcctcgcgcaatgctagcgtgcgctccgtgtttgccggtgccagatgtgcttccacctggtccaatgttccccagggtcctcctgacgctatccttggtatcaccgaggcctacaaggccgacagtttcaaggaaaagatcaacctgggtgttggtgcctaccgtgacgaccagggtaagccctacgttctgccctccgtccgcgccgccgaggacaaggttgttgcatcgcgtttcgataaggaatatgctggaatcaccggtatcccctcgttcaccaaggctgccgcgcagctggcctacggagcggactctcccgttttgaaggaggaccgtctcgtgatcacccagtccatctctggtaccggtgctctgaggatcggcggcgctttccttcagcgtttctatcccggcgcaaagaagatctatctccctactcccagctgggccaaccacaacgctgtcttcaaggactcgggcttggaggttgagaagtaccgctactacaacaaggacaccatcggcctcgactttgagggtctcgtcgaggacctcaaggctgctcccaacaacagcatcatccttctccatgcttgcgctcacaaccccaccggtgtcgaccctacccaggaccagtggcgccagattagcaacgtaatgaaggagaagggccactttgccttcttcgacatggcttaccagggcttcgccagtggaaacgccgataccgacgcctttgcgcctcgacacttcgttgagcagggccacaacatcgctctgtgccaaagtttcgccaagaacatgggactctacggtgagcgtgtcggtgctttctctctcgtctgcgaatccgccgaggagaagaagcgtgtcgactctcagatcaagatcctcattcgtcccttctactccaaccctcccgtgcacggtgctcgtgtcgcctcgactatcatgaatgaccctgcgcttaacaagcaatggctcggcgaggttaagggcatggctgaccgcatcattgagatgcgtgctcttctcaagaagaacctggaagagcttggcagcaagcacgactggacgcacatcaccagccagatcggcatgtttgcttacactggtctcaagcccgagcagatggaggctcttgccaaggagcactccgtctacgccaccaaggacggccgtatctcagtggctggtatcactacgggcaacgtcaagcgccttgccgaatccatctacaaggtgactggttaa

SEQ ID NO: 66518 - protein, 429 aa, Aspergillus nidulans FGSC A4
MLSTLKVASRQAASRNASVRSVFAGARCASTWSNVPQGPPDAILGITEAYKADSFKEKINLGVGAYRDDQGKPYVLPSVRAAEDKVVASRFDKEYAGITGIPSFTKAAAQLAYGADSPVLKEDRLVITQSISGTGALRIGGAFLQRFYPGAKKIYLPTPSWANHNAVFKDSGLEVEKYRYYNKDTIGLDFEGLVEDLKAAPNNSIILLHACAHNPTGVDPTQDQWRQISNVMKEKGHFAFFDMAYQGFASGNADTDAFAPRHFVEQGHNIALCQSFAKNMGLYGERVGAFSLVCESAEEKKRVDSQIKILIRPFYSNPPVHGARVASTIMNDPALNKQWLGEVKGMADRIIEMRALLKKNLEELGSKHDWTHITSQIGMFAYTGLKPEQMEALAKEHSVYATKDGRISVAGITTGNVKRLAESIYKVTG

SEQ ID NO: 66519 - DNA, 1338 bp, Aspergillus nidulans FGSC A4
  CDS (1)..(1338)
atgtccactccttcatccgtatcttccagttcctactcggccgccaaatctcggcttgcttctctcgcctcacacatcatgggctcctcatcagcttccccggtcttctcgaccgctgttgtcccgtcggcgccagaggatccgctctttggtctcgcgcaggcttatcgccaggacccctcagacaagaaggtcgatctagtcattggtgcttatcgcgacgataatgcgaaaccctgggttttgcctgttgtcaagaaggcagatgagctcatccgcaacgaccccaaccttaaccacgaatacctcccaatcaaaggcctcgctgaatatacaaccgccgcccagaaactcatcatcggcgccgactcgcccgccatcgcggagaaccgtgtctgcacattccagaccatctccggcacaggcgccgtccatctaggcgcgctcttcctcgcccgcttccaccccgcaacccccaaaccgaccctctacctctccagcccgacctgggcaaaccaccaccagatcttcacaaatgtcggcttcacgcttgcgaactacccgtacttctcgccgcagacgaaaggcctcgatttcgacggcatgatcaacgcgttgcgctccgcgcccgccgggtcgatcatcctcctccatgcctgcgcccacaaccccacgggcgtggatctcacccaggagcagtggaaggaagttgccgtggtcatgcgcgaccgctcgcatttccccttttttgactgcgcataccagggtttcgcatcgggcgatctggcgcgtgacgcctgggcgatccggtatttcgtcgagcaagggttcgagctctgcatcgcgcagtccttcgccaagaactttggcttgtacggtgagcgcacgggcgcctttcatttcgtttccgcgccgggcccggaagccgctcagtcctcggcacatgtcgcctcgcagctggccattctgcaacgctctgagatctcgaacccgcctgcgtacggtgcgcggattgcgagtaaagtgctcaatgaccctgagctgtttgcgcaatgggaggacgatctgcgaacgatgagtgggcggatcgtcgagatgaggaaggggctcaggcagcgccttgaggagaagaagacacccggctcgtggaaccatattaccgaccagatcggcatgtttagctttacggggctcagtgaggcacaggttaaggtgctgcgtgagaagtggcatgtctatatgaccaagaacggtcgcatctccatggctggtctcaactcccataacctggattactttgccgaggcggttgatagcgttgtgagggagacatcgtga

SEQ ID NO: 66520 - protein, 445 aa, Aspergillus nidulans FGSC A4
MSTPSSVSSSSYSAAKSRLASLASHIMGSSSASPVFSTAVVPSAPEDPLFGLAQAYRQDPSDKKVDLVIGAYRDDNAKPWVLPVVKKADELIRNDPNLNHEYLPIKGLAEYTTAAQKLIIGADSPAIAENRVCTFQTISGTGAVHLGALFLARFHPATPKPTLYLSSPTWANHHQIFTNVGFTLANYPYFSPQTKGLDFDGMINALRSAPAGSIILLHACAHNPTGVDLTQEQWKEVAVVMRDRSHFPFFDCAYQGFASGDLARDAWAIRYFVEQGFELCIAQSFAKNFGLYGERTGAFHFVSAPGPEAAQSSAHVASQLAILQRSEISNPPAYGARIASKVLNDPELFAQWEDDLRTMSGRIVEMRKGLRQRLEEKKTPGSWNHITDQIGMFSFTGLSEAQVKVLREKWHVYMTKNGRISMAGLNSHNLDYFAEAVDSVVRETS

SEQ ID NO: 66521 - DNA, 1251 bp, Aspergillus nidulans FGSC A4
  CDS (1)..(1251)
atgaccgtgctcaatgtcagcccagttcctccggacgaaattttcgccctgaaccgtgcatacatcgacgatgacttcccgcagaaggtcaatctcggtgtaggcgtttaccgcaccaacgagggccagccatggcctctccccgtcgttgaggaagcagagaagcagctcgcagccgaaaacagcgtcttccgccatgaatacacagccattgaaggtgatagggcattcctccctctcgctcgggacctaatgtttgggttcgacggccaagctacttctgatgcgaagcaggaggcagccaaagcacgcattggcaccgtccagacagtcgccggcaccggcgcaaaccatctcggtgccctcttcctcgcaactcacatgaagccacgaaatgtctggctctccaacccctcttgggcaaaccacctcactatttgggaactcgccggagtgccccgcaaaacatacccctattactctgccgccacccgctcctttgatttcgacggcatgatctcaactctcgaatccgaagctcaggaaggagacgtgattcttctccacgcctgcgcccacaatcccacaggactcgaccccaacaaggagcaatggaaagctatcatcgacctctgcgagcgcaagcgcattttccctttcttcgactcagcataccaaggcttcgcctccggatccgtagacgaagacgcctgggctgtccggtacgtcctaaacgagaagccgcagatggaaatgtgcgttgcgcaatccttctctaagaactttggcctctacggccagcgagtcggcgccttccattacgtcctcaacgaaggcgcagaggatctccgcgatacagtcgtcaacaacctttgccacctcatccgcggagagtactccatgggtcccacggcaggctgcaacatcgtcaagaaagtcctcacaagtcctgagctcacggcaaaatggcaccaggatctgaaggtcatgagttcgcggataatttccatgcgcgaagctctttacaatgaactagtcagactcaaaacccccggaacttggaaacacatcgtcgaacagaacggaatgttctcctacacaggacttacaccttcacaagtctacgctcttaaagataaattccacatctacctgctcaagtccggcagagcctccatcagtggactgagcccgaagaatgtaaattacgtcgccagagctattgacgaggttgtacgaaatgtcaactga

SEQ ID NO: 66522 - protein, 416 aa, Aspergillus nidulans FGSC A4
MTVLNVSPVPPDEIFALNRAYIDDDFPQKVNLGVGVYRTNEGQPWPLPVVEEAEKQLAAENSVFRHEYTAIEGDRAFLPLARDLMFGFDGQATSDAKQEAAKARIGTVQTVAGTGANHLGALFLATHMKPRNVWLSNPSWANHLTIWELAGVPRKTYPYYSAATRSFDFDGMISTLESEAQEGDVILLHACAHNPTGLDPNKEQWKAIIDLCERKRIFPFFDSAYQGFASGSVDEDAWAVRYVLNEKPQMEMCVAQSFSKNFGLYGQRVGAFHYVLNEGAEDLRDTVVNNLCHLIRGEYSMGPTAGCNIVKKVLTSPELTAKWHQDLKVMSSRIISMREALYNELVRLKTPGTWKHIVEQNGMFSYTGLTPSQVYALKDKFHIYLLKSGRASISGLSPKNVNYVARAIDEVVRNVN

SEQ ID NO: 66523 - DNA, 1251 bp, Candida albicans SC5314
  CDS (1)..(1251): transl_table=12
atggctccatttgcaggtattaaagaattaccaccagatccattgttcggattaaaggcacgttacaatgctgattctcgtacaaataaagttgatttggggattggtgcctacagagacaacaacgggaaaccatggattttgccagctgttagacaagcagaacagaaattgatcaactcacctgattacaaccatgagtatctttctatcagtggatttgctccatttactgaaagtgcagccaaagttattttgggtgaaaactcattagccatcaaggataaaaaaattgtatcacaacaaagtttatcaggtaccggtgccttacatttagctggtgttttcattaaagagttttaccaaggtaaccacaccatttatttatcacaaccaacttgggccaaccacaagcaaattttcgaatacattggtttcaaagttgctagttatccatattggaacaatgacaccaagtcattggacttgagcgggttcttgaaagccatttccagtgctcctgatggttcagtgtttttgttgcatgcatgtgcccataatcctactgggttagatcctaatcaaagtcaatgggacgaaatcttggctgccttggaaaaaaagaagcatttcatcatttttgactctgcatatcaaggttttgccagtggagatttggaaaaagatgcttatccaattagaaaggcaattgactctaaagttatcacttctccaattattatctgtcaatcatttgccaagaatgttggtatgtatggagaaagagttggtgccatccatgtgataccatcaactgttgaatctaacgattccttgaaccgagctataaagtctcaattgaacagaatcatacgttctgaactttctaatcctcctgcctatggttctaaaattgttgctaccatcttgaatgatccagaattatattctcagtggcgtaaagatttagtgacaatgtcttctagaattggtgagatgagaaatacattgagaagcaaattggaaagtttaggaaccccaggtacttggaatcacataactgaacaaacaggtatgttttcatttactggtttaaccccacaaatggttgaacgtttggagaaacaccacggtatctatttggttagcagtggtagagcctctgttgccggattgaatgaacataatgtcgaccaagtagctaaagctattgatgaagtggttagacattttggtaaaagtaaactttag

SEQ ID NO: 66524 - protein, 416 aa, Candida albicans SC5314
MAPFAGIKELPPDPLFGLKARYNADSRTNKVDLGIGAYRDNNGKPWILPAVRQAEQKLINSPDYNHEYLSISGFAPFTESAAKVILGENSLAIKDKKIVSQQSLSGTGALHLAGVFIKEFYQGNHTIYLSQPTWANHKQIFEYIGFKVASYPYWNNDTKSLDLSGFLKAISSAPDGSVFLLHACAHNPTGLDPNQSQWDEILAALEKKKHFIIFDSAYQGFASGDLEKDAYPIRKAIDSKVITSPIIICQSFAKNVGMYGERVGAIHVIPSTVESNDSLNRAIKSQLNRIIRSELSNPPAYGSKIVATILNDPELYSQWRKDLVTMSSRIGEMRNTLRSKLESLGTPGTWNHITEQTGMFSFTGLTPQMVERLEKHHGIYLVSSGRASVAGLNEHNVDQVAKAIDEVVRHFGKSKL

SEQ ID NO: 66525 - DNA, 1314 bp, Candida albicans SC5314
  CDS (1)..(1314): transl_table=12
atgtacaagactcaattgattaaatcttcaactcaagctagatttttggctgttagacaattatcttccactagtcaattattgaaatggaatgatattccattggctccaccagacaagattttgggtatttctgaagcttataacaatgattctaaccctcaaaaagtcaatttgggggttggtgcttatagagataattctggtaaaccaattattttcccatcagttaaaaaagctgaagaaattttattgggtaaagaaactgaaaaggaatatactgccattgttggttccaaaaatttccaatcaattgtgaaaaatttcattttcaacaattctaataaagatgccaatggtaaacaattaattgatgatggtagaattgttactgctcaaaccatctctggtactggatcacttagagttatcgctgatttcttgaatcgtttctattctaacaagaaaattttggttccaaaaccaacttgggctaatcatgttgctgttttcaaagatgctggtttagaaccagaattttatagttattatgaaactagcaaaaatgatttggattatgccaatttgaaaaaatctttaactgctgctccagaaggttcaattgttttattacatgcttgttgtcataacccaaccggtatggatttgacttcagaacaatgggatgaagttttacaaattgttcaagataaaaaattcttcccattagtcgatatggcttatcaaggttttgctagtggtaaaccatttgaagatatcggtttaatcagaaaattgactaaattagctaatgaaaacaaaattccttcatttgccttgtgccaatcatttgctaagaatatgggtctttatggggaaagaactggttctatctctataatcaattcatcaggtgaagcttctaaagctgttgaatcacaattgaaaaaattaattagaccaatttattcatctccaccaattcatggttctaagattgttgaagttattttcgatgaaagttctggtttattacctcaatggttagatgaattagataaagttgttggtagattgaacactgttcgttccaaattatacgaaaaattagataaatccaattacaactgggaccatttgttaaaacaaagaggtatgtttgtttacactggtttatcaccagaacaagttattagattaagaaacgaatattcagtttatgccactgaagatggtagattcagtatttctggtattaatgataataacgttgattatttggctaatgctattaatgaagtcatcaaaaactaa

SEQ ID NO: 66526 - protein, 437 aa, Candida albicans SC5314
MYKTQLIKSSTQARFLAVRQLSSTSQLLKWNDIPLAPPDKILGISEAYNNDSNPQKVNLGVGAYRDNSGKPIIFPSVKKAEEILLGKETEKEYTAIVGSKNFQSIVKNFIFNNSNKDANGKQLIDDGRIVTAQTISGTGSLRVIADFLNRFYSNKKILVPKPTWANHVAVFKDAGLEPEFYSYYETSKNDLDYANLKKSLTAAPEGSIVLLHACCHNPTGMDLTSEQWDEVLQIVQDKKFFPLVDMAYQGFASGKPFEDIGLIRKLTKLANENKIPSFALCQSFAKNMGLYGERTGSISIINSSGEASKAVESQLKKLIRPIYSSPPIHGSKIVEVIFDESSGLLPQWLDELDKVVGRLNTVRSKLYEKLDKSNYNWDHLLKQRGMFVYTGLSPEQVIRLRNEYSVYATEDGRFSISGINDNNVDYLANAINEVIKN

SEQ ID NO: 66527 - DNA, 1314 bp, Candida albicans SC5314
  CDS (1)..(1314): transl_table=12
atgtacaagactcaattgattaaatcttcaactcaagctagatttttggctgttagacaattatcttccactagtcaattattgaagtggaatgatattccattggctccaccagacaaaattttgggtatttctgaagcttataacaatgattctaaccctcaaaaaatcaatttgggggttggtgcttatagagataattccggtaaaccaattattttcccatcagttaaaaaagctgaagaaattttattgggtaaagaaactgaaaaggaatatactgccattgttggttccaaaaatttccaatcaattgtgaaaaatttcattttcaacaattctaataaagatgccaatggtaaacaattaattgatgatggtagaattgttactgctcaaaccatctctggtactggatcacttagagttatcgctgatttcttgaatcgtttctattctaacaagaaaattttggttccaaaaccaacttgggctaatcatgttgctgttttcaaagatgctggtttagaaccagaattttatagttattatgaaactagcaaaaatgatttggattatgccaatttgaaaaaatctttaactgctgctccagaaggttcaattgttttattacatgcttgttgtcataacccaaccggtatggatttgacttcagaacaatgggatgaagttttacaaattgttcaagataaaaaattcttcccattagtcgatatggcttatcaaggttttgctagtggtaaaccatttgaagatatcggtttaatcagaaaattgactaaattagctaatgaaaacaaaattccttcatttgccttgtgccaatcatttgctaagaatatgggtctttatggggaaagaactggttctatctctataatcaattcatcaggtgaagcttctaaagctgttgaatcacaattgaaaaaattaattagaccaatttattcatctccaccaattcatggttctaagattgttgaagttattttcgatgaaagttctggtttattacctcaatggttagatgaattagataaagttgttggtagattgaacactgttcgttccaaattatacgaaaaattagataaatccaattacaactgggaccatttgttaaaacaaagaggtatgtttgtttacactggtttatcaccagaacaagttattagattaagaaacgaatattcagtttatgccactgaagatggtagattcagtatttctggtattaatgataataacgttgattatttggctaatgctattaatgaagtcatcaaaaactaa

SEQ ID NO: 66528 - protein, 437 aa, Candida albicans SC5314
MYKTQLIKSSTQARFLAVRQLSSTSQLLKWNDIPLAPPDKILGISEAYNNDSNPQKINLGVGAYRDNSGKPIIFPSVKKAEEILLGKETEKEYTAIVGSKNFQSIVKNFIFNNSNKDANGKQLIDDGRIVTAQTISGTGSLRVIADFLNRFYSNKKILVPKPTWANHVAVFKDAGLEPEFYSYYETSKNDLDYANLKKSLTAAPEGSIVLLHACCHNPTGMDLTSEQWDEVLQIVQDKKFFPLVDMAYQGFASGKPFEDIGLIRKLTKLANENKIPSFALCQSFAKNMGLYGERTGSISIINSSGEASKAVESQLKKLIRPIYSSPPIHGSKIVEVIFDESSGLLPQWLDELDKVVGRLNTVRSKLYEKLDKSNYNWDHLLKQRGMFVYTGLSPEQVIRLRNEYSVYATEDGRFSISGINDNNVDYLANAINEVIKN

SEQ ID NO: 66529 - DNA, 1302 bp, Ustilago maydis 521
  CDS (1)..(1302)
atgatgctcaccgctgccaccatccgaacggctgttcgagcctcgcaggcccctctcctgggcgctatgtcgctacctgccgtgcgtcagttcaagagtacttgggctcacgtcaaggctggacctcctgacccgattctcggtgttaccgaggcgttcaagcgcgaccaggaccctcgcaagatcaacctcggtgttggtgcctaccgtgacgagaacggaaagccttatgtgctcccctcggtgcgtcaggccgaggagctcgtcatcaccgctaagggtgacaaggagtacctgcccatcactggtctcgccgactttaccaagaacgccgccgttctcgcctacggcaaggacagcgcgcccatcaaggagaaccgcattgctatcacccagtcgatctcgggaaccggtgctcttcgcatcggtggtgctttcctgcagcgacactaccccgaggccaagaccatctacctgcccacaccttcgtggggtaaccacacacctatcttccgtgacagcggtcttgaggtgaaacagtaccgctactacgacaagaagacggtgggtctcgacttcaagggcatgattgaggacatcaaggcggcacctgccggttcgattgtcctgctgcatgcgtgcgcgcacaaccccaccggtgtcgaccccaccgtcgagcagtggaaagaaatcagcaacgtggtcaaggagaagggtcacttccccttcttcgacatggcctaccagggctttgccagtggtgacacggacaaggacgcctttgcggtgcgccactttgtcgccgagggccaccagatctgcctctcgcagtcgttcgccaagaacatgggtctgtatggtgagcgtgtcggcgcgttttcgatcgtctgcgctgaccctgacgagcgtgctcgtgtcgacagccagatcaagatcatcgttcggcccatgtactcgaacccacctatgcacggtgccaagatcgccggtaccatcctggccgaccaacagctgtaccagcaatggctcggtgaggtgaagggcatggccgaccgcatcaacggcatgcgatccacactcaaggacctgctcgtgcaggactttaactcgaagctcaactgggatcacatcaccaaccagatcggcatgtttgccttcctcggcatctcgcccgagcaggtggccaagctagtcaacgagcaccacgtctaccttactggagacggccgtatttcggtcgctggtatcaccgaccacaacgtcaagcacctcgccgagtcgctgcacaaggtcaccagctaa

SEQ ID NO: 66530 - protein, 433 aa, Ustilago maydis 521
MMLTAATIRTAVRASQAPLLGAMSLPAVRQFKSTWAHVKAGPPDPILGVTEAFKRDQDPRKINLGVGAYRDENGKPYVLPSVRQAEELVITAKGDKEYLPITGLADFTKNAAVLAYGKDSAPIKENRIAITQSISGTGALRIGGAFLQRHYPEAKTIYLPTPSWGNHTPIFRDSGLEVKQYRYYDKKTVGLDFKGMIEDIKAAPAGSIVLLHACAHNPTGVDPTVEQWKEISNVVKEKGHFPFFDMAYQGFASGDTDKDAFAVRHFVAEGHQICLSQSFAKNMGLYGERVGAFSIVCADPDERARVDSQIKIIVRPMYSNPPMHGAKIAGTILADQQLYQQWLGEVKGMADRINGMRSTLKDLLVQDFNSKLNWDHITNQIGMFAFLGISPEQVAKLVNEHHVYLTGDGRISVAGITDHNVKHLAESLHKVTS

SEQ ID NO: 66531 - DNA, 1269 bp, Ustilago maydis 521
  CDS (1)..(1269)
atgggttcaatttctgaacaatcctcagctctcgctgtttggagcgccgtcccacaggctccggaggatgccattttcaagctgacctcttcctacaaatccgatacctacgataagaaagtcaacctcggtgttggcgcataccgtgacaacaacggcaagccctacgttctgccctcggtaaaaaaggcgcaggcggatctcatcgcagacgagtcggtcgaccacgagtacctctccatcaccggtctggccgaattcaccagtgctgctgccaagctcatcctcggcgacgattcgcccgcgattgcagagaagcgtgttgcttcggtccagaccatctccggtaccggtgccaaccatctcggtgccgtctttctgcaacgcttctaccagtaccaggcctacggtgtcgaccgtcaaatctacatttcaaatccaacttgggccaatcacaaggccatcttcaatacggtcggcatcaagcccatcgactacccttattacgacgccaagacgattgcgctcgactttgacggtttcaccaacacgttgagacaggccaaaaaccagagcgtgttcttgctacatgcctgcgctcacaaccctaccggtgttgatcctacccaggagcagtggaagcagatcgccgatatctttgtcgagaagggtcactttgcctttttcgactgcgcttaccagggtttcgcctcgggtgacctggacagggatgcctgggcggtacgacactttgtttcgcgcaagagcattcctctgctcatttgccagagcttcgccaagaacgccggcttgtacggcgaacgtgtcggcgcgctccacgttgtgtccgccactccggcacagagcgctgccgtcttctcgcagctcgccgcgattcaacgatccgagatctctaaccctcccgctttcggcgcgcgtgtggtcaagatgatccttaccgatcctgcgctcttccaacagtggcaggccgatgtcaaggagatggcaggtcgcatcatcaccatgcgtcagagcttgtttgatttgctgaccaagaagttccaaacaccgggtaactgggaccacatcttgaaacaaatcggcatgtttacctttttgggtctcgacaccaaccagtgtaaccgtctgttggaggaaggtcacatctatttgaccgccaattcgcgtatttccatggctggattgacgacgaacaacgtcgaatacgttgcttcctggatcgacaaggtggtccgagagaagaagtga

SEQ ID NO: 66532 - protein, 422 aa, Ustilago maydis 521
MGSISEQSSALAVWSAVPQAPEDAIFKLTSSYKSDTYDKKVNLGVGAYRDNNGKPYVLPSVKKAQADLIADESVDHEYLSITGLAEFTSAAAKLILGDDSPAIAEKRVASVQTISGTGANHLGAVFLQRFYQYQAYGVDRQIYISNPTWANHKAIFNTVGIKPIDYPYYDAKTIALDFDGFTNTLRQAKNQSVFLLHACAHNPTGVDPTQEQWKQIADIFVEKGHFAFFDCAYQGFASGDLDRDAWAVRHFVSRKSIPLLICQSFAKNAGLYGERVGALHVVSATPAQSAAVFSQLAAIQRSEISNPPAFGARVVKMILTDPALFQQWQADVKEMAGRIITMRQSLFDLLTKKFQTPGNWDHILKQIGMFTFLGLDTNQCNRLLEEGHIYLTANSRISMAGLTTNNVEYVASWIDKVVREKK

SEQ ID NO: 66533 - DNA, 1272 bp, Tribolium castaneum
  CDS (1)..(1272)
atgtctttgaaaaaaaccgtaaatctcctcgtgatacgcaagaatggcgttatcaagcaaagatcgagctcgtggtggtctcaagtggccatgggcccccctgatgccattctgggggtgaccgaagccttcaaacgcgacaccaacccgaataaaatcaacctgggcgtgggggcttaccgagacgataacggcaagccctatgttttgccctccgtgcgtaaagctgaggaaaaactgcgagcaaaaaacttagacaaggagtacgcccccatttcggggatcgctgagttttgcaaagctgcaatcgaactagctttgggggcaaactccgagattgtctccaatgggctcaatgccactgttcaaggcatctctgggacaggttccctccgagtgggggctgccttctttagcaatttttacccagggattaaaacagtctacctgcctaaacccacatgggggaaccacaccccaattttcaaacacgcgggaatggacgtccagtcgtacactttttacgaccctaaaacttgcgggcttgacttcaagggggctttggatgacatcaataaaatccctgaaaggtccataatactgttgcacgcatgcgcccacaaccccacaggggtggaccctaacttggaccaatgggcggagctctcctctcttataaaacaacgcaatctatttccgttttttgacatggcgtatcaaggctttgcttccggtgatatcgacagagacgctcaagccgttcgattgtttatcaaagaggggcacaaaattgttttggcgcaaagttttgcgaaaaatatgggattgtacggtgaaagggcgggggcgtttactgtcacgaccgaatcgcaggaagagacagcaagggtgatgtcacaactgaagattctgattcgtgccttgtactcaaatccgccaatcaatggtgcgaggattgtcgctgagattttgacagatccagcattgcgcgctgattggttgaaggaggttaagggcatggccgatcggattatttccgtcaggactaagttaagggataatttgaagaaggaagggtcgacgaaaaattggcaacatatcactgatcaaatagggatgttttgttacacgggaatgactcccgatcaggtggagaaaataactaaggaacacagcgtttttctcactaaagacggaaggatatctatggcaggtgttacgtcgaaaaatgtcgagtacttagctcatgctatgcataccgtcaccaagtag

SEQ ID NO: 66534 - protein, 423 aa, Tribolium castaneum
MSLKKTVNLLVIRKNGVIKQRSSSWWSQVAMGPPDAILGVTEAFKRDTNPNKINLGVGAYRDDNGKPYVLPSVRKAEEKLRAKNLDKEYAPISGIAEFCKAAIELALGANSEIVSNGLNATVQGISGTGSLRVGAAFFSNFYPGIKTVYLPKPTWGNHTPIFKHAGMDVQSYTFYDPKTCGLDFKGALDDINKIPERSIILLHACAHNPTGVDPNLDQWAELSSLIKQRNLFPFFDMAYQGFASGDIDRDAQAVRLFIKEGHKIVLAQSFAKNMGLYGERAGAFTVTTESQEETARVMSQLKILIRALYSNPPINGARIVAEILTDPALRADWLKEVKGMADRIISVRTKLRDNLKKEGSTKNWQHITDQIGMFCYTGMTPDQVEKITKEHSVFLTKDGRISMAGVTSKNVEYLAHAMHTVTK

SEQ ID NO: 66535 - DNA, 1218 bp, Tribolium castaneum
  CDS (1)..(1218)
atgtcaagattcgccaaagtggagcaagggccccccatcgaggtcttcgccttgaaccagcaattcgccgccgacacgagcccgaataaagtcagtttgggggttggagcgtatcgtactaatgagggtcaaccttgggttttgccagtggttcgcgaagccgaaaaaatccttgctgccgatgagaaactgaacaaggagtatttgccggttttgggcttggacactttcagctcggcggccactcagatgctgctgggggctgatagtcccgctctcaaggaaaatcgggcttttggggtccagtgcctatccggcacgggctgtcttcgcgttggggctgaatttctggcccgaaccgtcggctacaaaaccttctacgtgtccatacccacctgggagaaccacaaactcgtattcaccaacgccggcttcaacgacatcaaagaatacagatactggtcatcggagtcccgcggcctcgacctcaaaggctttctggaagacctcaacaaagcgcctgaaaactcagtcataatcctgcactcctgcgcccataatcccacaggatgcgaccccacgcaggaacagtgggcccaaatcgccgatgttatggaaaagaggaaactcttcccgtttttcgattccgcgtatcagggctttgcctcaggcgatctggagaaggacgcctggacggtcagatatttcgtcagcaggggatttgagctattgtgtgcacaatcattcgcgaaaaatttcggcttgtacaacgaacgtgttggtaatttgacttttgtgaccaaaacgaccgatgttatccccaaagttaagtcacaggtgactttactagtgagggggatgtactcgaacccgcctagtcacggtgctagaattgtggcacacgttttaagcgatccaaagttgttcgaacagtggaaaggttgtattaggacgatggcgaccaggattatcgaaatgagaaaagctttgagggcagctttggaaaaattgaacactccgggagactggagtcatatcacggcgcaaatcggcatgttttcgtacacgggactgactgaaaaacaatccttgcacatggttgagaaacaccacatctatatgttgaaatcgggccgtatcagcatgtgtggagtcactccaggcaatgtggattacgtggccaaagctatttatgaaactgtaacaaatgtaaagtaa

SEQ ID NO: 66536 - protein, 405 aa, Tribolium castaneum
MSRFAKVEQGPPIEVFALNQQFAADTSPNKVSLGVGAYRTNEGQPWVLPVVREAEKILAADEKLNKEYLPVLGLDTFSSAATQMLLGADSPALKENRAFGVQCLSGTGCLRVGAEFLARTVGYKTFYVSIPTWENHKLVFTNAGFNDIKEYRYWSSESRGLDLKGFLEDLNKAPENSVIILHSCAHNPTGCDPTQEQWAQIADVMEKRKLFPFFDSAYQGFASGDLEKDAWTVRYFVSRGFELLCAQSFAKNFGLYNERVGNLTFVTKTTDVIPKVKSQVTLLVRGMYSNPPSHGARIVAHVLSDPKLFEQWKGCIRTMATRIIEMRKALRAALEKLNTPGDWSHITAQIGMFSYTGLTEKQSLHMVEKHHIYMLKSGRISMCGVTPGNVDYVAKAIYETVTNVK

SEQ ID NO: 66537 - DNA, 1215 bp, Azoarcus sp. EbN1
  CDS (1)..(1215): transl_table=11
atgttcgagcacgtcgacgcctatcccggcgaccccatcctctccctcgtcgaaactttccaccacgacccgcgcccgcggaaggtgaacctcggcatcgggctctactacgacgaagagggccgcatcccgctgctcggttcggtcgagaaggccgaggcagcgctggcggcaaatcccggtccgcggccctacctgccgatggaaggagcggccgactatcgcgccgctgtccagaaactcctgttcggtcccgacagcgcagcgttgcgcgcgggccgcatcgcgacgatccagaccatcggaggctcgggcgcattgaaggtcggcgccgacctgctcaagcggtattttccggcgagcgaagtgtgggtcagcgatccgacctgggacaaccatcgttcgatcttcgagggcgccggcatcgaagtgcacgactacccgtactacgacgcggcgagcggcggcgtgcgctttgacgagatgattgagaccctgcagtcgctgcccgcgcagagcatcgtgctgctgcacccgtgctgccataatccaacgggcgtcgacctgtcgacagcacaatggcaggaagtgatcgcagtggtggcgtcgcgcggactgatcccgttcctcgacatcgcgtaccagggcttcggcgacaacctcgacgacgatgcgtacgcggcccgggcgatggccgacgcaggggtgagtttcttcgtcagcaactcgttttccaagaacctgtcgttctacggcgagcgctgcggcggcctgtcggtcgtgtgccaggatgccgatgaagccgagcgcgtgctaggccagctgaaattcaccgtgcgccgcaactactcgagcccgcccgtgcatggcggccgggtcgctgccgcagtcatgaacgatgccggactgcacgaggaatgggtcggtgaagtgcgtggcatgcgcgagcgcatcaaggcgatgcgcgagaagctccacgaagtactgagcagcaccttgccggggcgggatttcagctatttcgtcaaacagcgcggcatgttcagctataccgggctgactcccgagcaggtcgatcgcctgcgcgaggagttcgccgtgtacgtcgtgcagtccggccgcatgtgcgtcgctggtctcaaccggggcaacgtcgattacgtcgcgaaagcgatggctgccgtgctgcaggaggccggcaccgccgctgcctga

SEQ ID NO: 66538 - protein, 404 aa, Azoarcus sp. EbN1
MFEHVDAYPGDPILSLVETFHHDPRPRKVNLGIGLYYDEEGRIPLLGSVEKAEAALAANPGPRPYLPMEGAADYRAAVQKLLFGPDSAALRAGRIATIQTIGGSGALKVGADLLKRYFPASEVWVSDPTWDNHRSIFEGAGIEVHDYPYYDAASGGVRFDEMIETLQSLPAQSIVLLHPCCHNPTGVDLSTAQWQEVIAVVASRGLIPFLDIAYQGFGDNLDDDAYAARAMADAGVSFFVSNSFSKNLSFYGERCGGLSVVCQDADEAERVLGQLKFTVRRNYSSPPVHGGRVAAAVMNDAGLHEEWVGEVRGMRERIKAMREKLHEVLSSTLPGRDFSYFVKQRGMFSYTGLTPEQVDRLREEFAVYVVQSGRMCVAGLNRGNVDYVAKAMAAVLQEAGTAAA

SEQ ID NO: 66539 - DNA, 1194 bp, Neisseria gonorrhoeae FA 1090
  CDS (1)..(1194): transl_table=11
atgtaccgacacatcgaatactatcccggcgacccgattttgagtttggtcgaaaccttcaaaaacgacccgcgccccgaaaaagtcaatttgagcataggcatttatttcgacgacgaaggcagaatgcccgtattggaatccgtaagccgtgccgaaaccgcccgtgccgccgcgccagcgccgtcgccctacctgccgatggagggtttggacgtttaccgcagcgcggtgcagcatttgttgttcggcaaaggcaaccccgcgctcgcgcagggacgcatcgttaccgtacagactctgggcggctcgggcgcgctcaaagtcggggcggatttcctgcaccgctggtttcccgaagcgcgcgcctacgtcagcgatccgacttgggacaaccatcgcggcatttttgaaggcgcaggtttcgaggtcggcacttacccatattacgaccctgccactgtcggcgtgaaattcgacgaaatgaccgcgtttttcaacaccctgcccgaaaacagcgtcctcatcctccatccctgctgccacaacccgaccggcgtggatatgtcggaacggcaatgggacgaagtgttgcagatcatcaaaacgcgcaaactgattccgtttatggacatcgcctaccaaggcttcggcggcgatttggacagcgatgcctacgccgtccgcaaagcggtggaaatggatttgccgctgtttgtcagcaattcgttttcaaaaaacctgtcgctctacggcgaacgcgtcggcggcttaagcgtggtttgccccaataaagaagaagcggatttggtgttcggacaactcaaattcaccgtccgccgcatctactccagcccgcccgcgcacggcgcgtatatcgccgccgacgtgatgaacagctccgaactttacgccttgtggcaaaacgaagtttatatgatgcgcgaccgcatccgtgcgatgcggcagaaactttacggcgtattgaccgcccgaatccccgaccgcgatttcacttatttcatcaaacagcgcggaatgttcggctacacggggttgagcgtggggcaagtccgcaggttgcgcgacgaatttgccgtttacctgctggattccggcaggatgtgcgtcgccgggctgaatacatcaaatatcacttatgtcgccgatgcgcttgccgaagtgttgaaataa

SEQ ID NO: 66540 - protein, 397 aa, Neisseria gonorrhoeae FA 1090
MYRHIEYYPGDPILSLVETFKNDPRPEKVNLSIGIYFDDEGRMPVLESVSRAETARAAAPAPSPYLPMEGLDVYRSAVQHLLFGKGNPALAQGRIVTVQTLGGSGALKVGADFLHRWFPEARAYVSDPTWDNHRGIFEGAGFEVGTYPYYDPATVGVKFDEMTAFFNTLPENSVLILHPCCHNPTGVDMSERQWDEVLQIIKTRKLIPFMDIAYQGFGGDLDSDAYAVRKAVEMDLPLFVSNSFSKNLSLYGERVGGLSVVCPNKEEADLVFGQLKFTVRRIYSSPPAHGAYIAADVMNSSELYALWQNEVYMMRDRIRAMRQKLYGVLTARIPDRDFTYFIKQRGMFGYTGLSVGQVRRLRDEFAVYLLDSGRMCVAGLNTSNITYVADALAEVLK

SEQ ID NO: 66541 - DNA, 1191 bp, Neisseria gonorrhoeae FA 1090
  CDS (1)..(1191): transl_table=11
atgttcttcaagcacatcgaagccgcccccgccgatccgattctcggtttgggcgaagcgttcaaagccgaaacccgccccgaaaaagtcaacctcggcatcggcgtgtacaaagacgcatccggcgcgacacccattgtcaaagccgtcaaagaggctgaaaaacgcctgttggaaagcgaaaccaccaaaaattacctgaccatcgacggcgttgccgactacaacgagcaaacccaaatcctgctgttcggcaaagaccacgaaatcatcgccagccgccgcgccaaaacagcgcaaagccttggcggtacaggcgcattgcgtattgcggccgaatttgccaaacgtcagttgaacgcgcaaaccatctggatttccaatccgacctggccaaaccacaacgccattgccaaagcggtcggtatccaagacaaaccttatcgctactatgatgccgccaaacactgcttggattgggacggcatgattgaagatttgaaccaagcgcaaaaaggcgacatcgtcctgctgcacggctgctgccacaaccctaccggtatcgaccctacgcccgaacaatgggaaactttagcaaaactttctgccgaaaaaggctggttgccattgtttgactttgcctaccaaggcttcggcaatggtttggaagaagatgcctatggcttgcgcgtgttcttgaaacacaatacagaattgctgattgccagctcttattccaaaaacttcggcatgtacaacgagcgtgtcggtgcattcactttggtggccgaagatgaagaaacagcagcccgcgcccacagccaaatcaaaaccatcatccgtaccttgtattccaacccggcttcacatggtgcgaacaccattgcactggtgttgaaaaatgatgatttgaaagcacaatggattgccgaacttgacgaaatgcgcggccgcatcaaagccatgcgccaaaaatttgtcgagttgctcaaggccaaaggttcaacccaagactttgattttattattgaacaaaacggtatgttctctttcagcggcttgactcccgaacaagttgaccgtttgaaaaacgagtttgccatttatgccgtccgttccggccgcatcaacgtcgccggcattaccgacgacaacatcgattatctgtgtgaaagcatcgtgaaagtatag

SEQ ID NO: 66542 - protein, 396 aa, Neisseria gonorrhoeae FA 1090
MFFKHIEAAPADPILGLGEAFKAETRPEKVNLGIGVYKDASGATPIVKAVKEAEKRLLESETTKNYLTIDGVADYNEQTQILLFGKDHEIIASRRAKTAQSLGGTGALRIAAEFAKRQLNAQTIWISNPTWPNHNAIAKAVGIQDKPYRYYDAAKHCLDWDGMIEDLNQAQKGDIVLLHGCCHNPTGIDPTPEQWETLAKLSAEKGWLPLFDFAYQGFGNGLEEDAYGLRVFLKHNTELLIASSYSKNFGMYNERVGAFTLVAEDEETAARAHSQIKTIIRTLYSNPASHGANTIALVLKNDDLKAQWIAELDEMRGRIKAMRQKFVELLKAKGSTQDFDFIIEQNGMFSFSGLTPEQVDRLKNEFAIYAVRSGRINVAGITDDNIDYLCESIVKV

SEQ ID NO: 66543 - DNA, 1191 bp, Colwellia psychrerythraea 34H
  CDS (1)..(1191): transl_table=11
atgtttggtagtttaaaggctttgcctgccgatccaattcttggattattagctaaatataaaaaagataacaacccaaataaaattgatttgggtgttggcgtattcaaaaacgaagcaggtcatactgccgttttagattgtgtaaaaaaagctgaacaacatcgtaccaatactgaagacagtaaagtttacattggccctacaggctctcctgtctttaatgacgaaatggccaaacttatttttggtagtgagcataaagtattaaatgaaaaccgtgcccgcactatatcaacacctggcggtactggcgcattacgcgttgcggcggaatttattaagtcttgtaaagcaggtgcaactatttgggtaagcaacccaacatgggcaaatcatactggcttatttgcggctgctggtttaaacgttaaaacatatccttattacgattatgaaaacaaaagcttagactttgacggtatgttaaatgcccttaaagaagtgagcagcgatgacgtggtgttattacacgcttgttgtcataacccaagtggtatggatttaaataatgagcaatggcaacaagttgctgatgtagcgaaagatgttggtttcacaccattaatcgatatggcttatcaaggttttggctcaggtttagacgaagatgcttacggtctgcgtcttatggctgaaacagttaaagaaatgattgtttgtagttcatgttctaaaaactttggcttataccgagaacgtattggcgcttgtaccattattggtgaatcaagtatttctgttgatattgctaactctgttttactttacgttgtgcgcgttatctactcaatgccgccagcacatggtgccgctattgtcgaaaccatcttaagttcagatgaacttcgcaacgaatggtatgttgaattaaaagcaatgcgtgaccgcattaacggtaatcgtcaattaatcgttgataagttaatagaaaatggtgttacacgtgactttagctttattagtcgtcaaagtggtatgttctctttcttaggtcttacgcctgagcaagttcaacagctacaagatgaatacagcatttatttagtaggctctagccgaatgagtattgctggtattgccaatagcaatgttgattacttagcaaaatctattgctaaggtgctttag

SEQ ID NO: 66544 - protein, 396 aa, Colwellia psychrerythraea 34H
MFGSLKALPADPILGLLAKYKKDNNPNKIDLGVGVFKNEAGHTAVLDCVKKAEQHRTNTEDSKVYIGPTGSPVFNDEMAKLIFGSEHKVLNENRARTISTPGGTGALRVAAEFIKSCKAGATIWVSNPTWANHTGLFAAAGLNVKTYPYYDYENKSLDFDGMLNALKEVSSDDVVLLHACCHNPSGMDLNNEQWQQVADVAKDVGFTPLIDMAYQGFGSGLDEDAYGLRLMAETVKEMIVCSSCSKNFGLYRERIGACTIIGESSISVDIANSVLLYVVRVIYSMPPAHGAAIVETILSSDELRNEWYVELKAMRDRINGNRQLIVDKLIENGVTRDFSFISRQSGMFSFLGLTPEQVQQLQDEYSIYLVGSSRMSIAGIANSNVDYLAKSIAKVL

SEQ ID NO: 66545 - DNA, 1197 bp, Ralstonia eutropha JMP134
  CDS (1)..(1197): transl_table=11
atgagtttgttttctgccgtcgaaatggccccgcgcgacccgatcctgggcctgaatgaagctttcaatgccgacacccgcgccaccaaggtgaacctgggcgttggcgtttacttcaccgacgaagggaaaattccgctgctgcgcgccgtgcaggaagcggaaaaggcgcgcctgaccaccgccacgccgcgcggctacctgccgatcgaaggcattgccgcctatgaccaggccgtgcagtcgctgctgttcggcaaggaatcgccgctgatcacggaaggccgtgttgtgacggctcaggcactgggcggtaccggcgcgctgaagatcggcgccgacttcctgaagcgcctctacccgacttcgaaggtcgcgatcagcgacccgagctgggaaaaccaccgcgcgctgttcgaagccgccggctttgaggtcgtgaactacgcctactacgacgccccgacccacggcctgaacttcgccggcatggtggaatcgctgaagtcgtatccggccaacaccatcgtcgtgctgcacgcttgctgccacaacccgaccggcgtcgacctgtcggccgaccagtggaaggaagtggtcgcgctgatcaaggaacgcaacctgatcccgttcctcgacatggcctaccagggctttgccgacggcatcgacccggacggcgcagccgtgcgcctgttcgcggattcggggctgccgttcttcgtgtcgagctcgttctcgaagagcttctcgctgtacggcgaacgcgtgggcgccctgtcgatcgtcacgaccggcaaggaagaagcgcagcgcgtgctgtcgcaggtcaagcgcgtcattcgcaccaactactcgaacccgccgacgcacggcggcaccgtggtagctaccgtgctgaacagcccggaactgcgcgccatgtgggaagaggaactggccgaaatgcgcgaccgcatcaagctgatgcgccacgcgctggtcgacaagctggccgccaagggcgtgaagacggacttttcgttcgtgaaggcgcagcgcggcatgttctcgtactcgggcctgacctcggcgcaagtcgaccgcctgcgtaacgagcatggcatctacgccgtcggcaccggccgcatctgcgtggccgcgctgaacagccgcaatatcgacgccgtcgtcgacgctatcgcggcagtgctgtaa

SEQ ID NO: 66546 - protein, 398 aa, Ralstonia eutropha JMP134
MSLFSAVEMAPRDPILGLNEAFNADTRATKVNLGVGVYFTDEGKIPLLRAVQEAEKARLTTATPRGYLPIEGIAAYDQAVQSLLFGKESPLITEGRVVTAQALGGTGALKIGADFLKRLYPTSKVAISDPSWENHRALFEAAGFEVVNYAYYDAPTHGLNFAGMVESLKSYPANTIVVLHACCHNPTGVDLSADQWKEVVALIKERNLIPFLDMAYQGFADGIDPDGAAVRLFADSGLPFFVSSSFSKSFSLYGERVGALSIVTTGKEEAQRVLSQVKRVIRTNYSNPPTHGGTVVATVLNSPELRAMWEEELAEMRDRIKLMRHALVDKLAAKGVKTDFSFVKAQRGMFSYSGLTSAQVDRLRNEHGIYAVGTGRICVAALNSRNIDAVVDAIAAVL

SEQ ID NO: 66547 - DNA, 1203 bp, Burkholderia sp. 383
  CDS (1)..(1203): transl_table=11
atgttcgaacacatcgacgcgtacccgggcgacccgatcctgacgctcaacgagaacttccagaaagatccgcgcgaccagaaggtcaacctgagcatcggcatctacttcgacgccgaaggccggattccggtgatgggcgccgtgcgcgaagccgaaaccgcgctgcagcgcgacagcggcgcgaagccgtacctgccgatggttggcctgcccgcgtatcgcgacgccgtgcaggcgctcgtgttcggcgccgatcacccggcccgcgcggccggccgcatcgcgacgctgcagacgctcggcggctccggcgcgctgaaggtgggcgccgatttcctgaagcgctacttcccggactcgcaggtgtggctcagcgatccgagctgggaaaaccaccgcttcatcttcgagcgcgccggcttcacggtgaacacgtatccgtactacgacgaagcgacgggcggcctgaagttcgacgcgatgctcgcggcgatcgacgcgctgccggcgcgcagcatcgtgctgctgcacgcgtgctgccataacccgaccggtgtcgacctcgacgaaggccagtgggagaagctgatcgacgtgatcgaggcgcgcgggctgctgccgttcgtcgacatggcgtaccagggcttcggcgcgggcctcgacgcagatgctttcgcggtgcgcgaactggctcgccgcggcgtgccggcgctggtcgcgaactcgttctcgaagaacttctcgctgtacggcgagcgcgtgggcggcctgagcgtcgtctgcgaggatgcggccgcagccgaccgcgtgctcggccagctggccggcgccgtgcgctcgaactacagcaacccgcaaacctacggcgcgaaggtcgtggcggccgtgctcggcacgcccgcgctgcgcaagcagtgggaagaggaactggcggcgatgtgccgccgcatcgcgcggatgcgccagtcgatccatgacggcctgcgcgaccacgtcagcggcgaggcactcacgcgctatgtgaagcagcgcgggatgtttacgtacacgggcctgaccgaatcgcaggtcgacgcgctgcgcgaagtgcacggcgtgtacgtgctgcgttcgggccggatgtgcgtcgcgggcctgaacgactcgaacgtcgccatcgtcgcggatgccatcggcaaggtgctgaagagcggcgtctga

SEQ ID NO: 66548 - protein, 400 aa, Burkholderia sp. 383
MFEHIDAYPGDPILTLNENFQKDPRDQKVNLSIGIYFDAEGRIPVMGAVREAETALQRDSGAKPYLPMVGLPAYRDAVQALVFGADHPARAAGRIATLQTLGGSGALKVGADFLKRYFPDSQVWLSDPSWENHRFIFERAGFTVNTYPYYDEATGGLKFDAMLAAIDALPARSIVLLHACCHNPTGVDLDEGQWEKLIDVIEARGLLPFVDMAYQGFGAGLDADAFAVRELARRGVPALVANSFSKNFSLYGERVGGLSVVCEDAAAADRVLGQLAGAVRSNYSNPQTYGAKVVAAVLGTPALRKQWEEELAAMCRRIARMRQSIHDGLRDHVSGEALTRYVKQRGMFTYTGLTESQVDALREVHGVYVLRSGRMCVAGLNDSNVAIVADAIGKVLKSGV

SEQ ID NO: 66549 - DNA, 1200 bp, Burkholderia xenovorans LB400
  CDS (1)..(1200): transl_table=11
atgttcgaccacattcccgcttatccaggcgacccgattctgggcctgaacgaagactttcaactcgacccgcgcaccaacaaggtcaatctgagcatcggcatctatttcgacgacgccggcaagctgccggtcatgaacgcggtgcgccgggccgaaaccgcgctgctcgattcgatcggcccgcgctcctatctgccgatggccggcctgccgctctatcgcgatgcggcgcaggcgctcgtattcggcgcggacagcgaggcgcgcaaggcgggccggatcgcgacgttgcaaaccatcggcggatcgggcgcactcaaggtcggcgccgatttcctgaagcgctatttcccgggctcgcaggtctggatcagcgacccgagctgggaaaaccaccgcgtcgtattcgaaggcgcggggctcacggtcaacacctatccatattacgacgcccagaccggcggcctgcgtttcgccgagatgctcgacgccattggccgcctgccggaacagagcgtggtgctgctgcacgcgtgctgccacaacccgaccggcgtcgatctgagccctgcgcaatgggccggactggtgccggtattgcagcgccgcaagctgatcgcgttcgtcgatatggcttaccagggttttggcgcgggtctggaagaggacgccgcctgcgtgcgcctgctggccgacgcgggcattccattgatcgccgcgaattcgttctcgaagaatttttcgctgtacggcgagcgtgtcggcgcattgagcgtcgtttgcaaaagcgcggaagaggccgggcgcgtgctcggtcaattgatgtcgacggtgcgcgcgaactacagcaatccgcccacgcacggcgcgcggctcgtcgccaacgtgctggcggatgcgtcgctgcgcgcttcatgggaagcggaactcgccaccatgcgcgaacgcattctcgccatgcgcggcacgatccacgccggactcgccggccgtgtggacgaagtgatgcgcgcacgctacgtcgcgcagcgcggcatgttcacctacaccggcctgagcgaaagccaggtggagcggctgcgcagcgaacacgcggtgtacgtgctgcgctccgggcgcatgtgcgtggccgggctgaacgcgcgcaacgcggagtatgtggcggcctcgatcgcggcggtggtgtcgggcgcctga

SEQ ID NO: 66550 - protein, 399 aa, Burkholderia xenovorans LB400
MFDHIPAYPGDPILGLNEDFQLDPRTNKVNLSIGIYFDDAGKLPVMNAVRRAETALLDSIGPRSYLPMAGLPLYRDAAQALVFGADSEARKAGRIATLQTIGGSGALKVGADFLKRYFPGSQVWISDPSWENHRVVFEGAGLTVNTYPYYDAQTGGLRFAEMLDAIGRLPEQSVVLLHACCHNPTGVDLSPAQWAGLVPVLQRRKLIAFVDMAYQGFGAGLEEDAACVRLLADAGIPLIAANSFSKNFSLYGERVGALSVVCKSAEEAGRVLGQLMSTVRANYSNPPTHGARLVANVLADASLRASWEAELATMRERILAMRGTIHAGLAGRVDEVMRARYVAQRGMFTYTGLSESQVERLRSEHAVYVLRSGRMCVAGLNARNAEYVAASIAAVVSGA

SEQ ID NO: 66551 - DNA, 1197 bp, Ralstonia metallidurans CH34
  CDS (1)..(1197): transl_table=11
atgagtttgttttctgccgtcgagatggccccgcgcgacccgatcctgggcctgaatgaagcgttcaatgccgatacccgcgccaccaaggtgaacctgggcgttggcgtgtacttcaccgacgaagggaaaattccgctgctgcgcgccgtgcaggaggccgaaaaggcccgcctgacgaccgccacgccgcgcggctacctgccgatcgaaggcatcgccgcctatgaccaggccgtgcaaaccttgctgttcggcaaggaatcgcccctgatcaccgaaggccgcgtggtgacggctcaggcactcggcggcactggcgccctgaagatcggcgccgacttcctgaagcgcctgtacccgaacgcgtcggtcgcgatcagcgatccgagctgggaaaaccaccgcgcgctgttcgaagctgccggcttccctgtggtcaactacgcctactacgacgctgccagccacggcctgaacttcgccggcatggtggaatcgctgaagtcgtacccggccaacacgatcgtcgtgctgcacgcctgctgccacaacccgaccggcgtggacctggacgaagcccagtggaagcaggtcgtggaactggtcaaggaacgtaacctgatcccgttcctggacatggcctaccaaggctttgccgagggtatcgagccggacggcgccgctgtgcgcctgttcgcggagtcgggcctgccgttcttcgtttccagctcgttctcgaagagcttctcgctgtacggcgagcgcgttggcgccctgtcgatcgtgaccacgggcaaggaagaagcccagcgcgtgatgtcgcagatcaagcgcgtcatccgcacgaactactcgaacccgccgacccacggcggcactgtggtggccaccgtgctgaacagcccggaactgcgcgccatgtgggagcaggaactggccgaaatgcgcgaccgcatcaagctgatgcgccatgcgctggtcgacaagctggccgccaagggcgtgccgggcgacttctcgttcgtgaaggcccagcgcggcatgttctcgtactcgggcctgacctcggcccaggttgaccgcctgcgcaccgaacacggcatctacgccgtgggcacgggccgcatctgcgtggcagcgttgaacagccgcaacatcgacgccgtggtgaacgcgatcgccgccgtctactaa

SEQ ID NO: 66552 - protein, 398 aa, Ralstonia metallidurans CH34
MSLFSAVEMAPRDPILGLNEAFNADTRATKVNLGVGVYFTDEGKIPLLRAVQEAEKARLTTATPRGYLPIEGIAAYDQAVQTLLFGKESPLITEGRVVTAQALGGTGALKIGADFLKRLYPNASVAISDPSWENHRALFEAAGFPVVNYAYYDAASHGLNFAGMVESLKSYPANTIVVLHACCHNPTGVDLDEAQWKQVVELVKERNLIPFLDMAYQGFAEGIEPDGAAVRLFAESGLPFFVSSSFSKSFSLYGERVGALSIVTTGKEEAQRVMSQIKRVIRTNYSNPPTHGGTVVATVLNSPELRAMWEQELAEMRDRIKLMRHALVDKLAAKGVPGDFSFVKAQRGMFSYSGLTSAQVDRLRTEHGIYAVGTGRICVAALNSRNIDAVVNAIAAVY

SEQ ID NO: 66553 - DNA, 1194 bp, Shewanella sp. MR-4
  CDS (1)..(1194): transl_table=11
atgattttctctcaggtagtactcgcacccgctgatcccatccttggtttaaccgataccttcaaggccgatccacgccaagataaagtgaacctcggtgttggcatttataaggatgaagcagggcagactccagtattacagtcagtgaagaaagcagaagccctattgcttgagcaagagaagaccaagaactatttaggtattgaaggggttcaaacctataaccgcgtggtacaagagctattatttggcgagggcagtacgcttgtgacgtcaggccgtgccgcgaccgctcaggcgccaggtggtactggtgcactgcgtattgccgccgagtttctactgcgcaacacgccatcgcgcactgtgtgggtcagtaacccaacttgggcgaaccatcagaatatttttgaaactgcaggtttaacggttaaagaatacggttactacaatgcaagtgctcacgatatcgatttcgatggcatgatgactgatctcgccaatgcacaggcgggtgacattgttctactgcacggctgctgccataacccaacgggtattgatttgaccttagcccaatgggaattggttgctaacctgtgtgcagacaaacagttagtgccattgtttgactttgcttaccaaggttttggtgctgggattgaagaagatgccgcaggtttacgtttagtggctgcaaaagtacctgagttgttagtggctaactcattctctaaaaactttggtctttataacgagcgtatcggtgctgtgactgtggttgcacaaaatgccgatgaagcagtacgtgcctttagccaagtgaaacgtactatccgcgctaattactcaaacccaccagcacacggtgcgttaatcgttagcaccattttaagtgatgcggcattgaaagcactttgggtacaagagttgaccgaaatgcgtgagcgtatcgccgagatgcgtaccctgttcgtccaaagcttaaaggatgaaggcgtcacccaggactttagctttatttcccgtcaaaacggtatgtttagcttctctggtttaaacaaagcgcaggttgcacgcttgaaagacgagtttggtatttatatcgtaggctcaggccgtattagtgttgccggtatgaccaaaaccaatatgcctgtgatctgtaaagcgattgcccaggttctttaa

SEQ ID NO: 66554 - protein, 397 aa, Shewanella sp. MR-4
MIFSQVVLAPADPILGLTDTFKADPRQDKVNLGVGIYKDEAGQTPVLQSVKKAEALLLEQEKTKNYLGIEGVQTYNRVVQELLFGEGSTLVTSGRAATAQAPGGTGALRIAAEFLLRNTPSRTVWVSNPTWANHQNIFETAGLTVKEYGYYNASAHDIDFDGMMTDLANAQAGDIVLLHGCCHNPTGIDLTLAQWELVANLCADKQLVPLFDFAYQGFGAGIEEDAAGLRLVAAKVPELLVANSFSKNFGLYNERIGAVTVVAQNADEAVRAFSQVKRTIRANYSNPPAHGALIVSTILSDAALKALWVQELTEMRERIAEMRTLFVQSLKDEGVTQDFSFISRQNGMFSFSGLNKAQVARLKDEFGIYIVGSGRISVAGMTKTNMPVICKAIAQVL

SEQ ID NO: 66555 - DNA, 1194 bp, Shewanella sp. MR-7
  CDS (1)..(1194): transl_table=11
atgattttctctcaggtagtactcgcacccgctgatcccatccttggtttaaccgatacctttaaggccgatccacgccaagataaagtcaacctcggtgttggcatttataaggatgaagcagggcagactccggtattacagtcagtaaagaaagcagaagccctattgcttgagcaagagaaaaccaaaaactatttaggtattgaaggggttcaaacctataaccacgtagtacaagagctgttatttggtgagggcagtacgcttgtgacgtcaggccgtgccgcgaccgctcaggcgcctggtggtactggcgcactgcgtattgccgccgagtttttactgcgcaacaccccatcgcgcactgtatgggtaagtaacccaacttgggctaaccatcaaaatatttttgagaccgcaggtttaacggttaaagaatacggttactacaacgctgctgcacacgatattgatttcgatgccatgatgacagatctcgccaatgcactggcgggtgacattgttctgcttcacggctgctgccataacccaacgggtattgatttgaccttagcccaatgggaattggttgccaacctgtgtgcagacaagcagttagtgccattgtttgactttgcttaccaaggctttggtgctgggattgaagaagatgccgctggtctgcgtttagtggcagcaaaagtacctgagttgttagtggctaactcattctctaaaaactttggtctttataacgagcgtatcggcgctgtgactgtggttgcacaaaatgccgatgaagcggtgcgtgccttcagccaagtgaagcgtactatccgcgctaattactcaaacccaccagcacacggtgcgttaatcgttagcaccattttaagcgatgcggcattgaaagcactttgggtacaagagttgaccgaaatgcgtgagcgtatcgccgagatgcgtaccctgttcgtccaaagcttaaaggatgaaggtgtgactcaggactttagctttatttcccgccaaaacggtatgtttagcttctctggtttaaataaagcgcaggttgcacgcttgaaagacgagtttggtatttatatcgtcggctctggccgcattagtgttgccggtatgactaaaaccaatatgcctgtgatctgtaaagcgattgcccaagttctttaa

SEQ ID NO: 66556 - protein, 397 aa, Shewanella sp. MR-7
MIFSQVVLAPADPILGLTDTFKADPRQDKVNLGVGIYKDEAGQTPVLQSVKKAEALLLEQEKTKNYLGIEGVQTYNHVVQELLFGEGSTLVTSGRAATAQAPGGTGALRIAAEFLLRNTPSRTVWVSNPTWANHQNIFETAGLTVKEYGYYNAAAHDIDFDAMMTDLANALAGDIVLLHGCCHNPTGIDLTLAQWELVANLCADKQLVPLFDFAYQGFGAGIEEDAAGLRLVAAKVPELLVANSFSKNFGLYNERIGAVTVVAQNADEAVRAFSQVKRTIRANYSNPPAHGALIVSTILSDAALKALWVQELTEMRERIAEMRTLFVQSLKDEGVTQDFSFISRQNGMFSFSGLNKAQVARLKDEFGIYIVGSGRISVAGMTKTNMPVICKAIAQVL

SEQ ID NO: 66557 - DNA, 1194 bp, Shewanella sp. ANA-3
  CDS (1)..(1194): transl_table=11
atgattttctctcaggtagtactcgcacccgctgatcccatccttggtttaaccgataccttcaaggccgatccacgccaagataaagtgaacctcggtgttggcatttataaggatgaagcagggcagactccagtattacagtcagtgaagaaagcagaagccctattgcttgagcaagagaagaccaagaactatttaggtattgaaggggttcaaacctataaccgcgtggtacaagagctattatttggcgagggcagtacgcttgtgacgtcaggccgtgccgcgaccgctcaggcgccaggtggtactggtgcactgcgtattgccgccgagtttctactgcgcaacacgccatcgcgcactgtgtgggtcagtaacccaacttgggcgaaccatcagaatatttttgaaactgcaggtttaacggttaaagaatacggttactacaatgccagtgcccacgatatcgatttcgatggcatgatgacagatctcgccaatgcacaggcgggtgacattgttctactgcacggttgctgccataacccaacgggtattgatttgaccttagcccaatgggaattggttgctaacctgtgtgcagacaaacagttagtgccattgtttgactttgcttaccaaggttttggtgctgggattgaagaagatgccgcaggcctacgtttagtggctgcaaaagtacctgagttgttagtggctaactctttctctaaaaactttggtctttataacgagcgtatcggcgctgtgactgtagtggcacaaaatgccgatgaagcggtgcgtgccttcagccaagtgaaacgtactattcgcgccaattactcaaacccaccagcacacggtgcgttaattgttagcaccattttaagcgatgcggcattaaaagcactttgggtacaagagttgactgaaatgcgtgaacgtatcgcccagatgcgtactctgttcgtccaaagcttaaaggatgaaggcgtcacccaggactttagctttatttcccgccaaaacggtatgtttagcttctctggcttaaacaaagagcaggttgcacgcttaaaagacgagtttggtatttatatcgtcggctcaggccgcattagtgttgccggtatgaccaaaaccaatatgcctgtgatctgtaaagcgattgcccaagttctttaa

SEQ ID NO: 66558 - protein, 397 aa, Shewanella sp. ANA-3
MIFSQVVLAPADPILGLTDTFKADPRQDKVNLGVGIYKDEAGQTPVLQSVKKAEALLLEQEKTKNYLGIEGVQTYNRVVQELLFGEGSTLVTSGRAATAQAPGGTGALRIAAEFLLRNTPSRTVWVSNPTWANHQNIFETAGLTVKEYGYYNASAHDIDFDGMMTDLANAQAGDIVLLHGCCHNPTGIDLTLAQWELVANLCADKQLVPLFDFAYQGFGAGIEEDAAGLRLVAAKVPELLVANSFSKNFGLYNERIGAVTVVAQNADEAVRAFSQVKRTIRANYSNPPAHGALIVSTILSDAALKALWVQELTEMRERIAQMRTLFVQSLKDEGVTQDFSFISRQNGMFSFSGLNKEQVARLKDEFGIYIVGSGRISVAGMTKTNMPVICKAIAQVL

SEQ ID NO: 66559 - DNA, 1194 bp, Neisseria meningitidis FAM18
  CDS (1)..(1194): transl_table=11
atgtaccgacacatcgaatactatcccggcgatccgattttgagtttggtcgaaaccttcaaaaacgacccgcgccccgaaaaagtcaatttgagcataggcatttatttcgacgacgaaggcaaaatgcccgtgttggaatccgtgagccgcgccgaaaccgcccgcgccgccactcctgtgccgtcgccctacctgccgatggaaggcttagacacttaccgcagcgcggtgcagcatttgttgttcggcaaagacaaccccgcgctcgcgcaaggacgtattgttaccgtacaaaccttgggcggctcaggcgcgctcaaagtcggggcggactttctgcaccgctggtttcccgaagcgcgcgcctacgtcagcgacccgacttgggacaaccatcgcggcatttttgaaagcgcaggtttcgaggtcggcacttacccatattacgaccctgctgccgtcggcgtgaaattcgacgaaatgaccgcgtttttcaacaccctgcccgaaaacagcgtcctgatcctccatccctgctgccacaacccgaccggcgtggatatgtcggaacaacaatgggacgaagtgttgcacatcatcaaaacgcgcaaactgattccgtttatggacatcgcctaccaaggcttcggcggcgatttggacagcgatgcctacgccgtccgcaaagcggtggaaatggaattgcccttgttcgtcagcaattccttctcaaaaaacctgtcgctctacggcgagcgcgtcggcggcctgagcgtggtttgcccgaataaggaagaagcggatttggtgttcggacagctcaaattcaccgtccgccgcatctactccagcccgcccgcgcacggcgcgtatatcgccgccgacgtgatgaacagccccgaactttacgccttgtggcaaaacgaggtttatatgatgcgcgaccgcatccgtgcgatgcggcagaaactttatgatgtcttaactgcgcaaatccccgatcgcgatttcacttatttcatcaaacagcgcggcatgttcggctacacaggattgagcgtggaacaagtccgcaggctgcgcgacgaatttgccgtttacctgctggattccggcaggatgtgcgtcgccggactgaatacgtcgaataccgactatgttgcccgcgcatttgcggaagtcttgaaataa

SEQ ID NO: 66560 - protein, 397 aa, Neisseria meningitidis FAM18
MYRHIEYYPGDPILSLVETFKNDPRPEKVNLSIGIYFDDEGKMPVLESVSRAETARAATPVPSPYLPMEGLDTYRSAVQHLLFGKDNPALAQGRIVTVQTLGGSGALKVGADFLHRWFPEARAYVSDPTWDNHRGIFESAGFEVGTYPYYDPAAVGVKFDEMTAFFNTLPENSVLILHPCCHNPTGVDMSEQQWDEVLHIIKTRKLIPFMDIAYQGFGGDLDSDAYAVRKAVEMELPLFVSNSFSKNLSLYGERVGGLSVVCPNKEEADLVFGQLKFTVRRIYSSPPAHGAYIAADVMNSPELYALWQNEVYMMRDRIRAMRQKLYDVLTAQIPDRDFTYFIKQRGMFGYTGLSVEQVRRLRDEFAVYLLDSGRMCVAGLNTSNTDYVARAFAEVLK

SEQ ID NO: 66561 - DNA, 1200 bp, Vibrio sp. Ex25
  CDS (1)..(1200): transl_table=11
atgaagattatgtttgaaaaagtagttgccgctccggctgaccctattcttggccttactgaagagtttaaaaaagatactcgcgcagacaaaattaaccttggcgtaggtatttacaaaaacgagcaaggcgaaactcccgttcttgcaacagtaaagaaagctgaagcagcgcttgttgaaactgaaaaaaccaagtcttacctaactatcgaaggcacagcagagtacggcattgcagtacaaaaactgcttttcggctctgatgcggaaattgtaaacgaaaaacgcgctaaaacagctcaagctccaggtggtaccggtgcattacgtgttgctggtgagttcattaaacgccaacttggcgatgtaaaaatctggatcagcaaccctacttgggcaaaccacaacggcgtatttactgctgctggtatcgaaacggcacaatacagctactacaacgctgaaacaaaagacaaagacttcgatgcaatgctaaacgatctgcaatctgcatctgaaggtgacatcgtgcttctacacggctgctgccacaaccctacaggtatcgacccaactgctgaagaatgggaaacattggcgaaactagtcgcagagaagaaattgcttcctctatttgacttcgcataccaaggctttgctaaaggtgtggaagaggatgcggcgggtcttcgtacttttgctaagtacaacaaagaaatcctagtcgcgagctctttctcgaaaaactttggcctatacaacgaacgcgttggtgccttcacgttagtagcggaatcagaagaagtcgcaacaaccgcattctcgcaagttaaagccattattcgctctatctactctaacccaccagcgcacggcagcgcggtcgtgactcacattcttggcaatgccgaaatgcgtgcggaatgggaagctgaagtagcagaaatgcgtgaccgtatccaagagatgcgtgaactatttgtagcgacactaaaatcagaaggtgtggacgcagactttagcttcatcgaacgtcaaaatggtatgttctctttctctggcctatctaaagagcaagtaaaccgtctgaaagaagagttcggtatttacatcgtcggttcaggccgaatcagtgttgctggtatgacgaagtcaaatatgggtcctctatgtaaaggcattgcagcggttttataa

SEQ ID NO: 66562 - protein, 399 aa, Vibrio sp. Ex25
MKIMFEKVVAAPADPILGLTEEFKKDTRADKINLGVGIYKNEQGETPVLATVKKAEAALVETEKTKSYLTIEGTAEYGIAVQKLLFGSDAEIVNEKRAKTAQAPGGTGALRVAGEFIKRQLGDVKIWISNPTWANHNGVFTAAGIETAQYSYYNAETKDKDFDAMLNDLQSASEGDIVLLHGCCHNPTGIDPTAEEWETLAKLVAEKKLLPLFDFAYQGFAKGVEEDAAGLRTFAKYNKEILVASSFSKNFGLYNERVGAFTLVAESEEVATTAFSQVKAIIRSIYSNPPAHGSAVVTHILGNAEMRAEWEAEVAEMRDRIQEMRELFVATLKSEGVDADFSFIERQNGMFSFSGLSKEQVNRLKEEFGIYIVGSGRISVAGMTKSNMGPLCKGIAAVL

SEQ ID NO: 66563 - DNA, 1188 bp, marine gamma proteobacterium HTCC2143
  CDS (1)..(1188): transl_table=11
gtgttttcacagttaaagcaacagcctgcggaccccattttgggcttatcagttaaatttaaagccgataacaactccaataaaattgaccttggcgcgggtatttacaaagatgaggccggtcgcacgcctgttttagccagtgtgaaggcggctgagcagtttcgtactgacaatgaaacaagtaaagcctatttaggctcagcgggctcaatgttatttaatgaaaaaattcaggcgctgaatttgggtgagcataaagttattggtgacaatcgcattcgcaccatatctacccctggtggcactggagctttgcgtatagcggctgagtttattaaccgctgcacgccgggcgcgactatttgggtgagtaatccgacgtgggcaaaccatcagggtgtatttacagctgccgggttgaatgtgaaaacctacccgtattacgactatgacaataaatgtatagattttgctggaatggttgaagcgctaaaagaagtgtccaaagacgatgcggtgctgttacatgcctgttgccacaatccaagtggtatggatttaagcaacagtcaatggcgtgaaattgccgagctatcgaaaaaaattggcttcatgccagttgttgatatggcgtaccagggcttcggtcagggcttagatgaggatgcctacggtctgaggttaatggccgacaccgttgatgagatgattatttgcagttcatgttcgaaaaacttcggtttgtatcgggagcgtatcggtgcatgttcaattatcgggaaaagtgcggctgctgccgatatcattaattcagcgttgcttcccattgtccgagttaactactctatgccgccggcgcacggtgctgctatcgtcgaaacaatcttaagctccgaagaactgactagccagtggcatggtgagctgaatgaaatgcgcagtcgcatcggtgggatgcgccgtctgttggttgataaattagtggctaagggtgttactcgtgacttcagcttcatcacccaacaaaacggcatgttctcatttctgggtatcgataaagaccaagtacagcgtttacaggacgagtttagtatctatattgttggctccagccgcataagcgttgccgctgtgtcctatgacaatgttgattatttaacggagtctattgccaaagtactttag

SEQ ID NO: 66564 - protein, 395 aa, marine gamma proteobacterium HTCC2143
MFSQLKQQPADPILGLSVKFKADNNSNKIDLGAGIYKDEAGRTPVLASVKAAEQFRTDNETSKAYLGSAGSMLFNEKIQALNLGEHKVIGDNRIRTISTPGGTGALRIAAEFINRCTPGATIWVSNPTWANHQGVFTAAGLNVKTYPYYDYDNKCIDFAGMVEALKEVSKDDAVLLHACCHNPSGMDLSNSQWREIAELSKKIGFMPVVDMAYQGFGQGLDEDAYGLRLMADTVDEMIICSSCSKNFGLYRERIGACSIIGKSAAAADIINSALLPIVRVNYSMPPAHGAAIVETILSSEELTSQWHGELNEMRSRIGGMRRLLVDKLVAKGVTRDFSFITQQNGMFSFLGIDKDQVQRLQDEFSIYIVGSSRISVAAVSYDNVDYLTESIAKVL

SEQ ID NO: 66565 - DNA, 1260 bp, Aspergillus niger
  CDS (1)..(1260)
atgacaacacaaaccaacaccatcacgcagacgggaacagttccctcttccttcttcgagacagccccatatattgctcccgatgctatctttgctctcacagcagagtacaatgccgacacattcccccagaaagtgaacctcgggcaagggacctaccgagatgagaatggacagccatgggttctgccttcggtgcggaagagtcgcgagctgctcgttgagcagggtctgaatcatgagtatcttccgatcttgggtcttcaggcgtttcgccaggaggcgagtaagatggcattaggctctggactatacgagagaatccaatctaggctcgcaacctgccaaggcctctccggcactggatctctgcatctagcaggcctacttctccgaagttgccgtgcaccgttaccaaagatatacatccccagtcccacatggtcaaaccatcaccaggtcttttcctctctcgggtttacctgcgaatctttcggatactatgatgacgctcagaagaacatagatatcgacagctactactctgcccttaaacgggcggaaccaggctctgtcgtcatccttcacgcgtgcgcgcataaccccaccggctgcgatcctagcaaagagcaatggaaggaagtcggtcgtattgtcaaagagaagggactattccctctctttgatgcagcataccttggcttcaattcggggaatatcgatgatgacgcttttgccattcggtattttgttgatgaattggacgtggaagcaggtgtatgtttgtcttttgcgaagaatatgggactgtatggagagcgcacgggctgtctattgttcgtagctcggacagacaaagccgcgacaaacacacagtcagtgctcgagatgctgcaacggtctgaagtctcgaatccgcccgcttatggagccaaaattgctactacaattttggcggaccaggagcttaaggcgctctggtataaagacctcgagaccatgagtggtcggatccgggcgatgcggagggccctgtacgattcgttgaacagcaatggcgctcctggtaattgggaccatttggtccgccagtcgggtatgtttgggttcttgggtctcgctccggatgtggtccagaatctgaaggtgcaataccacatctacatggcggccagctcgcgggtctctatagccgggctcaacgacgggaatgtggattacgtcggtcgctcgattgccgagtgtctgaagagcaactag

SEQ ID NO: 66566 - protein, 419 aa, Aspergillus niger
MTTQTNTITQTGTVPSSFFETAPYIAPDAIFALTAEYNADTFPQKVNLGQGTYRDENGQPWVLPSVRKSRELLVEQGLNHEYLPILGLQAFRQEASKMALGSGLYERIQSRLATCQGLSGTGSLHLAGLLLRSCRAPLPKIYIPSPTWSNHHQVFSSLGFTCESFGYYDDAQKNIDIDSYYSALKRAEPGSVVILHACAHNPTGCDPSKEQWKEVGRIVKEKGLFPLFDAAYLGFNSGNIDDDAFAIRYFVDELDVEAGVCLSFAKNMGLYGERTGCLLFVARTDKAATNTQSVLEMLQRSEVSNPPAYGAKIATTILADQELKALWYKDLETMSGRIRAMRRALYDSLNSNGAPGNWDHLVRQSGMFGFLGLAPDVVQNLKVQYHIYMAASSRVSIAGLNDGNVDYVGRSIAECLKSN

SEQ ID NO: 66567 - DNA, 1290 bp, Aspergillus niger
  CDS (1)..(1290)
atgctgtccaccctcagagtcgccagccgtaaggctgctacccgtgacgctagtgtgcgcaccgttattgtcggcgccagacacgcctccgcctggtccaacgtgcctcagggtcctcccgatgctatcctgggtatcaccgaggcctacaaggccgacaccttcaaggagaagatcaaccttggtgtcggtgcttaccgtgacgaccagggcaagccctacgtcctgccttccgtccgtgctgcagaggacaaggttgtcgccacccgcctcgacaaggaatacgccggtatcaccggtatccctgccttcaccaaggctgctgctgagctggcctacggtgccgattccgccgtcctcaaggaggaccgtctcgtcatcacccagaccatctccggtaccggcgctctgagaatcggtggagctttcctgcagcgcttctaccctcacgcgaagaaggtctacctccccacccccagctgggccaaccacgccgctgtcttcaaggacgccggtctggaggttgacaagtaccgctactacaacaaggacaccattggccttgacttcgatggcctgcttgccgacatcaaggctgcccccgagaacagcatcatccttctccacgcctgcgctcacaaccctaccggtgtcgaccccacccaggagcaatggcgccagattagcgacgtcatgaagcagaagggtcactttgccttcttcgacatggcctaccagggctttgccagtggtaacgctgaccaggatgcctttgctccccgtcacttcgtgaaggagggccacaacattgctctttgccagagtttcgccaagaacatgggtctgtacggcgagcgtgtcggtgccttctctctcgtctgcgagtccgccgaggagaagaagcgtgtggattctcagatcaagatcctcatccgtcccttctactccaaccctcccatccacggtgcccgcatcgcctcgaccatcatgaacgacgccaagcttaacgagcagtggctgggtgaggtcaagggcatggccgaccgcatcatcgagatgcgcgctctcctccgcaagaacctggaggagcttggcagcaagcacgactggtctcacatcaccagccagattggcatgttcgcctacactggtctcaagcccgagcagatggacgctctggccaaggagcactccgtctacgccaccaaggacggccgtatctccgtggccggtatcaccagcggcaacgtcaagcgtcttgccgagtccatctacaagatcaccggttaa

SEQ ID NO: 66568 - protein, 429 aa, Aspergillus niger
MLSTLRVASRKAATRDASVRTVIVGARHASAWSNVPQGPPDAILGITEAYKADTFKEKINLGVGAYRDDQGKPYVLPSVRAAEDKVVATRLDKEYAGITGIPAFTKAAAELAYGADSAVLKEDRLVITQTISGTGALRIGGAFLQRFYPHAKKVYLPTPSWANHAAVFKDAGLEVDKYRYYNKDTIGLDFDGLLADIKAAPENSIILLHACAHNPTGVDPTQEQWRQISDVMKQKGHFAFFDMAYQGFASGNADQDAFAPRHFVKEGHNIALCQSFAKNMGLYGERVGAFSLVCESAEEKKRVDSQIKILIRPFYSNPPIHGARIASTIMNDAKLNEQWLGEVKGMADRIIEMRALLRKNLEELGSKHDWSHITSQIGMFAYTGLKPEQMDALAKEHSVYATKDGRISVAGITSGNVKRLAESIYKITG

SEQ ID NO: 66569 - DNA, 1242 bp, Aspergillus niger
  CDS (1)..(1242)
atgagcgagcaataccttggcctacctattgccccagcagatacagccttcgggttaatggcagaatacgatgcagaccagcacccaaacaaagtatccctgatagcaggggcctaccgcgacgagaacggccaaccctgggtacttccgagcgtgagagaggcaaaagagctcctcgctcaaagtcaaaaccatgaatatctcggcatcgcaggctccccagccctaattaacctagcccagtcccttacattcggatccgagattaccgcaaagctagaaaagagcatcacttccatccaaacagtctcaggaacaggcgcaaaccacatggctgcgcacttcctagcacatcatcttcgcccaaagcgggtattcataccctcgccgacatggatcaatcataagactatctgggccaacgtcggggtccctatcgcagagtatccttactactccacaaaaaccaggggagtggacttggaaggaatgctctcagtgtttaaaacaaccgccgaggagagagatgtagtgatcctgcaagcctgtgcacataacccgacaggtgtggacctcacccacgagcaatgggcacaagtagcggaggtaatgaagcggaagaaactatacgttgtgtttgacagcgcataccaaggatttgctacaggcgacgtggacggtgatgcctggtcaattcggtttttcgtggagcaactgatcttggatggacagcccgactgtccaggcctctgcgtggctcagtctttttctaaaaatttcggactttatggcgagcgtgtaggtgctctccaccttgtcgtgccgcggcatcttggagctcagggtgcccgctcggaattggttgctctcgctcgctccgagtactccaatccccctcgcttcggggcgagtattgtcgagactgtcctggggaatgagaagttgaaaggtcaatggttgagagatttggatactatgagttcgaaaatcaagaacatgcggcgtgagcttcgcagaaggctggaaaacaaggggacgcccggggattggtcggttttggagagccagattggtatgtttagctacacggcgctggatcaagaacaggtcactcgtttgcgggagaagtttcatatctatctcttgccttccgggagagtgagtatctgtgggctgaacgagaagaatattgagtatgtggcgagtgcatttggtgaggcgatcgaactcaattctagctga

SEQ ID NO: 66570 - protein, 413 aa, Aspergillus niger
MSEQYLGLPIAPADTAFGLMAEYDADQHPNKVSLIAGAYRDENGQPWVLPSVREAKELLAQSQNHEYLGIAGSPALINLAQSLTFGSEITAKLEKSITSIQTVSGTGANHMAAHFLAHHLRPKRVFIPSPTWINHKTIWANVGVPIAEYPYYSTKTRGVDLEGMLSVFKTTAEERDVVILQACAHNPTGVDLTHEQWAQVAEVMKRKKLYVVFDSAYQGFATGDVDGDAWSIRFFVEQLILDGQPDCPGLCVAQSFSKNFGLYGERVGALHLVVPRHLGAQGARSELVALARSEYSNPPRFGASIVETVLGNEKLKGQWLRDLDTMSSKIKNMRRELRRRLENKGTPGDWSVLESQIGMFSYTALDQEQVTRLREKFHIYLLPSGRVSICGLNEKNIEYVASAFGEAIELNSS

SEQ ID NO: 66571 - DNA, 1248 bp, Aspergillus niger
  CDS (1)..(1248)
atgactgtccttaacctgaccccgctaccggcggacgagatcttcgctctcaaccgcgaatacgccaacgacactttccccgacaaagtcagtctcggtgtcggtgtctaccgcactgacgatggcaagccctggccattgccctccgtccgcaaggccgagcagcaattgctcgccgaagacagccccttccgccacgaatacaccgcgattgaaggcgacatcccgttcctcgagctggctcgggacctgatgttcggcttcgactccaaaaacctctgcgaggagcacaaggccctgaaaggtcgcattggctccgtccagtccgtcgccggcactggcgccaaccatttgggcgctctcttcctcgctcacaagatgaagcccaagaccgtctggctctccgacccctcctgggccaaccatgtcaccatttgggacctcgtcggcgtcccccgcaagacctacccctactacaagcccgagacccgctctttcgacttcgagggcatgatgtccacccttgaatccgacgcccaggaaggcgacgtgattcttctgcatgcctgcgcgcacaaccccaccggtctcgacccctccaaggagcaatggaaggccattgccgagatctgtgagcgtaagaagatcttccccttcttcgactccgcctaccaaggttttgcctccggatccgccgatgaggacgcctgggccgtgcgctacttcctcaacgagaagccacagatggaaatgtgtgttgcgcagtccttctccaagaacttcggtctttatggccagcgtgtcggcgctttccattacgtcgtcgcagagggatcccagaacctccgcgatcttgtcgtcaacaacctctgccacttcattcgcggcgagttctccatgggtcctactggcggttgctccatcgtcaagaaggtcttgacgaacgatgccctcaccacgcaatggcacgatgatctcaaggtcatgagctcccgtatcaaggccatgcgcgctgccctgtacgatgagctcgtcagacttgagacccccggaacttggaagcacatcgttgaacagaatggcatgttctcctacactggcctcaccccgacccaagtccaagccctgaaggagaagtaccacgtctacctcatcaaatccggcagagcttctatcagcggcttgagccagaagaacgtcgcctatgtcgcgaaagctttcgacgacattgtccgcaacgtcaaataa

SEQ ID NO: 66572 - protein, 415 aa, Aspergillus niger
MTVLNLTPLPADEIFALNREYANDTFPDKVSLGVGVYRTDDGKPWPLPSVRKAEQQLLAEDSPFRHEYTAIEGDIPFLELARDLMFGFDSKNLCEEHKALKGRIGSVQSVAGTGANHLGALFLAHKMKPKTVWLSDPSWANHVTIWDLVGVPRKTYPYYKPETRSFDFEGMMSTLESDAQEGDVILLHACAHNPTGLDPSKEQWKAIAEICERKKIFPFFDSAYQGFASGSADEDAWAVRYFLNEKPQMEMCVAQSFSKNFGLYGQRVGAFHYVVAEGSQNLRDLVVNNLCHFIRGEFSMGPTGGCSIVKKVLTNDALTTQWHDDLKVMSSRIKAMRAALYDELVRLETPGTWKHIVEQNGMFSYTGLTPTQVQALKEKYHVYLIKSGRASISGLSQKNVAYVAKAFDDIVRNVK

SEQ ID NO: 66573 - DNA, 1398 bp, Canavalia lineata
  CDS (1)..(1398)
atggcttcttcagtcctttccggggccaaccagtcttccccttcgtcgaccgttctcaacacccaccttaagggaaagcctcggctaggtgacaatgctctcagattctctggaaacaaaggaggatccaatgccttctcctcaaggtctcgaggtcgtatctccatggctgttgctgataatgtttctcggtttgaaggcatacctatggctcctcctgatccaattctcggagtttcagaggcgtttagagcagacaatagtgatgtgaagctcaatcttggagttggggcatacagaacagaagaattacagccatacgtgcttaatgttgttaaaaaggcagaaaatcttatgctggagagagggcaaaacaaagagtatgtccctattgagggtttggcagcatttaacaaggcaactgcagagttgctactcggagcagacaatccagcaatcaaacagcaaagagttgccactgtccaaggtctttcaggaactggttctctgcgactaggtgcagctgttatagaacgatattttcctggggcaaaagttttgatatcaagtcctacctggggtaatcacaagaatattttcaatgatgctagggtcccatggtccgagtaccgatattatgatcccaagacagttggtttggattttgagggcatgatagaagatataaagtcggctccggaaggtacttttgtcctacttcatggatgtgctcataaccctactggtattgatccaacacctgaacagtgggaaaaaatagctgatgtaattgaagaaaaaaaccaccggcccttttttgatgttgcttaccaggggtttgctagtggaagccttgatgaagacgcagcatccgtccgactgttagtggcacgtggcatcgaattattcattgcagactcttatccaaaagatgtgggtctttatgctcaaaggattggagcaatcaatgtcatttcctcatcaccagaatctgcagctagggatacgagccaactgaaaaggattgcacgaccaatgtactctaatccaccggttcacggggctaggattgttgccgatcttgtttcgaaaccacagctctttgatgaatggaaagctgagatggaaatgatggctggaaggataaagaatgttagacagcttctgtatgatccgatttcttcaaaagacaaaagtggaaaggattggtcattcatacttaagcagataggcatgttctcattcacaggcttgaacaaggaacagagtgacaacatgacaaataagtggcatgtactaatgacaaaggatggaaggatttccccggcaggattgtcgttggctaaatgtgaataccttgcggatgctattatcgattcatatcataatgtcagctga

SEQ ID NO: 66574 - protein, 465 aa, Canavalia lineata
MASSVLSGANQSSPSSTVLNTHLKGKPRLGDNALRFSGNKGGSNAFSSRSRGRISMAVADNVSRFEGIPMAPPDPILGVSEAFRADNSDVKLNLGVGAYRTEELQPYVLNVVKKAENLMLERGQNKEYVPIEGLAAFNKATAELLLGADNPAIKQQRVATVQGLSGTGSLRLGAAVIERYFPGAKVLISSPTWGNHKNIFNDARVPWSEYRYYDPKTVGLDFEGMIEDIKSAPEGTFVLLHGCAHNPTGIDPTPEQWEKIADVIEEKNHRPFFDVAYQGFASGSLDEDAASVRLLVARGIELFIADSYPKDVGLYAQRIGAINVISSSPESAARDTSQLKRIARPMYSNPPVHGARIVADLVSKPQLFDEWKAEMEMMAGRIKNVRQLLYDPISSKDKSGKDWSFILKQIGMFSFTGLNKEQSDNMTNKWHVLMTKDGRISPAGLSLAKCEYLADAIIDSYHNVS

SEQ ID NO: 66575 - DNA, 1685 bp, Lotus corniculatus
  CDS (119)..(1492)
ttcgattcatccggtacgccattaaaccactctgcaactagatccatcactctttcactcgagtttggttgtaaccgtttccgttatttctgttgtggtcggtttgtttccgttgcagatggcggcgtcttcagtgttctctgtagcttcacactctgtttcgccttcgaatcaccatgctcacaagggaaaaaccaagattggaggtagcggtttgagattggcaaattcaaggtcttttggtagtggccggatctctatggctgttgctgttaatgcttctcgatttgagggaataccgatggctccacctgatccaattctcggagtttctgaagcatttaaagcggacaaatgcgatctcaagctcaatcttggagtcggggcctacagaactgaagaattacagccatatgtgcttaatgttgttaagaaggcagagaatcttatgctgaatagaggggaaaacaaagagtatctacctattgagggttgggctgcatttaataaggcaactgcagagttgttactcggagctgacaacccagcaatcaaagaacaaagagttgccactgtccaaggtctttctggaactggttctctgcgacatgctgctgctctgatagagcgatattttccaggggcaaaagttttgatatcatcccctacctggggtaatcacaagaatattttcaatgatgctagagtcccatggtcagagtaccgatattatgatcctaagacagttggattggattttgagggcatgttagaagatataaagtcagctcctgaaggatctttcgtgctacttcatggatgtgctcataaccctaccggtattgatcccacaccagaacagtgggtgaaaatagctgatctaattcaacaaaagaaccacattccattttttgatgtcgcttaccaggggtttgctagtggaagcctggatgaagatgctgcttctgtgcgattgtttgtgtcacgtggcatggaggttctagtagctcagtcatacagtaaaaatcttggtctctatgctgaaaggattggagcaatcaatgtcatttcctcatcaccagaatctgctgcaagggtaaagagccaattgaaaaggattgccaggccaatgtactctaatccaccggttcacggggctaggattgttgctgatatagttggaaatccagatctcttcaatgaatggaaagcagagatggaaatgatggcaggaaggataaagaatgttagacagaagctatatgatagtatttcttcaaaagacaagagtggaaaggattggtcattcatacttaagcagataggcatgttctcattcacaggcttgaacaagaatcagagtgacaatatgacaaataagtggcatgtatacatgacaaaagatggaaggatttccctggcaggattgtcactggccaaatgtgaataccttgcagatgctattattgactcctatcataatgtcagctgaaactagatgaaatattctttatcaccaagcttatattttttggtgagtattgtatccaatcatagtggtcggcacacatgacaataattcatgtaaacattaatgtcatacatgtacttttaattccctaggaattttgtaaccttaaaataagttgaatcaaactattgatgcaaaaaaaaaaaaaaaaaaa

SEQ ID NO: 66576 - protein, 457 aa, Lotus corniculatus
MAASSVFSVASHSVSPSNHHAHKGKTKIGGSGLRLANSRSFGSGRISMAVAVNASRFEGIPMAPPDPILGVSEAFKADKCDLKLNLGVGAYRTEELQPYVLNVVKKAENLMLNRGENKEYLPIEGWAAFNKATAELLLGADNPAIKEQRVATVQGLSGTGSLRHAAALIERYFPGAKVLISSPTWGNHKNIFNDARVPWSEYRYYDPKTVGLDFEGMLEDIKSAPEGSFVLLHGCAHNPTGIDPTPEQWVKIADLIQQKNHIPFFDVAYQGFASGSLDEDAASVRLFVSRGMEVLVAQSYSKNLGLYAERIGAINVISSSPESAARVKSQLKRIARPMYSNPPVHGARIVADIVGNPDLFNEWKAEMEMMAGRIKNVRQKLYDSISSKDKSGKDWSFILKQIGMFSFTGLNKNQSDNMTNKWHVYMTKDGRISLAGLSLAKCEYLADAIIDSYHNVS

SEQ ID NO: 66577 - DNA, 1690 bp, Glycine max
  CDS (152)..(1522)
tcattcttcttacataataggggaaggagaagaaaaaaaatgaaataagaaaaactcaactttgtaattcgtggagggaatacttttccattacgcacgcactttaattacagacgagaaaattataattaatagtaatacagacagcagcatgcgcccaccggttattctcaaaactaccacctctcttttggattcttcttcttcttcaccaccctgtgatcgcagactcaacactctcgctagacacttccttccgcaaatggcttctcacgacagcatctccgcttctccaacctccgcttctgattccgtcttcaatcacctcgttcgtgctcccgaagatcctatcctcggggtaactgtcgcttataacaaagatccaagtccagttaagctcaacttgggagttggtgcttaccgaactgaggaaggaaaacctcttgttttgaatgtagtgaggcgagttgaacagcaactcataaatgacgtgtcacgcaacaaggaatatattccgatcgttgggcttgctgattttaataaattgagtgctaagcttatttttggggctgacagccctgctattcaagacaacagggttaccactgttcaatgcttgtctggaactggttctttaagagttgggggtgaatttttggctaaacactatcaccaacggactatatacttgccaacaccaacttggggcaatcacccgaaggttttcaacttagcaggcttgtctgtcaaaacataccgctactatgctccagcaacacgaggacttgactttcaaggacttctggaagaccttggttctgctccatctggatctattgttttgctacatgcatgcgcacataaccccactggtgtggatccaacccttgagcaatgggagcagattaggcagctaataagatcaaaagctttgttacctttctttgacagtgcttatcagggttttgctagtggaagtctagatgcagatgcccaacctgttcgtttgtttgttgctgatggaggcgaattgctggtagcacaaagctatgcaaagaatctgggtctttatggggaacgtgttggcgccttaagcattgtctgcaagtcagctgatgttgcaagcagggttgagagccagctgaagctagtgattaggcccatgtactcaagtcctcccattcatggtgcatccattgtggctgccattctcaaggaccggaatttgttcaatgactggactattgagttgaaggcaatggctgatcgcatcatcagtatgcgccaagaacttttcgatgctttatgttccagaggcacacctggcgattggagtcacattatcaaacagattggaatgtttactttcactggattgaatgcggaacaagtttccttcatgactaaagagttccatatatacatgacatctgatgggaggattagcatggctggtctgagttccaaaactgtcccacttctggcggatgcgatacatgcagctgtaacccgagttgtctaaaacatgttgacaacagttttcaacatgctccctagtccctataggagaacttccattatttttgtttaataattgtcaacatcaacaatgaaaccttttatttgatgtgagatttttaaaggaaacttttctgcctaccgggctccaaaaaaaaaaaaaaaaaaaaaa

SEQ ID NO: 66578 - protein, 456 aa, Glycine max
MRPPVILKTTTSLLDSSSSSPPCDRRLNTLARHFLPQMASHDSISASPTSASDSVFNHLVRAPEDPILGVTVAYNKDPSPVKLNLGVGAYRTEEGKPLVLNVVRRVEQQLINDVSRNKEYIPIVGLADFNKLSAKLIFGADSPAIQDNRVTTVQCLSGTGSLRVGGEFLAKHYHQRTIYLPTPTWGNHPKVFNLAGLSVKTYRYYAPATRGLDFQGLLEDLGSAPSGSIVLLHACAHNPTGVDPTLEQWEQIRQLIRSKALLPFFDSAYQGFASGSLDADAQPVRLFVADGGELLVAQSYAKNLGLYGERVGALSIVCKSADVASRVESQLKLVIRPMYSSPPIHGASIVAAILKDRNLFNDWTIELKAMADRIISMRQELFDALCSRGTPGDWSHIIKQIGMFTFTGLNAEQVSFMTKEFHIYMTSDGRISMAGLSSKTVPLLADAIHAAVTRVV

SEQ ID NO: 66579 - DNA, 1737 bp, Canavalia lineata
  CDS (44)..(1441)
aacttaatcttcttgctttggttctttccctcctgaccaaagcatggcttcttcagtcctttccggggccaaccagtcttccccttcgtcgaccgttctcaacacccaccttaagggaaagcctcggctaggtgacaatgctctcagattctctggaaacaaaggaggatccaatgccttctcctcaaggtctcgaggtcgtatctccatggctgttgctgataatgtttctcggtttgaaggcatacctatggctcctcctgatccaattctcggagtttcagaggcgtttaaggcagacaatagtgatgtgaagctcaatcttggagttggggcatacagaacagaagaattacagccatacgtgcttaatgttgttaaaaaggcagaaaatcttatgctggagagagggcaaaacaaagagtatcttcctattgagggtttggcagcatttaacaaggcaactgcagagttgctactcggagcagacaatccagcaatcaaacagcaaagagttgccactgtccaaggtctttcaggactggtatctctgcgactaggtgcagctctgatagaacgatattttcctggggcaaaagttttgatatcaagtcctacctggggtaatcacaagaatattttcaatgatgctagggtcccatggtccgagtaccgatattatgatcccaagacagttggtttggattttgagggcatgatagaagatataaagtcggctccggaaggtacttttgtcctacttcatggatgtgctcataaccctactggtattgatccaacacctgaacagtgggaaaaaatagctgatgtaattgaagaaaaaaaccaccggcccttttttgatgttgcttaccaggggtttgctagtggaagccttgatgaagacgcagcatccgtccgactgttagtggcacgtggcatcgaattattcattgcacagtcttattccaaaaacctgggtctttatgctcaaaggattggagcaatcaatgtcatttcctcatcaccagaatctgcagctaggctgacgagccaactgaaaaggattgcacgaccaatgtactctaatccaccggttcacggggctaggattgttgccgatcttgttggcaatccattgctctttgaagaatggaaagctttcatggaaatgatggctggaaggataaagaatgttagacagcttctgtatgattccatttcttcaaaagacaaaagtggaaaggattggtcattcatacttaagcagataggcatgttctcattcacaggcttgaacaaggaacagagtgacaacatgacaaataagtggcatgtatacatgacaaaggatggaaggatttccctggcaggattgtcgttggctaaatgtgaataccttgcggatgctattatcgattcatatcataatgtcagctgaaactcaatgagttatgcttcagaactaagcttcttacttttttggtgagtattatacccagtcacagtgggcacattccaagaccgaaatagtgtatgcattatttagaataattatatagtacccaatgtgccttcggaaattatgttgtgaccttgaatatgttccctcaaagtattgatgtaacaaagaaataacttttttcgagatttgaaacaagttgattggaaccaaatttaagaatatgatttcttatgttgtccataaagtctgcttgaagtataaaaaaaaaaaaa

SEQ ID NO: 66580 - protein, 465 aa, Canavalia lineata
MASSVLSGANQSSPSSTVLNTHLKGKPRLGDNALRFSGNKGGSNAFSSRSRGRISMAVADNVSRFEGIPMAPPDPILGVSEAFKADNSDVKLNLGVGAYRTEELQPYVLNVVKKAENLMLERGQNKEYLPIEGLAAFNKATAELLLGADNPAIKQQRVATVQGLSGLVSLRLGAALIERYFPGAKVLISSPTWGNHKNIFNDARVPWSEYRYYDPKTVGLDFEGMIEDIKSAPEGTFVLLHGCAHNPTGIDPTPEQWEKIADVIEEKNHRPFFDVAYQGFASGSLDEDAASVRLLVARGIELFIAQSYSKNLGLYAQRIGAINVISSSPESAARLTSQLKRIARPMYSNPPVHGARIVADLVGNPLLFEEWKAFMEMMAGRIKNVRQLLYDSISSKDKSGKDWSFILKQIGMFSFTGLNKEQSDNMTNKWHVYMTKDGRISLAGLSLAKCEYLADAIIDSYHNVS

SEQ ID NO: 66581 - DNA, 2112 bp, Ajellomyces capsulata
  CDS (331)..(1614)
ctggcaaaatttggttaaaggagcaacacatccgcccccgggaaaggaaaaagggtacaaagtttattattattattattttttaaaggcaagataatatcctaaatgcttctcccagttcttggacttcttgattcagatttccaggggagaagattgagacaactgctggcaaacttgcttgaactccccatcctcggaatcaatctttctaaatctgtaagggcaacagtgtggaattttctggttgttatttaaacagaattaaagaaagaaaatatattaagattacaattataatcgaatcacataccaaatcaacatctgaacatggctcctgcaccgcaagaaagcctgttcagcaccttggaaatccctcaatatgatgaggttttcggactcatggctcaatttgtggctgacacttcgccgcagaaggtcagtcttggagccggagtgtacagagacaatgaggccaagagctggaggttaaacatcgtcgaaaaacaactgtgtgaagatccgacgtttgaccatgaatatcttcctattgaagggtaccagccattcgtggatgcagcgagggatctggtctttgggaacagctgccccattgccaaaggccgcattgccagcttgcaaacggtttcgggaacaggcgcaaaccatctcggtgctcgtttcctcaaagaacacctccctcgtctgatctcaccatcctcatcgtccgctactccaacccgaaaaatctggctctcagacccaacctgggccaaccaccatttgatctgggacctggtcgcctcaagttccaccggaagccccatcaagaccgttctctacccatactaccacgcccagacccgctccttcgatttcgacggcatgatccgcacactggaagctaacgcgcagcgcggggatgtcatccttctgcatgcctgcgcgcacaaccccacgggtcttgaccccaccagggcccagtgggaggccatcgcctctctgtgtcagaggaagggaatattcccattcttcgactctgcgtatcagggtttcgcgtcgggggatttggataatgacgcctgggccatgcgagagtttgtcgcgcgtgggatggagatgtgtgtggcacagagctttagcaagaacctgggcctctatgggcagcgggttggggcttttcatctcgtgtgccacaccgaggattcggccagaagggctaggttccagctcattgagttgcaaaggggggagatttcgatgccgcctgcttatggttcaaaaatcgcagctgcagtcctcagagaccccgccaacgttatcgaatggaaacaagacctgtctatcatgagcagcaggataaaatccatgcgacgcgcgctgtacgatgagctacgccgtctaggcacgcccggcaattgggaccatatcatcaatcagatcggcatgttttcatacaccggcctgaccaagaagcagatcaagaccctgagggaagactatcatatctatatgcttgagtcggggagagcgtcgatttctggactgaccaccaataacgtgaagtacgtcgccggcgcctttgacgcggtggtgagagacatgccgtactaaatcgccgcgcatgcgtcaccaaactccagaacattactggcccaattccagcctgccttttgtttcggcagagacgcagcttccaaggctgcaacgcttgtctccaaacagggaataacatccgtaatccctaccttatctcaacgattggcgttttatcggttaagtgcggcaccggcctcatcggcatcatcgatatcaaacaaacccgcccgtttgggttagggggtgtggggggggttggctgacttctcgatcatttcgatttattcattcattacgtacttggataactaactgtatgtagaatagttagatagagagtagccttcctactggctccgcggtttggggatgcggtttgtttttctttcctattcaaccctcttcctctctcttttatttttttactttattttatatttttgatacaatggcggattaatgtctcctctgatataggtatatacatatacatattaaacagcgtgtatacag

SEQ ID NO: 66582 - protein, 427 aa, Ajellomyces capsulata
MAPAPQESLFSTLEIPQYDEVFGLMAQFVADTSPQKVSLGAGVYRDNEAKSWRLNIVEKQLCEDPTFDHEYLPIEGYQPFVDAARDLVFGNSCPIAKGRIASLQTVSGTGANHLGARFLKEHLPRLISPSSSSATPTRKIWLSDPTWANHHLIWDLVASSSTGSPIKTVLYPYYHAQTRSFDFDGMIRTLEANAQRGDVILLHACAHNPTGLDPTRAQWEAIASLCQRKGIFPFFDSAYQGFASGDLDNDAWAMREFVARGMEMCVAQSFSKNLGLYGQRVGAFHLVCHTEDSARRARFQLIELQRGEISMPPAYGSKIAAAVLRDPANVIEWKQDLSIMSSRIKSMRRALYDELRRLGTPGNWDHIINQIGMFSYTGLTKKQIKTLREDYHIYMLESGRASISGLTTNNVKYVAGAFDAVVRDMPY

SEQ ID NO: 66583 - DNA, 1332 bp, Aspergillus oryzae
  CDS (1)..(1332)
atgtcgcctccgtccacctcagcttcttcttcctccaccgctcgcaatcgtctcgcatcactctccgctcaaatcatgggttctgccagcccgtccgtcttttcgacctcggtggtccctgccgcccccgaggatccgctctttggtctggcgcaggccttccgcaacgacccctccgataagaaagtcgatctggttatcggcgcctatcgtgatgacaatgcgaagccttggatcctccccgtcgtgagaaaggccggtgatctgattcgcaatgatccctccatcaacaacgaatacctgcccatcaagggtctccctgaattcacctcagccgcccagaaagtgattttgggatcggacagccccgcgatccgcgaacaaagagtggccactttccaaaccatctccggcacaggagctgtgcatctcggtgcccttttccttgccaaattccaccccgcgaaccccaagcccaccgtctacctctccaacccaacctgggccaaccacaaccagatcttcaccaatgtcggcctctccctcgcaacctacccgtacttcgacgccaagacgaagggcctcaacttcgacggcatgctgaacggcatccgcgaggcccccgccggctccgtcatcctcctccacgcctgcgcccacaaccccaccggtgtcgacctcactcaagaccaatggaaacagctcgccgtcgtcatgcgcgagcgccgccacttccccttcttcgataccgcataccagggtttcgcctcgggcgacttgaaccgcgacgcctgggcggtgcgatacttcatcgagcagggcttcgagctgtgtgtcgcgcagtccttcgcgaagaacttcggtctgtacggtcagcgcgcgggcgcgttccacttcgtctcggcccccggtgccaccgccaagaacgatatcgccaatgtcgccagtcagctggccatcctgcagcggtcggagatttcgaatcccccggcgtacggtgcacaaatcgccagccgcattctgaatgacgctaccttgttcgcggagtgggaggaagacctccggacgatgagtggacgcattgcggagatgcggaagggcctgcgtgagcgtctagaggccaagggcacaccgggcacatggaaccatgtgacggatcaaatcggcatgttcagtttcacaggcttgagtgaagcacaggtcaagttgttgcgggagaagtggcacatctatatgaccaagaatggccgaatctcgatggccggcctcaacacacataacatcgactacttcgcagaggcagtcgacagtgtcgtccgggagacatcgtaa

SEQ ID NO: 66584 - protein, 443 aa, Aspergillus oryzae
MSPPSTSASSSSTARNRLASLSAQIMGSASPSVFSTSVVPAAPEDPLFGLAQAFRNDPSDKKVDLVIGAYRDDNAKPWILPVVRKAGDLIRNDPSINNEYLPIKGLPEFTSAAQKVILGSDSPAIREQRVATFQTISGTGAVHLGALFLAKFHPANPKPTVYLSNPTWANHNQIFTNVGLSLATYPYFDAKTKGLNFDGMLNGIREAPAGSVILLHACAHNPTGVDLTQDQWKQLAVVMRERRHFPFFDTAYQGFASGDLNRDAWAVRYFIEQGFELCVAQSFAKNFGLYGQRAGAFHFVSAPGATAKNDIANVASQLAILQRSEISNPPAYGAQIASRILNDATLFAEWEEDLRTMSGRIAEMRKGLRERLEAKGTPGTWNHVTDQIGMFSFTGLSEAQVKLLREKWHIYMTKNGRISMAGLNTHNIDYFAEAVDSVVRETS

SEQ ID NO: 66585 - DNA, 1251 bp, Aspergillus oryzae
  CDS (1)..(1251)
atgactgttttaagtaccttggccccggtgccggcggatgagatcttcgccttgaaccgcgcctatgccaacgacgactacccccagaaggtcagtctcggtgtgggtgtctaccgtacagacgatggcaagccatggccgctgcccgtcgtccgtgaggcagagaagcgcctacttgccgaggacaacctcttcagacatgaatataccgctatcgaaggcgacattcccttcctcgagctggctcgagacctgatgttcggcttcgatgcgaaagacacctccgacaaggtcaagtcgaccaagggccgcattggctctgtccaggctgtcgcaggtaccggcgccaaccacctcggtgctctcttcctctcacaccttatgaagcccaagaacgtctggctctccaacccgtcctgggccaaccacctgaccatctgggagcttgctggcgtccccaggaagacctacccatactacaaggccgccactcgctccttcgacttcgaaggcatgatgtctaccctcgaagccgaggcccagcaaggagacgtcatcctcctccatgcctgcgctcataaccccaccggtctcgacccaaacaaggagcaatggaaggctattgctgacctgtgcgagcgcaagaagctcttccccttcttcgactccgcataccagggtttcgcctccggttcggccgacgaggatgcctgggctgtccggtacttcctcaacgagaagccccagatggaaatgtgcgttgcccagagcttctcgaagaacttcggtctctacggccagcgtgtcggtgctttccactatgtcctgaacgacggtgcccagaacctccgcgacattgtcgtcaacaacctctgtcacttcatccgtggagagtactccatgggtcccaccggtggatgcagcatcgttaagaaggtcctgactgacgaagaactcactgcccagtggcatgaagatctgaaggtcatgagctcccgtatcagaaccatgagacaggcactatacaatgagctcatcaaactcgagacccccggaacatggagacacatcgttgaacagaacggaatgttctcctacaccggcctgaccccctctcaagtctacgctctgaaggacaagtatcacatttaccttctcaaatccggcagagcctccatcagcggcctgagcgagaagaatgtcacctacgtagctcaggctatcaacgacgttgtccgcaacgtcaactaa

SEQ ID NO: 66586 - protein, 416 aa, Aspergillus oryzae
MTVLSTLAPVPADEIFALNRAYANDDYPQKVSLGVGVYRTDDGKPWPLPVVREAEKRLLAEDNLFRHEYTAIEGDIPFLELARDLMFGFDAKDTSDKVKSTKGRIGSVQAVAGTGANHLGALFLSHLMKPKNVWLSNPSWANHLTIWELAGVPRKTYPYYKAATRSFDFEGMMSTLEAEAQQGDVILLHACAHNPTGLDPNKEQWKAIADLCERKKLFPFFDSAYQGFASGSADEDAWAVRYFLNEKPQMEMCVAQSFSKNFGLYGQRVGAFHYVLNDGAQNLRDIVVNNLCHFIRGEYSMGPTGGCSIVKKVLTDEELTAQWHEDLKVMSSRIRTMRQALYNELIKLETPGTWRHIVEQNGMFSYTGLTPSQVYALKDKYHIYLLKSGRASISGLSEKNVTYVAQAINDVVRNVN

SEQ ID NO: 66587 - DNA, 1239 bp, Aspergillus oryzae
  CDS (1)..(1239)
atgctgtctaccctcagagtcgccagccgtaaggctgcttcgcgtgacgctaacttgcgcaccgtcgtcgttggtgccagacatgcctcggcctggtccaacgtccctcagggtcctccggatgctatcctgggtatcaccgaggctttcaaggccgattctttcaaggagaagatcaacctgggtgttggcgcttaccgtgatgacaagggcaagccgtacgttctgccctccgttcgcgccgcagaggacaaggttgtcgcctcccgctttgacaaggagtacgctggtatcaccggtgtcccttctttcaccaaggccgctgctgagctggcctatggcaaggactcccctgccatcaaggaggaccgcctcgtcatcacccagtccatctctggtaccggtgccctgagaatcggcggtgctttcctgcagcgcttctatccccacgcgaagaagatctacctccctaaccctagctgggccaaccacaacgctgtcttcaaggactccggcttggaggttgagaagtaccgttactacaacaaggacaccattggtcttgacttcgagggtctgattgccgacatcaaggccgcccctgagaacagcatcatccttctccacgcttgcgcccacaaccccaccggtgtcgatcccacccaggagcagtggcgccagatcagcgatgtgatgaagcagaagggccactttgccttcttcgatatggcctatcagggcttcgccagcggcaatgctgacaaggatgctttcgcccccaggcatttcggtctctatggtgagcgtgtcggtgctttctcccttgtgtgtgagaacgccgaagagaagaagcgtgtggactctcaggtcaagattctcatccgccccttctactcgaacccccctatccacggtgcccgtgttgcctccaccatcatgaacgaccctgagctcaaccagcagtggttgggagaggtcaagggcatggccgaccgcatcattgagatgcgctccctgctccggaaaaacctggaggagctgggcagcaagcacgactggtcccacatcaccagccagattggtatgtttgcctacactggtctcaagcccgagcagatggacgctcttgccaaggagcactccgtctacgccaccaaggatggccgtatctccgttgccggtatcacctctgacaatgtcaagagacttgccgagtctatcttcaaggtgaccggttaa

SEQ ID NO: 66588 - protein, 412 aa, Aspergillus oryzae
MLSTLRVASRKAASRDANLRTVVVGARHASAWSNVPQGPPDAILGITEAFKADSFKEKINLGVGAYRDDKGKPYVLPSVRAAEDKVVASRFDKEYAGITGVPSFTKAAAELAYGKDSPAIKEDRLVITQSISGTGALRIGGAFLQRFYPHAKKIYLPNPSWANHNAVFKDSGLEVEKYRYYNKDTIGLDFEGLIADIKAAPENSIILLHACAHNPTGVDPTQEQWRQISDVMKQKGHFAFFDMAYQGFASGNADKDAFAPRHFGLYGERVGAFSLVCENAEEKKRVDSQVKILIRPFYSNPPIHGARVASTIMNDPELNQQWLGEVKGMADRIIEMRSLLRKNLEELGSKHDWSHITSQIGMFAYTGLKPEQMDALAKEHSVYATKDGRISVAGITSDNVKRLAESIFKVTG

SEQ ID NO: 66589 - DNA, 1254 bp, Aspergillus oryzae
  CDS (1)..(1254)
atggcgacccagcccgccacaacagaaaccgaggcttctgcctcatttttcgaggccgcatcatatatcccacctgatgcgatcttcgctcttacggcagagtacaatgctgatacctttgcccagaaggtcaacctgggccagggaacctaccgcgacgagaatggacagccatgggttttgccttctgttcaaaaggctcgcgagactcttctttccaaagggttaaaccacgaatacctgccaattcttggtctccagaccttccgcaatgaagccacaaaactggccttaggatcggaaatatatgacaagaaacagtctcagcttgccatttgccaaagtttgtcaggaacgggtgctctacatctggcaggattgcttcttagaagcgttcgcagcccgctgccaaaagtgtacattccttctccaacctggtcaaaccatggtcaagttttctcgtcactgggatttcagtgtgaaacattccagtattatgatgcagagaagagagatattgatatagaagcgtattactctgccctaagagccgcggagccaaactccgttgttattattcacgcttgtgctcataaccctacgggttgcgatcccagcaaagagcaatggaaacaaattggattgataatgaaagaaagaaagttgttcccgctatttgatgccgcatacctgggtttcaattcgggaaatgtcgatgatgatgcatttgctatgcgttatttcataaacgaactacaaatggaagccggtggctgtctttccttcgcgaagaatatgggactctacggtgagcgtgtgggctgtcttttcttcgcagccggcacagaaaaggccgcgacaaacacacagtcagttcttgaaatgctccaacgctccgaagtgtcaaatcctccagcctatggagcgaagatagcaagtgctattttgggcgatgaaacattaaaagagatgtggtatgcggacttgatcacgatgagcggacgcatacgttccatgagacaagcgttatatgatggactgattaaatttggagcccccggcacatgggaccatctaattcgccagtctggaatgtttggattccttggactttctcctgctgtcgtccagaagctcaaggacaagtatcatatttatatggcgagcaactctcgggtttccattgctggacttaacccgtcgaatgttgaatatgtggcacgctcgattgctgaatgtctaaatgaatcctag

SEQ ID NO: 66590 - protein, 417 aa, Aspergillus oryzae
MATQPATTETEASASFFEAASYIPPDAIFALTAEYNADTFAQKVNLGQGTYRDENGQPWVLPSVQKARETLLSKGLNHEYLPILGLQTFRNEATKLALGSEIYDKKQSQLAICQSLSGTGALHLAGLLLRSVRSPLPKVYIPSPTWSNHGQVFSSLGFQCETFQYYDAEKRDIDIEAYYSALRAAEPNSVVIIHACAHNPTGCDPSKEQWKQIGLIMKERKLFPLFDAAYLGFNSGNVDDDAFAMRYFINELQMEAGGCLSFAKNMGLYGERVGCLFFAAGTEKAATNTQSVLEMLQRSEVSNPPAYGAKIASAILGDETLKEMWYADLITMSGRIRSMRQALYDGLIKFGAPGTWDHLIRQSGMFGFLGLSPAVVQKLKDKYHIYMASNSRVSIAGLNPSNVEYVARSIAECLNES

SEQ ID NO: 66591 - DNA, 1454 bp, Lupinus angustifolius
  CDS (37)..(1299)
gcacgagctctttcaaatcatcttcttaatcatcaaatggcttccgttaatcaatccgtttccgtttctccaaccgcttcttctgattccgttttcgctcatcttcttcctgctcctgaagatcctattctcggggtgactgtggcttataacaaagatccaagcccagttaagctcaatttaggtgttggtgcttaccgaactgaggaaggaaaacctcttgttctgaatgtagtgaggcgtgttgaacagcaacttgtgaatgaagcgtcacgcaacaaggagtatcttccaattgttggggtcgccgatttcaacaaattgagtgctaggctcatttttggtgctgacagccctgctattcaagagaacagggtgaccactgttcaatgcttgtctggtactggttcattaagagttgggggtgaatttctagctagacactatcaccagaggactatatatattcctcaaccaacatggggtaatcacccaaagattttcaccttagctgggttatctgtcaaaacatatcgctattatgctccggcaacaagagggcttgactttgaaggacttctagaagatcttggttctgccccatctggatccattgttttgctacatgcatgcgcacataaccctactggtgttgatccaaccactgagcaatgggagcagattaggaagctgttgagatcaaaagctttgttacctttctttgacagtgcttatcaaggctttgctagtggaagtctagatatagatgcacaggctgttcgcttgtttgttgctgatgggggtgaattgctgcttgcccagagttatgctaagaacatgggtctatatggagaacgtgttggcgccctaagcattgtctccaagtcagctgatgttgcaagcagggttgagagccaggtgaaacttgtggttaggccaatgtactcaaaccctcccattcatggtgcatccattgtggctgccattctcagggaccgggatttgtacaatgagtggcatattgagctgaaggcaatggctgatcgcattatcaaaatgcgccaacaactttttgatgctttgcaatccagaggcacacctggtgattggagtcacattatcaagcagattggaatgtttactttcacaggattgaatgctgagcaagtttccttcttaactaaggagtaccatatatacttgacatctgatgggaggattagcatggctggtctgagttccaaaacagttcctcatttggctgatgcaatacatgcagctgtaaccagagttgtctaaaacatgttactgattacagttttctatttgccccttgttggaggacatccattattttcgttcaataattacggacatcataacattatatctcatcattatgacatttttgttcagttatcttaatatggcatcataaaaaaaaaaaaaaaaaa

SEQ ID NO: 66592 - protein, 420 aa, Lupinus angustifolius
MASVNQSVSVSPTASSDSVFAHLLPAPEDPILGVTVAYNKDPSPVKLNLGVGAYRTEEGKPLVLNVVRRVEQQLVNEASRNKEYLPIVGVADFNKLSARLIFGADSPAIQENRVTTVQCLSGTGSLRVGGEFLARHYHQRTIYIPQPTWGNHPKIFTLAGLSVKTYRYYAPATRGLDFEGLLEDLGSAPSGSIVLLHACAHNPTGVDPTTEQWEQIRKLLRSKALLPFFDSAYQGFASGSLDIDAQAVRLFVADGGELLLAQSYAKNMGLYGERVGALSIVSKSADVASRVESQVKLVVRPMYSNPPIHGASIVAAILRDRDLYNEWHIELKAMADRIIKMRQQLFDALQSRGTPGDWSHIIKQIGMFTFTGLNAEQVSFLTKEYHIYLTSDGRISMAGLSSKTVPHLADAIHAAVTRVV

SEQ ID NO: 66593 - DNA, 1755 bp, Glycine max
  CDS (73)..(1464)
gtttccttcatcttcttcttcttcttctatctctctacaacacacttttttaagtgattcgttcgcagaaacatggcttcttcgtttctatccgcagcttcgcacgctgtctcaccctcttgttctctgtccaccacgcacaagggaaagcccatgcttggaggcaacactttgagatttcacaaaggacccaattccttctctagttcaaggtctagaggtcggatctctatggctgttgcagttaatgtatctcggtttgaaggcatacctatggctcctcctgatccaattctcggagtttccgaggcgtttaaggcagacaatagtgatgtcaagctcaatcttggagttggggcatacagaacagaagaactacagccatatgtgcttaatgttgttaagaaggcagagaatcttatgctggagagaggggataacaaagagtatctcccaattgagggtttggcagcatttaataaggcaactgcagagttgttactcggagcagacaacccagcaatcaaacagcaaagagttgccactgtccaaggtctttctggaactggttctctgcgactaggtgcagctctgatagagcgatattttcctggggcaaaagttttgatatcagctcctacctggggtaatcacaagaatattttcaatgatgctagtgtcccatggtctgagtaccgatattatgatcccaagacagttgggttggattttgagggcatgattgaagatataaagtcagctccggaaggatcttttatcttacttcatggatgtgctcataatcctactggtattgatccaacacctgaacagtgggaaaaaatagctgatttaattgaagaaaagaaccacattcccttttttgatgttgcttaccaggggtttgctagtggaagccttgatgaagatgcagcttctgtgagactgtttgtggcacgtggcatcgaggttcttgtagctcaatcttacagtaaaaatctcggtctctatgctcaaaggattggagcaatcaatgtgatttcatcgtcaccagaatctgcagcaagggaaacgagccaactgaaaaggattgcccgaccaatgtactctaatccaccggtacacggggctaggatagttgccgatgttgttggaaacccagttctctttaatgaatggaaagcagagatggaaatgatggctggaaggataaagaatgttagacagcagctatatgatagtattacttcaaaagacaaaagtggaaaggattggtcattcatacttaagcagataggcatgttctcattcactggcttgaacaagaaccagagtgacaacatgacaaacaagtggcacgtatacatgacaaaggatggaaggatttcctcggcaggattgtcgttggctaaatgcgaataccttgcggatgctattattgattcatatcataatgtcagctgaaactcaattagatatttttggtgagtgttatacccaatcggagcgattggcatacatgaaaataatttagaataatttatgtatgcattatgtgtgtacatatgtaccctcaaagtaccctaggaaattttttttaactttgaaacaagttgactcaaagtattgatgcgtaatgagtcaggttctcagacttaaagctagttgaatcgaagtactgatgcatagtgaggatgtttatcatttcatatgggtgagattggataaatcatggtaacaatagtttcgttaaaa

SEQ ID NO: 66594 - protein, 463 aa, Glycine max
MASSFLSAASHAVSPSCSLSTTHKGKPMLGGNTLRFHKGPNSFSSSRSRGRISMAVAVNVSRFEGIPMAPPDPILGVSEAFKADNSDVKLNLGVGAYRTEELQPYVLNVVKKAENLMLERGDNKEYLPIEGLAAFNKATAELLLGADNPAIKQQRVATVQGLSGTGSLRLGAALIERYFPGAKVLISAPTWGNHKNIFNDASVPWSEYRYYDPKTVGLDFEGMIEDIKSAPEGSFILLHGCAHNPTGIDPTPEQWEKIADLIEEKNHIPFFDVAYQGFASGSLDEDAASVRLFVARGIEVLVAQSYSKNLGLYAQRIGAINVISSSPESAARETSQLKRIARPMYSNPPVHGARIVADVVGNPVLFNEWKAEMEMMAGRIKNVRQQLYDSITSKDKSGKDWSFILKQIGMFSFTGLNKNQSDNMTNKWHVYMTKDGRISSAGLSLAKCEYLADAIIDSYHNVS

SEQ ID NO: 66595 - DNA, 1514 bp, Panicum miliaceum
  CDS (47)..(1276)
agcggcagcagcagacacctccgccaccctcgaatccttccccaccatggcgtcgcaggtggcctccgtcttcgcaggcatcgcgcaggccccggaggaccccatcctcggggtgacggttgcgttcaacaaggatcccagccccgtgaagatcaacctcggcgtcggcgcctaccggaccgaggaagggaagcccctcgtgctgaatgtggtcaggcgcgccgagcagatgctgatcaatgacccgtctcgtgtgaaggagtacctaccaatcactggtttggctgaatataataagctgagcgctaagcttatcttcggtgctgacagccctgctattcaggagaatagggttgctacagtgcagtgcctatcaggaactggttctttaagagtgggaggtgaatttcttgcaaagcactaccatgagcgcactatctacatcccagtaccaacctggggaaaccacccaaaagtcttcaccctagctggattgactgtcaggagctaccgctactatgatcctgcaactcgtggtcttgacttcaacgggctcttagaagacctcagttctgctcctttaggatcaattgtactgctgcatgcttgcgcccataaccctaccggggtagatcctaccattgatcagtgggaacagattaggcagctgatgagatcaaaatcattgcttccgttctttgacagtgcttatcaaggctttgcgagtggaagtcttgacaaagatgcccagccagtgcgcatgtttattgctgatggtggtgaattgctcatggctcagagctacgctaagaacatgggaatgtatggagagcgtgttggtgctttgagcattgtatgtggaagtgctgatgtagctgctagggttgaaagtcaactcaagcttgtgattaggcctatgtattcaagccctcctcttcatggtccctctgtcgtggcaaccatactcaaggacagtgagatgttccacgaatggactgtggaactgaaggccatggctgataggataattagcatgaggcaacagctatttgatgcgctaaaatccagaggaactcctggagattggagccacatcattaagcaaattggtatgtttactttcactgggctcaatagcgagcaagtggccttcatgaggcaagaataccacatttacatgacatccgacgggaggatcagtatggctggtttgaacatgaagaatgtgccccatcttgcagatgccatacacgctgcagttactcaactgaagtgagtggcagcatctcgtcttcctccatggataaaatccaaatcacctacagcagtgtcctgaggactcagctagtggtatttactggcagaactcctgtaatttgccttttaatagacatgtttgactctgtcgtcggagcagttttctactgacggattcaaacatcatggtgctttcagacaccaaatataaaaaaaacgcacatgcatatgttttttgcaaaaaaaaaaaaaaaaaa

SEQ ID NO: 66596 - protein, 409 aa, Panicum miliaceum
MASQVASVFAGIAQAPEDPILGVTVAFNKDPSPVKINLGVGAYRTEEGKPLVLNVVRRAEQMLINDPSRVKEYLPITGLAEYNKLSAKLIFGADSPAIQENRVATVQCLSGTGSLRVGGEFLAKHYHERTIYIPVPTWGNHPKVFTLAGLTVRSYRYYDPATRGLDFNGLLEDLSSAPLGSIVLLHACAHNPTGVDPTIDQWEQIRQLMRSKSLLPFFDSAYQGFASGSLDKDAQPVRMFIADGGELLMAQSYAKNMGMYGERVGALSIVCGSADVAARVESQLKLVIRPMYSSPPLHGPSVVATILKDSEMFHEWTVELKAMADRIISMRQQLFDALKSRGTPGDWSHIIKQIGMFTFTGLNSEQVAFMRQEYHIYMTSDGRISMAGLNMKNVPHLADAIHAAVTQLK

SEQ ID NO: 66597 - DNA, 1681 bp, Panicum miliaceum
  CDS (64)..(1437)
cttcagtacagtagtagtagcaggcccacgcctccgatccgctgctccctcgccgtccggaagatggcttccgccgccttcgccctcacctcgccggcggcccccgccatcgccgcccggtccaaggtgcttggatgggggaagaatcaggggagaaatggctgccgcgtggggatcacgaggaagaactttggccgtgttttgatggcccttgcagtggatgtttctcgttttgagggagtgccaatggctcctccagacccaattcttggggtttcagaggcctttaaagcagataaaaatgacctgaagctcaatcttggtgttggtgcctatagaacagaagagttgcagccttatgtcctcaatgtagtcaagaaggctgaaaatcttatgttggagaaaggagaaaacaaagagtatcttcctattgaaggcttagctgcatttaacaaagcaactgcagagctactgcttggagctgacaaccctgtcatcaagcaaggactggttgctacacttcaatctctctcaggcactggatcgctacgacttgccgcagcgtttatacaaagatacttccctgaagccaaagtactcatatcatcgcccacgtgggggaaccacaagaacatcttcaatgatgctagggtaccttggtcagagtaccggtactatgaccccaaaactgttgggttagattttgagggaatgatagctgacattgaggctgctcctgaaggatcttttgttctgctacatggttgcgctcacaacccaactggaatagacccaactcctgaacaatgggagaaaattgcagatgttattcaagagaaaaagcatatgcctttcttcgatgttgcgtatcagggttttgccagtggaagccttgatgaagatgcattttcagttaggctttttgttaagcgtggcatggaagtgtttgttgcacaatcttacagcaagaaccttggtctatatgcagaaaggattggggcaataaatgttgtttgctcagcaccagaagttgcagatagggtaaagagccagctgaaacgtctggcacgtcccatgtactcgaacccccctattcacggtgctaggatagttgccaatattgttggtgatccaactatgtttggtgaatggaagcaggagatggaacaaatggcagggcggatcaagaatgtaaggcagaagctctacgatagtttgtctgcaaaggacaagagtggcaaggactggtctttcattctgagacagattggcatgttctcctacactggcttgaacaaagcacagagtgataacatgacagataaatggcatgtttatatgaccaaggatgggcggatttcgttagctggactttccctggctaagtgcgattatcttgccgacgccatcatcgattccttccacaatgtcagctagatagaggcctgaggattcaggtgaagctattccggttgagtccttggacgcttggctgggatttttgggtccttccagctatagtttttgggtgtattacatccagtgtaatttggagaaataatttttttgtcatcacagcaaaactcaagtgcctggctgcatgtaacagtagtacgctatttacaggatcgtaaaacttaattgaataatggcactggcaatgttaattgcgccctgcgcc

SEQ ID NO: 66598 - protein, 457 aa, Panicum miliaceum
MASAAFALTSPAAPAIAARSKVLGWGKNQGRNGCRVGITRKNFGRVLMALAVDVSRFEGVPMAPPDPILGVSEAFKADKNDLKLNLGVGAYRTEELQPYVLNVVKKAENLMLEKGENKEYLPIEGLAAFNKATAELLLGADNPVIKQGLVATLQSLSGTGSLRLAAAFIQRYFPEAKVLISSPTWGNHKNIFNDARVPWSEYRYYDPKTVGLDFEGMIADIEAAPEGSFVLLHGCAHNPTGIDPTPEQWEKIADVIQEKKHMPFFDVAYQGFASGSLDEDAFSVRLFVKRGMEVFVAQSYSKNLGLYAERIGAINVVCSAPEVADRVKSQLKRLARPMYSNPPIHGARIVANIVGDPTMFGEWKQEMEQMAGRIKNVRQKLYDSLSAKDKSGKDWSFILRQIGMFSYTGLNKAQSDNMTDKWHVYMTKDGRISLAGLSLAKCDYLADAIIDSFHNVS

SEQ ID NO: 66599 - DNA, 1755 bp, Glycine max
  CDS (73)..(1464)
gtttccttcatcttcttcttcttcttctatctctctacaacacacttttttaagtgattcgttcgcagaaacatggcttcttcgtttctatccgcagcttcgcacgctgtctcaccctcttgttctctgtccaccacgcacaagggaaagcccatgcttggaggcaacactttgagatttcacaaaggacccaattccttctctagttcaaggtctagaggtcggatctctatggctgttgcagttaatgtatctcggtttgaaggcatacctatggctcctcctgatccaattctcggagtttccgaggcgtttaaggcagacaatagtgatgtcaagctcaatcttggagttggggcatacagaacagaagaactacagccatatgtgcttaatgttgttaagaaggcagagaatcttatgctggagagaggggataacaaagagtatctcccaattgagggtttggcagcatttaataaggcaactgcagagttgttactcggagcagacaacccagcaatcaaacagcaaagagttgccactgtccaaggtctttctggaactggttctctgcgactaggtgcagctctgatagagcgatattttcctggggcaaaagttttgatatcagctcctacctggggtaatcacaagaatattttcaatgatgctagtgtcccatggtctgagtaccgatattatgatcccaagacagttgggttggattttgagggcatgattgaagatataaagtcagctccggaaggatcttttatcttacttcatggatgtgctcataatcctactggtattgatccaacacctgaacagtgggaaaaaatagctgatttaattgaagaaaagaaccacattcccttttttgatgttgcttaccaggggtttgctagtggaagccttgatgaagatgcagcttctgtgagactgtttgtggcacgtggcatcgaggttcttgtagctcaatcttacagtaaaaatctcggtctctatgctgaaaggattggagcaatcaatgtgatttcatcgtcaccagaatctgcagcaagggaaacgagccaactgaaaaggattgcccgaccaatgtactctaatccaccggtacacggggctaggatagttgccgatgttgttggaaacccagttctctttaatgaatggaaagcagagatggaaatgatggctggaaggataaagaatgttagacagcagctatatgatagtattacttcaaaagacaaaagtggaaaggattggtcattcatacttaagcagataggcatgttctcattcactggcttgaacaagaaccagagtgacaacatgacaaacaagtggcacgtatacatgacaaaggatggaaggatttccctggcaggattgtcgttggctaaatgcgaataccttgcggatgctattattgattcatatcataatgtcagctgaaactcaattagatatttttggtgagtgttatacccaatcggagcgattggcatacatgaaaataatttagaataatttatgtatgcattatgtgtgtacatatgtaccctcaaagtaccctaggaaattttttttaactttgaaacaagttgactcaaagtattgatgcgtaatgagtcaggttctcagacttaaagctagttgaatcgaagtactgatgcatagtgaggatgtttatcatttcatatgggtgagattggataaatcatggtaacaatagtttcgttaaaa

SEQ ID NO: 66600 - protein, 463 aa, Glycine max
MASSFLSAASHAVSPSCSLSTTHKGKPMLGGNTLRFHKGPNSFSSSRSRGRISMAVAVNVSRFEGIPMAPPDPILGVSEAFKADNSDVKLNLGVGAYRTEELQPYVLNVVKKAENLMLERGDNKEYLPIEGLAAFNKATAELLLGADNPAIKQQRVATVQGLSGTGSLRLGAALIERYFPGAKVLISAPTWGNHKNIFNDASVPWSEYRYYDPKTVGLDFEGMIEDIKSAPEGSFILLHGCAHNPTGIDPTPEQWEKIADLIEEKNHIPFFDVAYQGFASGSLDEDAASVRLFVARGIEVLVAQSYSKNLGLYAERIGAINVISSSPESAARETSQLKRIARPMYSNPPVHGARIVADVVGNPVLFNEWKAEMEMMAGRIKNVRQQLYDSITSKDKSGKDWSFILKQIGMFSFTGLNKNQSDNMTNKWHVYMTKDGRISLAGLSLAKCEYLADAIIDSYHNVS

SEQ ID NO: 66601 - DNA, 1717 bp, Glycine max
  CDS (54)..(1337)
ctctccctctctgttcgcactctgtctttcccctgtttccgcgtcactgagtcatggcgattcgcaactcgctcaccggccaattcctccgccgcagctccgtcgccggagcaaggctcatgtcttcttcgtcctcatggttccggagcatcgagcccgctcccaaggatcctatcctcggagtcactgaagctttcctcgccgatcagagtccaaacaaagtcaacgtcggagtgggtgcgtatcgcgatgaccaacggaaacctgtggttttggaatgtgttagagaagcagagaggagggttgccggaagtcaattcatggagtatcttcccatgggtggaagcataaaaatgatagaagaatcgctgaagctggcatttggagacaactctgagttcatcaaggataaaagaatagctgcagtgcaggctttatctgggactggtgcatgtcgactttttgctgcatttcaacagagatttcatcctaatacccaaatctatataccagtgcctacctgggccaaccaccataacatttggagagatgctggagtgcctatgaagacattccgttactatcaccctgagtctagaggattggatttttcaggactgatggatgacataaagaatgctccagatggttccttctttctgcttgtgcttactgctcataatcctactggagtagatccttcagaagaacaatggagagagatctcttcccagataaaggctaagggtcatttccctttctttgacatggcatatcaaggttttgctagtggtgatccagagagagatgcaaaagccataaagatttttcttgaggatggtcatttaataggacttgctcagtcatatgcaaaaaatatgggactgtatggccagcgagcaggaagcctgagtgtgctttgtgaagatgagaaacaagctgtggctgtaaaaagtcagttgcagctgattgctagacccatgtacagtaacccacctctccatggagcacttatagtttctactgtccttggtgatccagatttgaagaagttatggcttaaagaagtcaaggttatggcagaccgcatcatcggaatgaggactacactacgagaaaacttagaaaagaaggggtctactttgccatggcagcatataactaatcagattggtatgttctgctacagtggattgacacctgaacaggttgatcgtatgacaaacgagtttcatatttacatgacccgtaacggtcgtatcagtatggctggtcttaatacgggcaacgttggatatgtcttggacgctatccatgaggttacaaaatcattctagattattcaatcacccaacaggtgaccaaatttttgtctttggagacaaacatctcagaagtagtacccttatccaggggagcaaaataaatttaataaagtctgacaaattttcaacttgtttcggggtaagatagtgatactcttcagggtttaccttgcatattgaagacccttattgcaatacgtatccgatttatcatatccatgcaccatagattatatccatttttacagacatcttgtttagcactttaatgagcataaccctgtatcatcattttttttataaaataatttgagtagtagattgaataagggctttatttatggtgaacaggaagtacgtagcttcattccttactacactattattctgtt

SEQ ID NO: 66602 - protein, 427 aa, Glycine max
MAIRNSLTGQFLRRSSVAGARLMSSSSSWFRSIEPAPKDPILGVTEAFLADQSPNKVNVGVGAYRDDQRKPVVLECVREAERRVAGSQFMEYLPMGGSIKMIEESLKLAFGDNSEFIKDKRIAAVQALSGTGACRLFAAFQQRFHPNTQIYIPVPTWANHHNIWRDAGVPMKTFRYYHPESRGLDFSGLMDDIKNAPDGSFFLLVLTAHNPTGVDPSEEQWREISSQIKAKGHFPFFDMAYQGFASGDPERDAKAIKIFLEDGHLIGLAQSYAKNMGLYGQRAGSLSVLCEDEKQAVAVKSQLQLIARPMYSNPPLHGALIVSTVLGDPDLKKLWLKEVKVMADRIIGMRTTLRENLEKKGSTLPWQHITNQIGMFCYSGLTPEQVDRMTNEFHIYMTRNGRISMAGLNTGNVGYVLDAIHEVTKSF

SEQ ID NO: 66603 - DNA, 1677 bp, Panicum miliaceum
  CDS (84)..(1370)
cagagaccaagcccaaaaagcccacagctttcctccccctccccctccccggcgccgcccagctcctccacctccgtcccggcatggcggcgctgtcccgcgcggcctcctgcttgacccggcggccgcagatgcagccgtcgaggctgcaggcggcgagggcgatggcgtcgtcgctgttcggccacgtcgagccggcgcccaaggaccccatcctcggcgtcaccgaggcctacctcgccgacccctcgcccgacaaggtcaacgtcggcgtcggcgcctaccgggacgacaacggcaaacccctcgtgctcgactgcgtgcgcgaggccgagcgccggattgccggcaacctcaacatggagtacctcccaatgggaggcagtgtaaagatgatcgaagaatcgctgaagctggcatacggagaggattccgaactcatcaaagacaagaggatcgcggcagtgcaggcgctttcgggcactggtgcctgtcggctctttgctgatttccaaaagcgattcttgcccgattcgcaaatctatatacctacacccacgtggtccaaccatcacaatatttggagggatgctcaagtgccacagaaggcatacacatactaccatccagagtcaagagggcttgattttgcaggattaatgaatgacatcaagaatgctccagatggttcgttctttatgctccatgcatgtgctcataatcctactggagtagatcctacagaggaacaatggagagaaatatcccatcagttcaaggtgaaaaaacattttccattctttgacatggcataccaagggtttgccagcggtgatccagagagagatgctaaggcaatccgaattttccttgaagatggacaccaaattggatgtgctcagtcatacgcaaagaacatgggactttatggacagagagtaggatgcctgagtattttgtgtgaggatgagatgcaagcagttgctgtcaagagccaactgcaacagattgcaagaccaatgtacagcaacccacctgttcatggtgcacttgttgtttctataatcctcaatgatccagaattgaagagtttatggttaaaagaggtcaagggtatggctgatcgtatcattggaatgcggacggcacttaaggaaaatcttgaaaagctaggttcatctttgtcatgggagcacatcactaatcagattggaatgttctgctacagtgggatgacacctgaacaagttgaccggttgacaaatgaattccatatttacatgacccgcaacgggaggataagcatggctggtgtaacgacacgaaatgttggttacttggcaaatgctattcacgaggttaccaaatagaattgagttcggccctcctaccctcgtcggccgatgaaatgaggctttcaagtggcttttttggtgcctgacatatcaacattatcattctcgagaaataagttaagcctgttggggctgtccaaagcatgcccggcgcttcagccacttcagttgcggattagtgaaaatgcatattctgtcaaccagatgctgtgaggattgacaacgataagccatgacatatcctaacaggcttgttctactcgattttgttgcaacttctcagtgagaatttttaccaaagctgctgctaaaaaaaaaaaaa

SEQ ID NO: 66604 - protein, 428 aa, Panicum miliaceum
MAALSRAASCLTRRPQMQPSRLQAARAMASSLFGHVEPAPKDPILGVTEAYLADPSPDKVNVGVGAYRDDNGKPLVLDCVREAERRIAGNLNMEYLPMGGSVKMIEESLKLAYGEDSELIKDKRIAAVQALSGTGACRLFADFQKRFLPDSQIYIPTPTWSNHHNIWRDAQVPQKAYTYYHPESRGLDFAGLMNDIKNAPDGSFFMLHACAHNPTGVDPTEEQWREISHQFKVKKHFPFFDMAYQGFASGDPERDAKAIRIFLEDGHQIGCAQSYAKNMGLYGQRVGCLSILCEDEMQAVAVKSQLQQIARPMYSNPPVHGALVVSIILNDPELKSLWLKEVKGMADRIIGMRTALKENLEKLGSSLSWEHITNQIGMFCYSGMTPEQVDRLTNEFHIYMTRNGRISMAGVTTRNVGYLANAIHEVTK

SEQ ID NO: 66605 - DNA, 1659 bp, Panicum miliaceum
  CDS (84)..(1370)
cagagaccaagccccaaaagcccacagctttccttcccctccccctccccggcgccgcccagctcctccacctccgccccggcatggcggcgctgtcccgcgcggcctcctgcttgacccggcggccgcagatgcagccgtcgaggctccaggcggcgagggcgatggcgtcgtcgctgttcggccacgtcgagccggcgcccaaggaccctatcctcggcgtcaccgaggccttcctcgccgacccctcgcccgacaaggtcaacgtcggcgtcggcgcctaccgggacgacaacggcaagcccctcgtgctcgactgcgtgcgcgaggccgagcgccggattgccggcaacctcaacatggagtacctcccaatgggaggcagtataaagacgatcgaagaatcgctgaagctggcgtatggagaggattccgaacacatcaaagacaagaggatcgcagcagtgcaggcgctttcgggcactggtgcctgtcggctctttgctgatttccaaaagcgattcttgcccgattcgcaaatctacatacctacaccaacgtggtccaaccatcacaatatttggagggatgctcaagtgccacagaagacattcacatactaccatccggagacgagagggcttgattttgcaggattaatgaatgacatcaagaatgctccagatggttcattctttttgctccatgcatgtgctcataatcctactggagtagatcctacagaggaacaatggagagaaatatcccatcagttcaaggtgaaaaaacattttccattctttgacatggcataccaagggtttgccagcggtgatccagagagagatgctaaggcaatccgaattttccttgaagatgggcaccaaattggatgtgctcagtcgtacgcaaagaacatgggactttatggacaaagagtaggatgcctgagtattttgtgtgaggatgagatgcaagcagtttctgtcaagagccaactgcaacagattgcaagaccaatgtacagcaacccacctgttcatggtgcacttgttgtttctataatcctcagtgatccagaattaaagagtttatggttaaaagaggtcaagggtatggctgatcgtatcattggaatgcggacggcacttaaggaaaatcttgaaaagctaggttcatctttgtcatgggagcacatcactaatcagattggaatgttctgctacagtgggatgacacctgaacaagttgaccggttgaccaatgaattccatatttacatgacccgcaacgggaggataagcatggctggtgtaacgacaggaaatgttgcttacttggcaaatgctattcacgaggttaccaaataattgactttggctctcctaccctcgttggccgatgaaatgaggctttcaagtgacactttggtgcctgacgtatcaacattatcattctcgagaaataagttaagcctgttggggctgtccaagggcgaatttcacatacatgtacgagaactatagatgtgaaacttcagtcttgatagctacatgatcctgtttattttctttttctttcttttttccccatcttgtcatggcaatttttacacttagctgcaaatggttgtagcatgatctacagttctgaagaaaa

SEQ ID NO: 66606 - protein, 428 aa, Panicum miliaceum
MAALSRAASCLTRRPQMQPSRLQAARAMASSLFGHVEPAPKDPILGVTEAFLADPSPDKVNVGVGAYRDDNGKPLVLDCVREAERRIAGNLNMEYLPMGGSIKTIEESLKLAYGEDSEHIKDKRIAAVQALSGTGACRLFADFQKRFLPDSQIYIPTPTWSNHHNIWRDAQVPQKTFTYYHPETRGLDFAGLMNDIKNAPDGSFFLLHACAHNPTGVDPTEEQWREISHQFKVKKHFPFFDMAYQGFASGDPERDAKAIRIFLEDGHQIGCAQSYAKNMGLYGQRVGCLSILCEDEMQAVSVKSQLQQIARPMYSNPPVHGALVVSIILSDPELKSLWLKEVKGMADRIIGMRTALKENLEKLGSSLSWEHITNQIGMFCYSGMTPEQVDRLTNEFHIYMTRNGRISMAGVTTGNVAYLANAIHEVTK

SEQ ID NO: 66607 - DNA, 1753 bp, Lotus japonicus
  CDS (86)..(1342)
ggcacgagctttttcttcttcttcttcttccccaagcgatcgcagactcaacgttctcgcaggccacctcgttcacaacgatcaaatggattctcagaacatctctccttctccaaccgcctcttctggttccgtcttcgctcatctcgttcgtgctcccgaagatcctattctcggggtgactgtcgctttcaacaaagatcctagccctgttaagctcaacttgggtgttggtgcttaccgaactgaggaaggaaaacctcttgttttgaatgtggtcaggaaagctcaacaccaaatcgtgaatgatccgtcacgcaacaaggagtatcttccaattgtggggctcgctgattttaataaattgagtgccaagcttatttttggtgctgacagccctgctattcaagagaacaggattaccactgttcagtgcttgtctggtactggttcattaagagttgggggtgaatttttggctaaacactatcaccaacggattatatacttgccaaaaccaacttggggcaatcacacaaaggttttcaccttggcagggttatctgtcaaaacatatcgctactatgctccagcaacacgaggccttgactttcaaggacttctagaagatcttggttctgccccatctggatccattgttttgctacatgcatgcgctcataaccctactggtgttgatccaacccctgagcaatgggagcagattaggcagctgataagatcaaaggctttattacctttctttgacagtgcttatcagggttttgctagtggaaatctagatgcagatgcacattctgttcgttcatttgttgctgatgggggtgaattgctggcagcccagagttatgcaaagaacatgggtctttatggagaacgtgttggtgccttaagcattgtctccaagtcagctgatgttgcaagtttggttgagagtcagctgaagcttgtcatcaggcccatgtactcaaatcctccccttcatggtgcatccattgtagctacgattcttaaggaccgggatttgtacaatgagtggactattgagttgaagggaatggctgatcgtattatcagtatgcgccaacaactttttgatgctttacgttccagaggcacgcctggtgactggagtcacattatcaagagtatcggtatgttcactttcacaggattgaatcctgagcaggtttccttcatgactaaagagtaccatatatacctgacatccgatgggcggattagcatggctggtttgagttccaaaaccgtcccacatctggcggatgctatacatgcggctgtaacccgagcttcctgaacatgtttggaaagatatctcaaccatagatgaaaaaatcaactgttagatattaacaaatcatggatttgttgaaatatactcttgattttctcatcaaccattgagatacctttactttctccctttaaagctttagaggagccaaattctatgagcggcgcgattttcaactcacctagtaggacttccattttcaatgtaataatatcacatcaaacaatgaaaacttttttttgatgtgagaattagagacaacttttctgcccagggtgcctcggtctccgatcttggcattctaacattttcgccaagttttcctagtgtaagcatgatcaagtgcccccaagaaggaggctttctattttctaaataatttctgaaggataaaaaaaaaaaaaaaaaaaaaaa

SEQ ID NO: 66608 - protein, 418 aa, Lotus japonicus
MDSQNISPSPTASSGSVFAHLVRAPEDPILGVTVAFNKDPSPVKLNLGVGAYRTEEGKPLVLNVVRKAQHQIVNDPSRNKEYLPIVGLADFNKLSAKLIFGADSPAIQENRITTVQCLSGTGSLRVGGEFLAKHYHQRIIYLPKPTWGNHTKVFTLAGLSVKTYRYYAPATRGLDFQGLLEDLGSAPSGSIVLLHACAHNPTGVDPTPEQWEQIRQLIRSKALLPFFDSAYQGFASGNLDADAHSVRSFVADGGELLAAQSYAKNMGLYGERVGALSIVSKSADVASLVESQLKLVIRPMYSNPPLHGASIVATILKDRDLYNEWTIELKGMADRIISMRQQLFDALRSRGTPGDWSHIIKSIGMFTFTGLNPEQVSFMTKEYHIYLTSDGRISMAGLSSKTVPHLADAIHAAVTRAS

SEQ ID NO: 66609 - DNA, 1206 bp, Crassostrea gigas
  CDS (1)..(1206)
atggagattgccacaccgatcgaggtatttaatttgacagctcagtacaacgaggacaaccatccacaaaaagttaacctcggagtcggagcctatagaacagatgaggggaaaccatgggtgttgccagtcgtgcgtacagtggaagcacagatggcgactgatgtcacactgaatcacgaatacctaccagtggccggcatgccagactttagactggctgctctcagactcttgttgggagaagattctcctgccattgtggaaaacagggtggagggtgttcaggccattggggggacaggggcaatcagactgtgtgcagacttctgtaagaagatgttgggatacgacagcatgtacacatcaagcccaacatggggcaaccacttgggtatcttcaagagttatggatattctaatgtcaaacaatacagatactgggatgcacagaatcgcaccattgacttcaatggaatgatggaagacttaaatgcagcaccagaaaagactgtagtcattttacatggatgttgtcacaacccaactggagtgaacccaacagaagaacagttaaaagaaattggagacttagtagagaggaagaagtccatgttgttggtagatgaggcctatcagggcttcgcttctggtaacttggagcaggatggaaacactgttcgatatttcgtcaaaaggggatttgaattttttgtctcacagtcgttttctaaaaactttggtttatacataaatgaaagaacagggaacttagccataatctgtgccaataaggatgccaagctgcgagtaaaatcccagatggagatggttgtcaggacgacctggtccaattctccgaaccacggagccagaattgtagcctcagtactcaacaacccagcatattatgcagaatggaaagagcatgtgaagacgatgtcagatagaattaagatgatgagggagatgttgttccagaaactaaagtcacttggtacccccgggaaatgggatcacatcattgaacagaagggaatgttcagcttcacaggactgaatcctgctcaagtagacattctgatgaagaaataccacatctaccttctgaaaaatggccgtatcaacatgtgtgctctgacaacatccaatatggagtatgtggccaatgctattcacgcagctgtcactgagtgcaagctgtag

SEQ ID NO: 66610 - protein, 401 aa, Crassostrea gigas
MEIATPIEVFNLTAQYNEDNHPQKVNLGVGAYRTDEGKPWVLPVVRTVEAQMATDVTLNHEYLPVAGMPDFRLAALRLLLGEDSPAIVENRVEGVQAIGGTGAIRLCADFCKKMLGYDSMYTSSPTWGNHLGIFKSYGYSNVKQYRYWDAQNRTIDFNGMMEDLNAAPEKTVVILHGCCHNPTGVNPTEEQLKEIGDLVERKKSMLLVDEAYQGFASGNLEQDGNTVRYFVKRGFEFFVSQSFSKNFGLYINERTGNLAIICANKDAKLRVKSQMEMVVRTTWSNSPNHGARIVASVLNNPAYYAEWKEHVKTMSDRIKMMREMLFQKLKSLGTPGKWDHIIEQKGMFSFTGLNPAQVDILMKKYHIYLLKNGRINMCALTTSNMEYVANAIHAAVTECKL

SEQ ID NO: 66611 - DNA, 1251 bp, Cryptococcus neoformans
  CDS (1)..(1251)
atgagttttaccaacttctgggctggtgttcccgagggtcctcccgaccccatcctcggtgtgactgatgcattcaagaaggacacatctccaaaaaaggttaaccttggtgtcggcgcctatcgtgacgaggatggcaagccttacgttctcgactctgtcttgaaggccgaagacatcttgcacaagaagaagctcgataaggagtaccttcctatcaccggtgctgccgactttatcaagcttgcttctgaactcgcctatggcaaagactccaagcctctgcgggagggtagagtcgctgtctctcaatccatctctggtacaggcgccctccggatcgctactggtttcctctccagtttctactctggccccaaggtcatctacttgcccaaccccacttggggtaaccacgttcctttggccgaatctgtcggtatcaaggtcgaaagatataggtattttgacaagaagacagtcggtcttgactttgagggcatgaaggaggacatcaagaacgccgaatccggctctattattctcctccatgcctgtgcccaaaaccctactggtatcgaccctacgcaggagcaatggaaggagttgagcgatttgctcaaagccaagaagcatcttcccttgttcgacatggcttaccaaggtttcgcatctggcgacattatccgtgacgcttttgccgtacgatactttgttgagcagggtcaccagatcatcctctgccaatctttcgccaagaacttgggtctctacgctgagcgtgccggtaccttctccatggtctgcgcttcccccgaggagaaggaacgggtcatgtcccagatcaagcgtgtcgtccgacctctctactcttctccccccatccatggtgctcagctggttgctaccatcctcggtactcctgagctttacgacgagtggcttaccgaggtgaagaagatggctgaccgtatcatcgccatgcgagaaaagctttacaacctcctcattgagctcaaaactcctggagaatggggccacatcaagtctcaaatcgagtgtttaggcatgttctctttcaccggtatctccaaagaacaagtcgacgaccttgccgagtacgctcacgtgtacatgaccaaggacggccgtatctccatggctggtttgaacgaacataacattcagtactttgctgagagcttgtccaaggctgtcaaaggcgaattgaggaccaagtcggcactttag

SEQ ID NO: 66612 - protein, 416 aa, Cryptococcus neoformans
MSFTNFWAGVPEGPPDPILGVTDAFKKDTSPKKVNLGVGAYRDEDGKPYVLDSVLKAEDILHKKKLDKEYLPITGAADFIKLASELAYGKDSKPLREGRVAVSQSISGTGALRIATGFLSSFYSGPKVIYLPNPTWGNHVPLAESVGIKVERYRYFDKKTVGLDFEGMKEDIKNAESGSIILLHACAQNPTGIDPTQEQWKELSDLLKAKKHLPLFDMAYQGFASGDIIRDAFAVRYFVEQGHQIILCQSFAKNLGLYAERAGTFSMVCASPEEKERVMSQIKRVVRPLYSSPPIHGAQLVATILGTPELYDEWLTEVKKMADRIIAMREKLYNLLIELKTPGEWGHIKSQIECLGMFSFTGISKEQVDDLAEYAHVYMTKDGRISMAGLNEHNIQYFAESLSKAVKGELRTKSAL

SEQ ID NO: 66613 - DNA, 1290 bp, Aedes aegypti
  CDS (1)..(1290)
atggcctgctccaaaacgttccagggcacagcagtactgctgagaaactcggccgtcttcaatggctgcatcagtaaaagggccagctcatggtggggcgcggtgcagatgggtcccccggacgtgatcctcggtgtgaccgaagcctacaaaaaggacaccaacccgaagaagatcaatctgggcgtgggtgcctatcgggacgacaatggaaaaccattcgtgcttcccagcgtccgaaaagccgagcaacgcatgatggaaaaacagctggacaaggagtactcgcccattagcggaacggccgaattctgcaagcacagtattacacttgccctgggcgacgacagccaacacgtggccaacggacagaacgccaccgtgcaggccatcagtggaaccggtgccctgcgtgttggaggagccttcctgaatgggttcttcccgggtacgaaggacatttatctgccgactccatcctggggcaaccacggtccgatcttccggcattcggggctgaatgtgaaagcctacagatattacgacccaagcacctgtggattcgacttcaagggagctctggaggatctatcgaaaatcccagagcgatccatcgtccttctgcacgcctgcgctcacaacccaaccggtgttgatccccggccggagcagtgggctgaaatgtccgccgtcttcaagaaacgcaacctgttccccttcttcgacatggcctaccagggctttgccagcggagatgtcgccaaggatgcgcttgccgtccgtgccttcctgaaggatggtcaccagattgcgctggctcagagtttcgccaagaacatgggtctttacggtgaacgagccggagccttttcgttgatctgctccgacaaggaggaagccgctcgcaccatgtctcagatcaagatcctgattcgtccgatgtacagcaacccgccgattcatggcgcccgcttggtttcggaaatcttgggtgatgcaaacctgaaacaggaatggctcggcgatgtcaaactgatggccgatcgaatcatctcggtgcgcaccaaactgcaggacaatctgaaaaagttgggctcttcgcgcaactggcaacacatcaccgaacagatcggcatgttctgcttcaccggaatggatcagaagcagtgcgagcgactgaccaaggagtttagcgtgtacttgaccaaggacggccgcatctcgatggccggagtaacgaccaagaacgttgattacttggccgaggccatccatgccgtcaccaagtga

SEQ ID NO: 66614 - protein, 429 aa, Aedes aegypti
MACSKTFQGTAVLLRNSAVFNGCISKRASSWWGAVQMGPPDVILGVTEAYKKDTNPKKINLGVGAYRDDNGKPFVLPSVRKAEQRMMEKQLDKEYSPISGTAEFCKHSITLALGDDSQHVANGQNATVQAISGTGALRVGGAFLNGFFPGTKDIYLPTPSWGNHGPIFRHSGLNVKAYRYYDPSTCGFDFKGALEDLSKIPERSIVLLHACAHNPTGVDPRPEQWAEMSAVFKKRNLFPFFDMAYQGFASGDVAKDALAVRAFLKDGHQIALAQSFAKNMGLYGERAGAFSLICSDKEEAARTMSQIKILIRPMYSNPPIHGARLVSEILGDANLKQEWLGDVKLMADRIISVRTKLQDNLKKLGSSRNWQHITEQIGMFCFTGMDQKQCERLTKEFSVYLTKDGRISMAGVTTKNVDYLAEAIHAVTK

SEQ ID NO: 66615 - DNA, 1227 bp, Aedes aegypti
  CDS (1)..(1227)
atgagcatattctccggtgtcgaagttggaccccccgtggaggtgttcgcgctgaaccaggcctgcttgaaggatcctaacccgaacaaggtcaacctgggagtcggagcttaccgtacaaacgagggcaaaccatggatcctccctgtcgtgaaaaaagccgaagcggccatcgtggccgacggtagcctcaaccacgagtacctcccggtgctgggaatggaaaacgtgaccaacgctgccaccacccttctactcggtgacgactccgaagccatcaagagcaaacgtgccttcggtgtccagtgcctgtccggaacgggagccctgcgggtcggtgccgagttcctctgtcgcatcctgaagcgcaccacgttctattactcatcgcccacgtgggaaaaccaccacaaggtgttcgtgtatgccggatttgccgaaccgcgcacctatcgctactggcaccaggaccggcgcggaatcgacttcgagggcatgatcgaagacctgaagggtgcccccgagggtgcggtcatcattctgcacgcttgtgcgcacaatcccaccggagtggatcccacacaggaccagtggaagcagatcgccgatgtttgcgaggagaagaagctgttcccgttcttcgattcggcttatcagggattcgccagcggtgatcccaacaaggatgcctttgccgtgcgctactttgtggagcggggatttgagttgctctgtgcgcagagcttcgccaagaactttggattgtacaatgaacgtattggcaacctgaccatcgtacagaaggacgagtccaccaaggcggccgttgcctcacagatcacgctgctgatccgtggaatgtactcgaacccaccggcgttcggtagccgcatcgtgaacttggtgctgaacgatgccaccttgagggccgaatggatggaatgcatccagacgatgagctcgcgaatcatcaccatgcggaaggcactctacgacgaactagtggccctgaagacgcccggaacctgggagcacatcacccagcaaatcggaatgttttcgtatactggactcaatgagaaacaggtggacatcctcatcaaggagttcagcatctacctgctgaagaccggccgaatcagcatgtgcggcttgaccgagaacaacgtcaagtacgtggcgaaggcgatccatgaggcggttacgcgcgcgtcttccaaaatctag

SEQ ID NO: 66616 - protein, 408 aa, Aedes aegypti
MSIFSGVEVGPPVEVFALNQACLKDPNPNKVNLGVGAYRTNEGKPWILPVVKKAEAAIVADGSLNHEYLPVLGMENVTNAATTLLLGDDSEAIKSKRAFGVQCLSGTGALRVGAEFLCRILKRTTFYYSSPTWENHHKVFVYAGFAEPRTYRYWHQDRRGIDFEGMIEDLKGAPEGAVIILHACAHNPTGVDPTQDQWKQIADVCEEKKLFPFFDSAYQGFASGDPNKDAFAVRYFVERGFELLCAQSFAKNFGLYNERIGNLTIVQKDESTKAAVASQITLLIRGMYSNPPAFGSRIVNLVLNDATLRAEWMECIQTMSSRIITMRKALYDELVALKTPGTWEHITQQIGMFSYTGLNEKQVDILIKEFSIYLLKTGRISMCGLTENNVKYVAKAIHEAVTRASSKI

SEQ ID NO: 66617 - DNA, 1670 bp, Oryza sativa
  CDS (103)..(1395)
gcgatgcacacacgcagccgtcggcttggtttcccccccctgaatccaagtcacctcctcctcacacctcaccttccccctctctcctccgatcgcgcgcgcatggcgatgtcacgagccgccgccgctgccgcggggactcccgtggcgcggcggcgattgatgggggccgtggcggcgaggtcgatggcgtcgtggttcggccacgtggaaccggccgccaaggaccccatcctcggcgtcaccgaggcgttcctcgccgacccctccccggacaaagtcaacgtcggcgtcggcgcgtaccgggacgacagcgggaagcccgtggtgctggagtgcgtgcgcgaggcggagcggcggatcgccgggagcatgaacatggagtaccttccaatgggtggaagcataaagatgattgaagaatcacttaaactggcctatggggagaactgtgagttcatcaaggacaagaggatcgcagcagtgcaggctctttcaggaactggtgcatgtcgcctctttgcagatttccagaagcgtttcttgccagattcacagatttatatacccacacctacatgggccaaccatcacaatatttggagggatgcccaagtaccacaaaagacatttacctattaccatccagagtcaagaggacttgactttgcaggcctaatggatgatatcaagaatgctccagatggttcattctttttgcttcatgcttgtgcgcataatcccactggagtagatccttcagaagaacaatggagggagatatctcatcagttcaaggtgaagaaacattttccattcttcgacatggcataccaaggatttgctagtggtgatccagagagagatgccaaggcaattcgaatatttcttgaagatggacatcaaattggatgtgcacagtcatatgcgaaaaacatgggactttatggacaaagagcaggatgccttagtattctatgtgatgatgagatgcaagcagttgctgttaagagccagttacaacagattgctagacctttgtacagcaacccacccgttcatggtgcattaattgtttcaactattcttggtgatccggagttgaaaagtttatggctgaaagaggtcaagggtatggctgatcgtatcattggaatgcgaacagcactcaaagagaaccttgaaaagttgggttcaccaatgtcatgggaacatatcactaatcagattggaatgttctgctacagtggtatgacacctgaacaagtcgatcgcttgacaaaagagttccatatctacatgactcgtaacgggcggataagcatggctggagtaacaacaggaaatgttgcctatctggctaatgctattcatgaggttaccaagacaaagtgagagtgttggagacattcctatcatcattttcagtacctttttaccgaccgcaaaatgggtcaaatggtgaaataaaattgtagtccgatatgatgtgaaataaaatggctggtaagctagaaaagggcaagtttattttttgaggacaagacttttgctgtaccagtgaaaacattttttaggacaagactttacagttagaacgaacgttctaactgtgacagtgtcatgctttgtaaaggaagtgtacctttccaccgatgggcatttttgat

SEQ ID NO: 66618 - protein, 430 aa, Oryza sativa
MAMSRAAAAAAGTPVARRRLMGAVAARSMASWFGHVEPAAKDPILGVTEAFLADPSPDKVNVGVGAYRDDSGKPVVLECVREAERRIAGSMNMEYLPMGGSIKMIEESLKLAYGENCEFIKDKRIAAVQALSGTGACRLFADFQKRFLPDSQIYIPTPTWANHHNIWRDAQVPQKTFTYYHPESRGLDFAGLMDDIKNAPDGSFFLLHACAHNPTGVDPSEEQWREISHQFKVKKHFPFFDMAYQGFASGDPERDAKAIRIFLEDGHQIGCAQSYAKNMGLYGQRAGCLSILCDDEMQAVAVKSQLQQIARPLYSNPPVHGALIVSTILGDPELKSLWLKEVKGMADRIIGMRTALKENLEKLGSPMSWEHITNQIGMFCYSGMTPEQVDRLTKEFHIYMTRNGRISMAGVTTGNVAYLANAIHEVTKTK

SEQ ID NO: 66619 - DNA, 1194 bp, Neisseria subflava
  CDS (1)..(1194): transl_table=11
atgtaccaacacgtcgaatactatcccggcgacccgattttgagcctagtcgaaaccttcaaaaacgaccagcgccccgaaaaagtcaatttgagcataggcatttatttcgacgacgaaggcaaaatgcccgtattggaatccgtgagccgcgccgaaaccgcccgcgccgccacgcctgcgccgtcgccctatctgccgatggaaggtttgaacacttaccgcagcgcggtgcagcatttattgttcggcaaagacaaccctgcgcttgcgcaaggacgcatcgttaccgtacaaaccttgggcggttcgggcgcgctcaaagtcggggcggatttcctgcaccgctggttccccgaagcgcgcgcctacgtcagcgacccaacttgggacaaccaccgcggcatttttgaaggcgcaggtttcgaggtcggcacttatccttattacgaccccgccaccgtcggcgtgaaattcgacgaaatgaccgcgtttttcaatactctgcccgaacacagcgccttaatcctacacccctgctgccacaacccgaccggcgtggatatgtcggaacagcaatgggacgaagtgttgcaaatcatcaaaacgcgcaagcttattccgtttatggacattgcctaccaaggcttcggcggcgatttggacagcgatgcctacgccatccgcaaagcggtggaaatggatttgcctctgttcgtcagcaattcattctcaaaaaacctgtcgctctacggcgagcgcgtcggcggtttgagcgtggtttgcccgaataaagaagaagcagaattggtgttcggacaactcaaattcaccgtccgccgcatctactccagcccgcccgcacacggcgcctacatcgccgccgatgtgatgaacaaccccgaactttacgccttgtggcaaaatgaagtctatgtcatgcgcgaccgcatccgcgccatgcggcagaaactttacgacgtcttgaccgcgcaaatccctgaccgcgatttcacttatttcatcaaacagcgcggcatgttcagttacacaggattgagcgtggaacaagtccgcaggctgcgcgacgaatttgccgtttacctgctggattccggcaggatgtgcgtcgccgggctgaatgcttcgaatatcgcctatgttgccgatgcgtttgccgaagtgctgaaataa

SEQ ID NO: 66620 - protein, 397 aa, Neisseria subflava
MYQHVEYYPGDPILSLVETFKNDQRPEKVNLSIGIYFDDEGKMPVLESVSRAETARAATPAPSPYLPMEGLNTYRSAVQHLLFGKDNPALAQGRIVTVQTLGGSGALKVGADFLHRWFPEARAYVSDPTWDNHRGIFEGAGFEVGTYPYYDPATVGVKFDEMTAFFNTLPEHSALILHPCCHNPTGVDMSEQQWDEVLQIIKTRKLIPFMDIAYQGFGGDLDSDAYAIRKAVEMDLPLFVSNSFSKNLSLYGERVGGLSVVCPNKEEAELVFGQLKFTVRRIYSSPPAHGAYIAADVMNNPELYALWQNEVYVMRDRIRAMRQKLYDVLTAQIPDRDFTYFIKQRGMFSYTGLSVEQVRRLRDEFAVYLLDSGRMCVAGLNASNIAYVADAFAEVLK

SEQ ID NO: 66621 - DNA, 1690 bp, Glycine max; identical to SEQ ID NO: 66577
  CDS (263)..(1522)

SEQ ID NO: 66622 - protein, 419 aa, Glycine max
MASHDSISASPTSASDSVFNHLVRAPEDPILGVTVAYNKDPSPVKLNLGVGAYRTEEGKPLVLNVVRRVEQQLINDVSRNKEYIPIVGLADFNKLSAKLIFGADSPAIQDNRVTTVQCLSGTGSLRVGGEFLAKHYHQRTIYLPTPTWGNHPKVFNLAGLSVKTYRYYAPATRGLDFQGLLEDLGSAPSGSIVLLHACAHNPTGVDPTLEQWEQIRQLIRSKALLPFFDSAYQGFASGSLDADAQPVRLFVADGGELLVAQSYAKNLGLYGERVGALSIVCKSADVASRVESQLKLVIRPMYSSPPIHGASIVAAILKDRNLFNDWTIELKAMADRIISMRQELFDALCSRGTPGDWSHIIKQIGMFTFTGLNAEQVSFMTKEFHIYMTSDGRISMAGLSSKTVPLLADAIHAAVTRVV

SEQ ID NO: 66623 - DNA, 1251 bp, Drosophila melanogaster
  CDS (1)..(1251)
atgtccatctacgccgacgttccaaaaggacccgccatcgaggtcttcgccctgacgcaggccttcaaggacgacagcaatcccaacaaggtcaatttgtcggtgggcgcttacaggacagatgctggagttccttgggttttgcctgtggtgcgcaagacggaaatcagcattgccagcgatgagcaggttaaccacgagtatttgccagtgactggactcgaaacattcaccaatgcggccactgaattggttctgggtgccgattccccagccatcaaggagaatcgcgcctttggagtgcagaccatttcgggcacgggtgccctgcgcgttgccgccgatttcctgcacacacaactgaatcgcaatgtggtttactactcgaaccccacctgggagaatcaccacaagatcttttgcgatgccggctttacgaccgttaaatcgtaccgctactgggaccaaaataaacgcgagttggacttcaagaacatgctggccgatctgaacgatgctccgcccggtgctgtgatcattctgcacgcctgtgcccacaatcccaccggcattgatcccacccaggagcagtggactgagctggccgatctgatggagaagaagaagttgttcccgctgttcgactcggcttaccagggctttgccagtggtgatcccgatcgcgatgcctgggccgctaggtacttcgtgcagcgtggcttcgagctcttcatctgccagtcgttcgccaagaactttggcctctactgcgaacgtaccggcaatctgactgtggtgcaaaagaatggtgctaccaaggcagcggttcactctcagctgacgctgctcattcgtggacagtactcgaatccgcccgcgtatggagctcgcatcgtttccaaagtcctaaacacaccggagttgcgcaaggagtggatggcctccatccaggcaatgtcgagccgcatccgcgagatgcgtacagctttgcgggacaagctggttgccttgggcacccccggcacctgggatcacattgtcaaccagatcggcatgttctcctacaccggtctgaacgagagccatgttcgtgtgctgatcgaccagtaccacatttacctgctgaagacgggacgcatcagcatgagtggcctgaataagggcaacgttgaatatgtggccaaggcgatccatgccgctgtcaccggatcaggagaaagtgcatcatgtccttgcgaaaacaaattgtaa

SEQ ID NO: 66624 - protein, 416 aa, Drosophila melanogaster
MSIYADVPKGPAIEVFALTQAFKDDSNPNKVNLSVGAYRTDAGVPWVLPVVRKTEISIASDEQVNHEYLPVTGLETFTNAATELVLGADSPAIKENRAFGVQTISGTGALRVAADFLHTQLNRNVVYYSNPTWENHHKIFCDAGFTTVKSYRYWDQNKRELDFKNMLADLNDAPPGAVIILHACAHNPTGIDPTQEQWTELADLMEKKKLFPLFDSAYQGFASGDPDRDAWAARYFVQRGFELFICQSFAKNFGLYCERTGNLTVVQKNGATKAAVHSQLTLLIRGQYSNPPAYGARIVSKVLNTPELRKEWMASIQAMSSRIREMRTALRDKLVALGTPGTWDHIVNQIGMFSYTGLNESHVRVLIDQYHIYLLKTGRISMSGLNKGNVEYVAKAIHAAVTGSGESASCPCENKL

SEQ ID NO: 66625 - DNA, 1797 bp, Phaseolus vulgaris
  CDS (176)..(1561)
gcacgaggaactgtcttctctttcttcacttcttctcatcgcccattgtttccttcttcaattctatctctctaagcttcttcaagtgtttcacaaaaacgaatctacttcatcgcatcatcgtcttttctacgcaactcaacttctacaacactcagatccgcacttcacagtgatggcttcttctgttctctccgcagctttgaactctctctctccctcttattctctctcctcgcgccaaacccacaaggggaagcccaagattggaggcaacgctttgagatttaacaagtccttcccaaatgcaaggtctagtggtcgggttatggctgttgcagttaatgggtctcggtttgagggcatacctatggctcctcctgatccaattcttggagtttctgaggcatttaaagcggacacaagtgatgtcaagctcaatcttggagtgggggcataccgaacagaagaactacagccgtatgtgcttaatgttgttaagaaggctgagaatcttatgctggagaggggggataacaaagagtatctctctattgagggtttagctgcgtttaacaaggcaactgcagagttgttacttggagcagacaacccagcaatcaaacagcaaagagttgccactgtccaaggtctttctggaactggttctctgcggctagctgcagctctgatagaaagatattttgctggggctaaagttttgatatcatctcctacctggggtaatcacaagaatattttcaatgatgctagagtgccatggtctgagtacagatattatgatcccaagacagttggcttggattttgagggcatgattgaagatataaagtcagctcctgaaggatcttttgtgcttctacatggatgtgctcataaccctactggtattgatccaacacctgagcaatgggaaaaaatagctgatttaattcaagaaaagaaccacattcccttttttgatgttgcttaccagggctttgctagtggaagccttgatgaagatgcagcttctgtgaggctttttgttgcacgtggtatggaggttcttgtagctcagtcatacagtaaaaatcttggtctctatgctgaaaggattggagcaatcaatgtgatttcatcatccccagaatctgcagcaagggtaaagagccagctgaaaaggctcgcccgaccaatgtactcaaatccacctgtacatggggctagaattgttgccgatgttgttggaaacccagttctctttaatgaatggagagcagaaatggaaatgatggctggaaggatcaagaatgttagacaacagctatacaatagtattacttcaaaagacaacagtggaaaagattggtcatttatacttaagcagataggcatgttctcattcactggcttgaacaaggaacagactgacaacatgacaaataagtggcatgtatacatgacaaaggacggaaggatttccctggcaggattgtcgttggctaaatgcgaataccttgcagatgctattatagactcgtatcataatgtcagctgaaactcggtgaaatatttttggtgagtgttatatccaatcggaaagattgtgagatacatgaaaataatttatgtatgcattaattaattgtcatacatatgtacctcaaagtaccttaggaaattttgtaaccttgttgaaacaaattgactctgtattgacgcataacaagtcggattgtctgacttaaagctagttgaatcagcaccgatttatagtaaaaaaaaaaaaaaaaa

SEQ ID NO: 66626 - protein, 461 aa, Phaseolus vulgaris
MASSVLSAALNSLSPSYSLSSRQTHKGKPKIGGNALRFNKSFPNARSSGRVMAVAVNGSRFEGIPMAPPDPILGVSEAFKADTSDVKLNLGVGAYRTEELQPYVLNVVKKAENLMLERGDNKEYLSIEGLAAFNKATAELLLGADNPAIKQQRVATVQGLSGTGSLRLAAALIERYFAGAKVLISSPTWGNHKNIFNDARVPWSEYRYYDPKTVGLDFEGMIEDIKSAPEGSFVLLHGCAHNPTGIDPTPEQWEKIADLIQEKNHIPFFDVAYQGFASGSLDEDAASVRLFVARGMEVLVAQSYSKNLGLYAERIGAINVISSSPESAARVKSQLKRLARPMYSNPPVHGARIVADVVGNPVLFNEWRAEMEMMAGRIKNVRQQLYNSITSKDNSGKDWSFILKQIGMFSFTGLNKEQTDNMTNKWHVYMTKDGRISLAGLSLAKCEYLADAIIDSYHNVS

SEQ ID NO: 66627 - DNA, 1293 bp, Arabidopsis thaliana
  CDS (1)..(1293)
atggctttggcgatgatgatccgaaacgcagcttcgaagcgaggaatgactccgatctccggtcatttcggtggtttgagatctatgtcttcatggtggaagagcgttgagcctgctcctaaagatccgatcctcggagttaccgaagcttttctcgctgatcctagtcctgaaaaagttaatgttggtgtgggagcatatcgtgatgataatgggaagcctgttgtcttggaatgtgtcagagaagctgagaaaaggcttgctgggagcactttcatggagtaccttcctatgggaggaagtgccaaaatggtggacctaacattgaagcttgcctatggggacaatagtgaatttatcaaagataaaagaattgctgcagttcagactctgtctggcactggagcctgccggctctttgcagacttccagaaacgtttttctcctggttcacagatctacattcctgttccaacctggtccaaccaccacaacatctggaaagatgcacaagtccctcaaaagacatatcattactatcatccagaaaccaagggcttggatttctcagcattgatggatgatgtgaagaatgctccggaagggtcattcttccttcttcatgcttgtgctcataatcctactggagtagaccctacagaggaacaatggagagagatatcacagctattcaaggctaaaaagcatttcgcattcttcgatatggcttaccaaggttttgctagtggagatccagcgagagatgccaagtccatcaggatctttcttgaagatggtcatcatattggaatttctcagtcctatgcaaaaaacatgggactctacggccagagggtgggatgtctcagtgtgctttgtgaagatccgaagcaagccgtggctgtgaaaagtcaattgcagcagctagctagaccaatgtacagcaacccacctttgcatggtgctcagctggtctcaaccattcttgaagacccagagttaaagagtctgtggctaaaagaagttaaggtcatggctgataggatcatcggcatgagaactactttgcgagaaagccttgagaagttaggatcgcctttgtcatgggagcacgttaccaaacagattggaatgttctgctacagtgggttaacaccagaacaggttgaccgcttaacaagcgaatatcacatctatatgacccgtaacggccgtatcagtatggctggtgttacaacaggaaacgtgggataccttgcgaatgctatacatgaagtcaccaagtcatcttaa

SEQ ID NO: 66628 - protein, 430 aa, Arabidopsis thaliana
MALAMMIRNAASKRGMTPISGHFGGLRSMSSWWKSVEPAPKDPILGVTEAFLADPSPEKVNVGVGAYRDDNGKPVVLECVREAEKRLAGSTFMEYLPMGGSAKMVDLTLKLAYGDNSEFIKDKRIAAVQTLSGTGACRLFADFQKRFSPGSQIYIPVPTWSNHHNIWKDAQVPQKTYHYYHPETKGLDFSALMDDVKNAPEGSFFLLHACAHNPTGVDPTEEQWREISQLFKAKKHFAFFDMAYQGFASGDPARDAKSIRIFLEDGHHIGISQSYAKNMGLYGQRVGCLSVLCEDPKQAVAVKSQLQQLARPMYSNPPLHGAQLVSTILEDPELKSLWLKEVKVMADRIIGMRTTLRESLEKLGSPLSWEHVTKQIGMFCYSGLTPEQVDRLTSEYHIYMTRNGRISMAGVTTGNVGYLANAIHEVTKSS

SEQ ID NO: 66629 - DNA, 1218 bp, Arabidopsis thaliana
  CDS (1)..(1218)
atggattccgtcttctctaacgttgctcgtgctcccgaagatcctattctcggtgtaactgttgcttacaacaatgatcctagtcctgttaagatcaatttgggtgtcggtgcctaccgaactgaggaagggaagcctcttgttcttgatgtggtgcgtaaggcagaacaacagctagtgaacgatccgtctcgggtcaaggaatacattcccattgttggtatttccgattttaacaagttaagcgccaagctcatcttaggtgctgacagtcctgcgattacagaaagtagagttactacagtccagtgcttgtctggtactggttcgttgagagttggggctgagtttctcaaaacacactaccaccaaagtgtcatttacattccaaaaccaacttgggggaaccatcccaaagttttcaacttggcaggcttgtctgtggagtatttccgctactatgatcctgcaacccgtggtcttgacttcaaaggcttgctcgaggatcttggcgctgcaccatctggagctattgtcttacttcatgcatgtgcacacaatcccactggagttgacccaacctctgaacagtgggaacagattcgacagctgatgagatctaaaagcttattacccttttttgatagtgcatatcagggttttgctagtggtagccttgacacagatgcacaatctgtccgtacatttgttgctgatggcggtgaatgcttgatagctcaaagttacgccaaaaatatgggactttatggggagcgtgttggtgcccttagcattgtctgcaagtcagcagatgtggctagtaaggttgagagccaggtgaagcttgttgtgcggcccatgtattcgagcccccctattcatggagcatcaattgttgccaccattctaaaaagcagtgatatgtacaacaactggaccatcgagctgaaagaaatggctgaccgtataaagagcatgcgccaacagttatttgaagctatacaagctagaggtacacctggtgactggagtcatattatcaaacagattgggatgtttacatttactggattgaacaaggagcaagttgaattcatgaccaaagagttccacatttacatgacctctgatgggagaataagcatggcaggtctaagttcgaagacagtgcctcaccttgccgatgctatgcatgctgcagtgacccgcctcggctaa

SEQ ID NO: 66630 - protein, 405 aa, Arabidopsis thaliana
MDSVFSNVARAPEDPILGVTVAYNNDPSPVKINLGVGAYRTEEGKPLVLDVVRKAEQQLVNDPSRVKEYIPIVGISDFNKLSAKLILGADSPAITESRVTTVQCLSGTGSLRVGAEFLKTHYHQSVIYIPKPTWGNHPKVFNLAGLSVEYFRYYDPATRGLDFKGLLEDLGAAPSGAIVLLHACAHNPTGVDPTSEQWEQIRQLMRSKSLLPFFDSAYQGFASGSLDTDAQSVRTFVADGGECLIAQSYAKNMGLYGERVGALSIVCKSADVASKVESQVKLVVRPMYSSPPIHGASIVATILKSSDMYNNWTIELKEMADRIKSMRQQLFEAIQARGTPGDWSHIIKQIGMFTFTGLNKEQVEFMTKEFHIYMTSDGRISMAGLSSKTVPHLADAMHAAVTRLG

SEQ ID NO: 66631 - DNA, 1381 bp, Arabidopsis thaliana
  CDS (1)..(1350)
atgaaaactactcatttctcttcctcttcttcttccgatcgcaggatcggtgctctgctccgtcatctcaattccggctcagattcggacaacctgagctctctttatgcatctccgacatcgggaggcaccggtggttctgttttctctcatcttgttcaagctccagaggatcctattcttggggtgacagttgcatacaacaaagatcctagcccagttaagctgaatttaggagttggtgcttaccgaactgaggagggaaaacctttggttcttaatgttgtgaggaaagctgagcagcagcttatcaatgacagaacaagaatcaaggagtatcttcccattgttggattggttgagttcaacaagttaagcgctaagctcatactaggcgctgacagtcctgctattcgggagaatcggattaccaccgtggagtgtttgtctggtactggttctctgagagttggaggagagtttttggctaaacattatcatcagaaaacaatttacatcactcagccaacatggggaaatcatccaaagattttcacgctcgctggtttgacagtgaaaacttaccgatactacgatccagcgacgcgtgggttgaactttcaaggtttattagaagaccttggtgctgccgcacctggttctatagtgcttctccatgcctgtgcccataaccctactggtgttgatccaaccattcaacaatgggagcaaatcaggaagttgatgcgatcaaagggattgatgcccttcttcgatagtgcttatcagggctttgcaagtggaagtcttgatacagatgcgaaacctattaggatgtttgttgctgatggcggagaatgcctcgttgctcaaagttatgcgaagaacatgggactctatggagaacgagttggagctctcagcattgtatgcaaatcagcagatgttgcggggagagttgaaagccaactgaaactagtgataaggccaatgtactcgagtcctccaatccatggtgcatcaatcgtggctgtaatcctccgtgacaagaatttgttcaacgaatggactctggaactgaaggccatggctgatcgtatcatcagcatgaggaaacagcttttcgaggcattacgtactcgaggcactcctggagactggagtcacatcataaagcagattggtatgtttaccttcacagggttaaacccagctcaagtctccttcatgactaaagagtaccacatctacatgacatctgacgggaggataagcatggctggtctgagttcgaagactgtacctcaccttgcagacgctatccatgctgttgtcaccaaagccgtctgagaaactgaacaccaccatgacaccaaagctt

SEQ ID NO: 66632 - protein, 449 aa, Arabidopsis thaliana
MKTTHFSSSSSSDRRIGALLRHLNSGSDSDNLSSLYASPTSGGTGGSVFSHLVQAPEDPILGVTVAYNKDPSPVKLNLGVGAYRTEEGKPLVLNVVRKAEQQLINDRTRIKEYLPIVGLVEFNKLSAKLILGADSPAIRENRITTVECLSGTGSLRVGGEFLAKHYHQKTIYITQPTWGNHPKIFTLAGLTVKTYRYYDPATRGLNFQGLLEDLGAAAPGSIVLLHACAHNPTGVDPTIQQWEQIRKLMRSKGLMPFFDSAYQGFASGSLDTDAKPIRMFVADGGECLVAQSYAKNMGLYGERVGALSIVCKSADVAGRVESQLKLVIRPMYSSPPIHGASIVAVILRDKNLFNEWTLELKAMADRIISMRKQLFEALRTRGTPGDWSHIIKQIGMFTFTGLNPAQVSFMTKEYHIYMTSDGRISMAGLSSKTVPHLADAIHAVVTKAV

SEQ ID NO: 66633 - DNA, 1447 bp, Arabidopsis thaliana
  CDS (1)..(1362)
atggcttctttaatgttatctctcggttccacttctctgttaccgcgcgagattaacaaggataagctaaagcttggaacttctgcttcgaacccgttcctaaaagcaaagtcttttagcagagtgactatgacggttgcagtgaagccttctcgtttcgagggtataactatggctccaccagaccctattcttggagtcagtgaagcattcaaagctgacactaacgggatgaaactcaatcttggtgttggtgcttatcgtactgaggaactccagccttatgtgcttaatgttgttaaaaaggcggagaatttgatgttggagagaggagataacaaagagtatcttccaattgaggggttggcagcattcaacaaggctactgctgagttgctatttggagctggtcatcctgttattaaggaacaaagagtagcaacaattcagggtctttcgggaacaggttcactgcgattagcagcggctcttatagagcgttatttccctggagcaaaagttgtgatctcatcaccaacctggggtaatcacaagaatatcttcaatgatgccaaagttccgtggtccgaataccgctactatgatccaaaaacaattggtttggattttgagggaatgatagcagatataaaggaagctccagaaggatccttcatcttgcttcacggatgtgctcacaacccaactggaattgacccaacaccagaacagtgggtaaaaattgctgatgtcattcaggaaaagaaccatatcccatttttcgatgttgcataccagggctttgctagtggaagccttgatgaagatgcagcatctgtgagattatttgctgagcggggaatggagttttttgttgctcagtcatatagtaaaaatttaggtttgtatgcagaaagaattggggcaatcaatgtcgtgtgctcctcagctgatgctgctacaagggtcaagagccagttgaaaaggattgctcggcctatgtactcgaatccaccagttcatggggcgagaatcgtggccaatgtagtgggtgatgtaactatgttcagtgaatggaaagcagagatggaaatgatggcaggaagaataaagacggttagacaagagctgtatgatagcctcgtttcaaaagacaagagcgggaaggactggtccttcattctgaagcaaattggcatgttctctttcaccggcctaaacaaagctcagagcgataacatgacggacaaatggcacgtgtatatgactaaagacgggaggatatcattggccggattatctctggccaaatgcgagtatcttgctgatgcgatcatcgactcataccataacgtaagctgagcttccatctcagtagatgacaataagaaacagttttatataccctttttagcttcttcttgatctttgattgaaaccagatggc

SEQ ID NO: 66634 - protein, 453 aa, Arabidopsis thaliana
MASLMLSLGSTSLLPREINKDKLKLGTSASNPFLKAKSFSRVTMTVAVKPSRFEGITMAPPDPILGVSEAFKADTNGMKLNLGVGAYRTEELQPYVLNVVKKAENLMLERGDNKEYLPIEGLAAFNKATAELLFGAGHPVIKEQRVATIQGLSGTGSLRLAAALIERYFPGAKVVISSPTWGNHKNIFNDAKVPWSEYRYYDPKTIGLDFEGMIADIKEAPEGSFILLHGCAHNPTGIDPTPEQWVKIADVIQEKNHIPFFDVAYQGFASGSLDEDAASVRLFAERGMEFFVAQSYSKNLGLYAERIGAINVVCSSADAATRVKSQLKRIARPMYSNPPVHGARIVANVVGDVTMFSEWKAEMEMMAGRIKTVRQELYDSLVSKDKSGKDWSFILKQIGMFSFTGLNKAQSDNMTDKWHVYMTKDGRISLAGLSLAKCEYLADAIIDSYHNVS

SEQ ID NO: 66635 - DNA, 1523 bp, Daucus carota
  CDS (24)..(1241)
caaaaccctagcttatacttccgatgtcttccgtcttcgctaacgtcgttcgcgctcctgaggatcctatcttaggggtcactgttgcttatcacaaagatcaaagtcctaataagttgaatttgggtgttggtgcttatcgaactgaggaaggaaaacctcttgttcttaatgttgtgaagaaagcagagcagatgcttgtaaatgatcagtctcgagtaaaagagtatcttcctattgttggactggcagactttaacaaattgagtgccaagctgattttcggcgctgatagtcctgccattcaagagaatagagtcgcaactgtccagtgcttatctggtactggctcactgagggttgggggtgaattcctggccagacattatcatgaacatacagtgtatatcccccagccaacttggggaaaccatccaaaaattttcactttagcaggcttatcggtgaagacataccgctattataatccagaaacgcgtggattggattttgaaggcatgctagaggatcttggttctgctccattgggagcaatagtgcttcttcatgcatgtgctcacaatccaaccggtgttgatccaaccattgagcagtgggagcagatcagacagctgatgagatcgaaaagcttgttacctttctttgacagtgcatatcagggttttgctagcggcagccttgacgccgatgcacagtctgttcgcatctttgttgcagatggtggtgaatgccttgcagctcagagttatgcaaagaatatgggactctatggggaacgcgttggtgccctgagcattgtttgcaagactgcagatgtggcaagcaaggttgagagccaattgaaactagttatcaggcctatgtattccagtccacctcttcatggtgcatctattgtggctgcgattctcaaagatggtgacctctataatgaatggacactggagctgaaagcaatggctgaccgaatcatcagcatgcgacaggagctctttaatgctttacaagcaaaaggaacaccaggtgactggagtcacattgtcaagcaaattggaatgtttacattcactgggttaaactctgagcaagtcaccttcatgaccaatgagtatcatatatatttgacatctgatgggcggatcagcatggcaggtcttagttcccgaacagttcctcatcttgcagatgctattcatgctgcagttactggcaaggcctagatactgttgtgttatatatacatgtttcatgagatttttgggtagatgtctgaaaaccttgtttggagctcactgatcttcagttagctttaataaagatgtacatgtcgcctggagccaaatggttaggttttatctgtgagctagcatgtctggtaagagcatgacatgacattaagcacaatataaatgcctagacagctattacaggaacatgattgacgctgagaaatgacttcgtttttgcaaaaacttttttatatatctaaatgcatcatattt

SEQ ID NO: 66636 - protein, 405 aa, Daucus carota
MSSVFANVVRAPEDPILGVTVAYHKDQSPNKLNLGVGAYRTEEGKPLVLNVVKKAEQMLVNDQSRVKEYLPIVGLADFNKLSAKLIFGADSPAIQENRVATVQCLSGTGSLRVGGEFLARHYHEHTVYIPQPTWGNHPKIFTLAGLSVKTYRYYNPETRGLDFEGMLEDLGSAPLGAIVLLHACAHNPTGVDPTIEQWEQIRQLMRSKSLLPFFDSAYQGFASGSLDADAQSVRIFVADGGECLAAQSYAKNMGLYGERVGALSIVCKTADVASKVESQLKLVIRPMYSSPPLHGASIVAAILKDGDLYNEWTLELKAMADRIISMRQELFNALQAKGTPGDWSHIVKQIGMFTFTGLNSEQVTFMTNEYHIYLTSDGRISMAGLSSRTVPHLADAIHAAVTGKA

SEQ ID NO: 66637 - DNA, 1502 bp, Oryza sativa
  CDS (57)..(1280)
ccagcacctcctcctccgccgccgacgccgactcctccctccaagctttccccaccatggcgtcgtcgtccgtcttcgctggcctcgcgcaggcgccggaggaccccatcctcggggtgacggtcgcgtacaacaaggatcccagccccgtgaaggtcaatctcggcgtcggcgcctaccggaccgaggaagggaagcccctggtgctgaatgtggtcaggcgcgctgagcagatgctgatcaacaacccgtcacgtgttaaggagtatttgccgatcactggactggccgatttcaataagctgagtgctaagcttatttttggtgctgacagtcctgccattcaagagaatagggtggctacagttcagtgcttgtcaggaactggttctttaagggtgggaggtgaatttcttgcaaggcattatcatgaacgcactatatacatcccacagccaacctgggggaatcaccccaaagtgttcactttagctggcctgactgttaggagttaccgctactatgatcctgcaacccgtggactggatttccaagggctgttagaagatctcggttcagctccttcaggtgcaattgtactgcttcatgcttgtgcccacaaccctactggagtagacccaactttggaccagtgggaacagatcaggcagttgatgagatcaaaagcattgctgccattctttgatagcgcttatcagggatttgcaagtggaagtcttgaccaagatgctcaatcagtgcgcatgtttgttgctgatggtggtgaattgctcatggctcagagctacgctaagaacatgggattgtatggagagcgtgtcggtgctttaagcatagtttgtggaagtgctgatgtagctgtcagggttgaaagtcaacttaagcttgtaattaggcctatgtattcaaaccctcctattcatggtgcatctatcgtggctaccatacttaaggacagtgcaatgttcaatgaatggactgtggagctgaagggcatggctgataggattattagcatgaggcaacagctttttgatgctctgaaaacgagagaaactcctggagactggagtcacatcattaagcagatcggaatgttcactttcactgggctcaacagtgatcaagtggctttcatgaggcaggaataccacatttacatgacatctgatgggaggatcagtatggctggtttgagcgggaggaccattccgcatcttgcagatgcaatccatgccgcagtcacaaaactgaagtgaatgatggtagcatagcagctccctccaagaataacatcttaaaaccatccgcagcagtgttctgaggattcagacagtgatgtttgctggctgagcacatcctggaagtttccttgtaatagactcgtgtgacttgcttttgggagcagttttgtaccagtggattcagaaaaagtggtgatttcgaatcacctaataagctccatcggtgatgcttttacc

SEQ ID NO: 66638 - protein, 407 aa, Oryza sativa
MASSSVFAGLAQAPEDPILGVTVAYNKDPSPVKVNLGVGAYRTEEGKPLVLNVVRRAEQMLINNPSRVKEYLPITGLADFNKLSAKLIFGADSPAIQENRVATVQCLSGTGSLRVGGEFLARHYHERTIYIPQPTWGNHPKVFTLAGLTVRSYRYYDPATRGLDFQGLLEDLGSAPSGAIVLLHACAHNPTGVDPTLDQWEQIRQLMRSKALLPFFDSAYQGFASGSLDQDAQSVRMFVADGGELLMAQSYAKNMGLYGERVGALSIVCGSADVAVRVESQLKLVIRPMYSNPPIHGASIVATILKDSAMFNEWTVELKGMADRIISMRQQLFDALKTRETPGDWSHIIKQIGMFTFTGLNSDQVAFMRQEYHIYMTSDGRISMAGLSGRTIPHLADAIHAAVTKLK

SEQ ID NO: 66639 - DNA, 1257 bp, Saccharomyces cerevisiae
  CDS (1)..(1257)
atgtctgccactctgttcaataacatcgaattgctgccccctgatgccctttttggtattaagcaaaggtacgggcaagatcaacgtgctaccaaggtcgacttgggtatcggggcctacagagacgacaacggtaaaccatgggtcttgccaagtgttaaagccgccgaaaagctaattcataacgacagctcctacaaccatgaatacctcggtattaccggtctgccaagtttgacatctaacgccgccaagatcatcttcggtacgcaatccgatgcctttcaggaagacagagtaatctcagtacaatcactgtctggtacgggtgctcttcatatatctgcgaagtttttttcaaaattcttcccagataaactggtctatttgtctaagcctacttgggccaaccacatggccatttttgagaatcaaggcttgaaaacggcgacttacccttactgggccaacgaaactaagtctttggacctaaacggctttctaaatgctattcaaaaagctccagagggctccattttcgttctgcactcttgcgcccataacccaactggtctggaccctactagtgaacaatgggttcaaatcgttgatgctatcgcctcaaagaaccacatcgccttatttgacaccgcctaccaagggtttgccactggagatttggacaaggatgcctatgctgtgcgtctaggtgtggagaagctttcaacggtctctcccgtctttgtctgtcagtcctttgccaagaacgccggtatgtacggtgagcgtgtaggttgtttccatctagcacttacaaaacaagctcaaaacaaaactataaagcctgctgttacatctcaattggccaaaatcattcgtagtgaagtgtccaacccacccgcctacggcgctaagattgtcgctaaactgttggaaacgccagaattaacggaacagtggcacaaggatatggttaccatgtcctccagaattacgaaaatgaggcacgcattaagagaccatttagtcaagttgggcactcctggcaactgggatcatatagtaaatcaatgcgggatgttctcctttacaggattgactcctcaaatggttaaacgacttgaagaaacccacgcagtttacttggttgcctcaggtagagcttctattgctggattgaatcaaggaaacgtggaatacgtggctaaagccattgatgaagtggtgcgcttctatactattgaagctaaattgtaa

SEQ ID NO: 66640 - protein, 418 aa, Saccharomyces cerevisiae
MSATLFNNIELLPPDALFGIKQRYGQDQRATKVDLGIGAYRDDNGKPWVLPSVKAAEKLIHNDSSYNHEYLGITGLPSLTSNAAKIIFGTQSDAFQEDRVISVQSLSGTGALHISAKFFSKFFPDKLVYLSKPTWANHMAIFENQGLKTATYPYWANETKSLDLNGFLNAIQKAPEGSIFVLHSCAHNPTGLDPTSEQWVQIVDAIASKNHIALFDTAYQGFATGDLDKDAYAVRLGVEKLSTVSPVFVCQSFAKNAGMYGERVGCFHLALTKQAQNKTIKPAVTSQLAKIIRSEVSNPPAYGAKIVAKLLETPELTEQWHKDMVTMSSRITKMRHALRDHLVKLGTPGNWDHIVNQCGMFSFTGLTPQMVKRLEETHAVYLVASGRASIAGLNQGNVEYVAKAIDEVVRFYTIEAKL

SEQ ID NO: 66641 - DNA, 1374 bp, Oryza sativa
  CDS (1)..(1374)
atgccatccgctaacgtgcgcggggcgcagcctagcgccgaccgcaggttaagtacgctggtgcgccacctactgccttcctccgcacgaacagcaaccaccaccagcacctcctcctccgccgccgacgccgactcctccctccaagctttccccaccatggcgtcgtcgtccgtcttcgctggcctcgcgcaggcgccggaggaccccatcctcggggtgacggtcgcgtacaacaaggatcccagccccgtgaaggtcaatctcggcgtcggcgcctaccggaccgagcccctggtgctgaatgtggtcaggcgcgctgagcagatgctgatcaacaacccgtcacgtgttaaggagtatttgccgatcactggactggccgatttcaataagctgagtgctaagcttatttttggtgctgacagtcctgccattcaagagaatagggtggctacagttcagtgcttgtcaggaactggttctttaagggtgggaggtgaatttcttgcaaggcattatcatgaacgcactatatacatcccacagccaacctgggggaatcaccccaaagtgttcactttagctggcctgactgttaggagttaccgctactatgatcctgcaacccgtggactggatttccaagggctgttagaagatctcggttcagctccttcaggtgcaattgtactgcttcatgcttgtgcccacaaccctactggagtagacccaactttggaccagtgggaacagatcaggcagttgatgagatcaaaagcattgctgccattctttgatagcgcttatcagggatttgcaagtggaagtcttgaccaagatgctcaatcagtgcgcatgtttgttgctgatggtggtgaattgctcatggctcagagctacgctaagaacatgggattgtatggagagcgtgtcggtgctttaagcatagtttgtggaagtgctgatgtagctgtcagggttgaaagtcaacttaagcttgtaattaggcctatgtattcaaaccctcctattcatggtgcatctatcgtggctaccatacttaaggacagtgcaatgttcaatgaatggactgtggagctgaagggcatggctgataggattattagcatgaggcaacagctttttgatgctctgaaaacgagagaaactcctggagactggagtcacatcattaagcagatcggaatgttcactttcactgggctcaacagtgatcaagtggctttcatgaggcaggaataccacatttacatgacatctgatgggaggatcagtatggctggtttgagcgggaggaccattccgcatcttgcagatgcaatccatgccgcagtcacaaaactgaagtga

SEQ ID NO: 66642 - protein, 457 aa, Oryza sativa
MPSANVRGAQPSADRRLSTLVRHLLPSSARTATTTSTSSSAADADSSLQAFPTMASSSVFAGLAQAPEDPILGVTVAYNKDPSPVKVNLGVGAYRTEPLVLNVVRRAEQMLINNPSRVKEYLPITGLADFNKLSAKLIFGADSPAIQENRVATVQCLSGTGSLRVGGEFLARHYHERTIYIPQPTWGNHPKVFTLAGLTVRSYRYYDPATRGLDFQGLLEDLGSAPSGAIVLLHACAHNPTGVDPTLDQWEQIRQLMRSKALLPFFDSAYQGFASGSLDQDAQSVRMFVADGGELLMAQSYAKNMGLYGERVGALSIVCGSADVAVRVESQLKLVIRPMYSNPPIHGASIVATILKDSAMFNEWTVELKGMADRIISMRQQLFDALKTRETPGDWSHIIKQIGMFTFTGLNSDQVAFMRQEYHIYMTSDGRISMAGLSGRTIPHLADAIHAAVTKLK

SEQ ID NO: 66643 - DNA, 1218 bp, Brassica napus
  CDS (1)..(1218)
atgatttccatcttgtcaaacgttcttcctgctccggaagatcccgttctcagtgtcatatttgcttgtagagatgatccttgtccggttaagttgaatctgagcgtcggtgcttaccaaaccgaggagggaaagcctcttgttcttgaggtggtaagaaaagcagagcaacagttagcgaatgacctgtattgtgacaagggatatctcccaatcgatggacttgctgagtttaacaaatttagcgctaagctaatcttaggtgatgatagtcatgcagtaaaggagaatagagttgttactatccagtgtttgtctggtactggttctttgagagtcggagctgagtttctagcaaaacaccaccaacaacgtgtcattttcgttccaaatccaacttgggggaaccatccctttattttcacattggcgggtttgtcggtagagtatttccgttactatgatccgcatacccgaggactcgacttcgaaggcatgctcgaggatcttggtgcagcaccgtctggagctctagtggtattgcaagcttgtgcgcataaccccacaggaattgacccaacactggaacaatgggaacagattcgacaaatcgtgagatctaaaggcttattacccttctttgataatgcatatcagggttttgctagtggtaaccttgactcagatgcacaatcggttcgtatgtttgttgctgatggaggtgaatgtttaatagctcaaagttttgccaaaaacatgggtctttatggtgagcgtattggtgctcttaccattgtatgcacctcagaggatgtggctaggaaagtaaaaagccaactgctacttgttgttagacctatgtatcttagcccaccaattcatggagcatccattgttaccacaattcttaaaaacagtgatatgtacaaggactggaccattgagctgaaaggcatggctgaccgcattattagcatgcgccaacagttatatgaagctattcaagctagaggcacacctggtgattggagtcacattatcaaacagatagggatgttttcttttacaggattaaatgagaagcaagttcggatgatggcaaaagaatatcacatttacatgacttatgatgggaggataagcatggcaggtctaagttcaaagacagtgcctcaacttgctgatgctatacatgccgcagttacccgcattccctaa

SEQ ID NO: 66644 - protein, 405 aa, Brassica napus
MISILSNVLPAPEDPVLSVIFACRDDPCPVKLNLSVGAYQTEEGKPLVLEVVRKAEQQLANDLYCDKGYLPIDGLAEFNKFSAKLILGDDSHAVKENRVVTIQCLSGTGSLRVGAEFLAKHHQQRVIFVPNPTWGNHPFIFTLAGLSVEYFRYYDPHTRGLDFEGMLEDLGAAPSGALVVLQACAHNPTGIDPTLEQWEQIRQIVRSKGLLPFFDNAYQGFASGNLDSDAQSVRMFVADGGECLIAQSFAKNMGLYGERIGALTIVCTSEDVARKVKSQLLLVVRPMYLSPPIHGASIVTTILKNSDMYKDWTIELKGMADRIISMRQQLYEAIQARGTPGDWSHIIKQIGMFSFTGLNEKQVRMMAKEYHIYMTYDGRISMAGLSSKTVPQLADAIHAAVTRIP

SEQ ID NO: 66645 - DNA, 1242 bp, Brassica napus
  CDS (1)..(1242)
atgatgagccgtcagatctcggggttgagatccatgtcttcgtggtggaagaacgtcgagcccgctcccaaagatcccatcctcggagtcaccgaggcctttctcgctgatcctagtcccgacaaagttaacgttggtgtgggagcatatcgagatgataatgggaagcctgttgtcttggaatgtgtccgtgaagctgagcgtaggatcgctggcacctccttcatggagtatcttccgatgggagggagtgtcaaaatggtggacgagacattgaagcttgcctatggggacaactctgagtttatcaaagacaaaaggattgctgcagttcagtctctctccggcactggagcttgccggctcttcgcagacttccagaaacgtttccgtcccgattcgcagatctacattcctgtaccaacctggtccaaccaccacaacatctggagagatgcacaagtcactcaaaagacgtaccattactaccatccagaaaccaagggcttggatttctcagggttgatggatgatgtgaagaatgctccgcaaggctccttcttccttctccacgcttgtgctcacaatcctactggagtagaccctacagaggagcaatggagagagatctcacagctattcaaggccaaaaaccatttcgcattcttcgacatggcctatcaaggctttgcaagcggtgaccctgcgagagacgccaagtccatcaggatctttctcgaggacggtcatcatattggaatctctcagtcttatgctaagaacatgggactctacggccagagggtcggatgtctcagcgtgctttgtgaagatgagaagcaagccgtgactgtgaaaagccagttgcagcaactagctagaccaatgtacagcaacccacctttgcatggagctcaaatagtctcaaccattctcggagacccagcgttaaaaggcctctggctaaaggaagttaaggtcatggctgatcggataattggcatgagaactgctttgagagaaagcttagagaagttaggatcgcctctatcatgggagcacgtaaccaagcagattggaatgttctgctacagtgggatgacaccagaacaggttgaccgtttaacaagcgaatatcacatctatatgacccgtaatggtcgtatcagtatggccggtgttacaacaggaaacgtgggataccttgcgaatgctatacatgaagtcaccaagtcatcttaa

SEQ ID NO: 66646 - protein, 413 aa, Brassica napus
MMSRQISGLRSMSSWWKNVEPAPKDPILGVTEAFLADPSPDKVNVGVGAYRDDNGKPVVLECVREAERRIAGTSFMEYLPMGGSVKMVDETLKLAYGDNSEFIKDKRIAAVQSLSGTGACRLFADFQKRFRPDSQIYIPVPTWSNHHNIWRDAQVTQKTYHYYHPETKGLDFSGLMDDVKNAPQGSFFLLHACAHNPTGVDPTEEQWREISQLFKAKNHFAFFDMAYQGFASGDPARDAKSIRIFLEDGHHIGISQSYAKNMGLYGQRVGCLSVLCEDEKQAVTVKSQLQQLARPMYSNPPLHGAQIVSTILGDPALKGLWLKEVKVMADRIIGMRTALRESLEKLGSPLSWEHVTKQIGMFCYSGMTPEQVDRLTSEYHIYMTRNGRISMAGVTTGNVGYLANAIHEVTKSS

SEQ ID NO: 66647 - DNA, 1218 bp, Brassica napus
  CDS (1)..(1218)
atggagtccgtcttctcaaacgtcgttcgtgctcccgaagatcctattctcggtgtgacggttgcttacaataatgatccaagcccagctaagctcaatttgggtgtcggtgcctatcgaactgaggaagggaagccacttgttcttgacgtggtgcgaagggcggagcaacagcttgtgaacgatccgtcccgggtcaaggaatacattcctattgctggacttgctgattttaacaaacttagcgctaagctcatcttaggtgctgatagtcctgcaattcaagagagtagagttgctacaatccagtgcttgtctggtactgggtcattgagagttggggctgagtttctcaaaaaacactaccaccaaagtgtcattttcattccgaaaccaacttgggggaaccatcccaaagttttcaacctggctggcttgtctgtggagtactaccgttactatgatccctcgacccgtggacttgacttccaaggcttactcgaggatcttggtgctgcaccatctggagcgattgtcttacttcatgcatgtgctcacaatcccactggagttgacccaacctctgaacagtgggaacagattcggcaactaataagatctaaaagcttgttaccgttttttgatagtgcatatcagggttttgctagtggtagcctagacacagatgcacattcagtccgcacctttgttgctgatggcggtgaatgcttgatagctcaaagttatgccaaaaatatgggactctatggggagcgtgttggtgcccttagcattgtctgcaagtcatcagatgtggctagtaaggttgagagccaggtgaaacttgttgtgcgacccatgtactcgagcccacctattcatggagcatcaattgttgccaccattctgaaaagcagtgatatgtacaatgactggaccatcgagctgaaaggaatggctggccgcattattagcatgcgccaacacttatttgaagctctacaagctaaaggcacacctggtgattggagtcacattatcaaacagattgggatgttcacttttactggattgaacaaggagcaagttgccttcatgaccaaagagtttcacatttacatgacatctgacgggagaataagcatggcaggtctcagttcgaagacggtgcctcacctggttgaagctatacatgctgcagttacccgcgtcgcctaa

SEQ ID NO: 66648 - protein, 405 aa, Brassica napus
MESVFSNVVRAPEDPILGVTVAYNNDPSPAKLNLGVGAYRTEEGKPLVLDVVRRAEQQLVNDPSRVKEYIPIAGLADFNKLSAKLILGADSPAIQESRVATIQCLSGTGSLRVGAEFLKKHYHQSVIFIPKPTWGNHPKVFNLAGLSVEYYRYYDPSTRGLDFQGLLEDLGAAPSGAIVLLHACAHNPTGVDPTSEQWEQIRQLIRSKSLLPFFDSAYQGFASGSLDTDAHSVRTFVADGGECLIAQSYAKNMGLYGERVGALSIVCKSSDVASKVESQVKLVVRPMYSSPPIHGASIVATILKSSDMYNDWTIELKGMAGRIISMRQHLFEALQAKGTPGDWSHIIKQIGMFTFTGLNKEQVAFMTKEFHIYMTSDGRISMAGLSSKTVPHLVEAIHAAVTRVA

SEQ ID NO: 66649 - DNA, 1374 bp, Brassica napus
  CDS (1)..(1374)
atgaaaactaacgacttctcttcttcatcttcgtcgtcgccaagcgatcgcaggatcggcgctctcctccgtcatctcaccgccgggacagatgcggatcgcgtgagctccgttttcgcttcgcctacgtcgggaggcgcgggaggttctgttttcgctcatctcgttcaagctcccgaggatgctattctcggggtgacaattgcatataacaaggaccccagcccaattaagcttaatttgggagttggtgcttaccgaactgaggaggggaaacctttggttcttaatgttgtgaggaaagctgagcagcagcttatcaatgacaggtcacggatcaaggactatcttcccattgttggattggttgagttcaacaagttaagcgctaagctcattttaggcgctgacagtcctgctattcgggagaatcgtgttacaaccgtggagtgtttgtctggtactggttccctgagagttggtggggaatttttggctaggcattatcatcagaaaacaatttatattcctcagccaacatggggaaaccatcccaaaattttcaccctcgctggcttgtcagtgaaaacttaccgctactatgatccatcaacacgtgggttgaactttcaaggtttattagaagaccttagtgctgccccacagggttcgatagtgcttctccatgcctgtgctcataacccaactggtgttgatccaacccttgaacaatgggagcaaatcaggaagttgatgcgttccaaaggattgatgccattctttgacagtgcttatcagggctttgcgagtggaagtctggatacagatgcgaaaccaattaggatgtttgttgctgatggaggagaattgctcgttgctcagagttatgcaaagaacatgggactctatggagaacgacttggagctctcagcattgtaagattcagcattgtatgcaaagcagcagatgtggcgggcagagttgaaagccagctgaaacttgtaataaggccaatgtactcaaaccctccgattcatggtgcatcgatcgtggctgtaatcctccgtgacaggaacttgttcaacgaatggactctggaactgaaagccatggccgatcgtatcatcagcatgaggaaacagcttttcgaggcattacgtgctcgaggcacgcctggagactggactcacatcatcaaacagatcggtatgtttaccttcacagggctaaacccagctcaagtctcctacatgactaaagagtaccacatctacatgacatccgacgggaggataagcatggctggtctgagctcgaagactgtaccgcaccttgcagacgctatccatgccgttgtcaccaaagccctctga

SEQ ID NO: 66650 - protein, 457 aa, Brassica napus
MKTNDFSSSSSSSPSDRRIGALLRHLTAGTDADRVSSVFASPTSGGAGGSVFAHLVQAPEDAILGVTIAYNKDPSPIKLNLGVGAYRTEEGKPLVLNVVRKAEQQLINDRSRIKDYLPIVGLVEFNKLSAKLILGADSPAIRENRVTTVECLSGTGSLRVGGEFLARHYHQKTIYIPQPTWGNHPKIFTLAGLSVKTYRYYDPSTRGLNFQGLLEDLSAAPQGSIVLLHACAHNPTGVDPTLEQWEQIRKLMRSKGLMPFFDSAYQGFASGSLDTDAKPIRMFVADGGELLVAQSYAKNMGLYGERLGALSIVRFSIVCKAADVAGRVESQLKLVIRPMYSNPPIHGASIVAVILRDRNLFNEWTLELKAMADRIISMRKQLFEALRARGTPGDWTHIIKQIGMFTFTGLNPAQVSYMTKEYHIYMTSDGRISMAGLSSKTVPHLADAIHAVVTKAL

SEQ ID NO: 66651 - DNA, 1362 bp, Brassica napus
  CDS (1)..(1362)
atggcttcatcaatgctgtctctcggttctacttctctgctacctcgcgtgattaacaaggataagctaaagcttggaacttccggttccaaccccttcctgaaagcaaagtcttttagcagggtgaccatgtcggttacagtcaagccttctcgctttgagggtatcactatggctccaccagaccctattcttggagtcagcgaagctttcaaagctgacactaacgagcttaagctcaatctcggtgttggtgcttatcgaactgaggaactccagccttatgtccttaatgttgttaaaaaggcggagaacctgatgttggagagaggagataacaaagagtatctcccaatcgaagggttggctgcattcaacaaggccactgctgagctgctgtttggagctggtcatcctgttattaaggaacaaaaggtggcaacaattcaaggtctttccggaacaggttcactgagactagcagcggctcttatcgagcgttattttcctggagctaaagtgcttatatctgcaccaacatggggtaaccacaagaacatcttcaacgacgccaaagttccctggtctgaataccgctactatgatcccaaaacaattggtttggactttgaagggatgatagcagatataaaggaagctccagaaggatcattcatactgctacacggatgtgctcacaacccaactggaatcgacccaacacctgaacagtgggtgaaaattgctgacgtcattcaagaaaagaaccacatcccatttttcgatgttgcataccagggctttgctagtggaagccttgacgaagacgcagcttccgtgagactatttgctgagcgtgggatggagtttttcgtcgctcagtcgtatagtaaaaacttgggtctttatgctgaaaggattggagctatcaacgtcgtctgctcatcagctgatgctgctacaagggtgaagagccagttgaaaaggatagctaggcctatgtactcgaacccaccggttcacggtgcgaggatcgtggctaatgtagtgggagatgcagctatgttcaacgagtggaaagcagagatggaaatgatggcggggaggattaagacggtgagacagcagctgtacgacagcctcgtttcgaaggataagagcggcaaagactggtcgtttattctgaagcagattggcatgttctcattcaccggtctcaacaaagctcagagtgataacatgacggacaagtggcatgtgtacatgactaaagacgggaggatatcgttggctggactgtctatggcgaaatgcgagtaccttgctgatgccatcatcgactcgtaccataacgtaagctga

SEQ ID NO: 66652 - protein, 453 aa, Brassica napus
MASSMLSLGSTSLLPRVINKDKLKLGTSGSNPFLKAKSFSRVTMSVTVKPSRFEGITMAPPDPILGVSEAFKADTNELKLNLGVGAYRTEELQPYVLNVVKKAENLMLERGDNKEYLPIEGLAAFNKATAELLFGAGHPVIKEQKVATIQGLSGTGSLRLAAALIERYFPGAKVLISAPTWGNHKNIFNDAKVPWSEYRYYDPKTIGLDFEGMIADIKEAPEGSFILLHGCAHNPTGIDPTPEQWVKIADVIQEKNHIPFFDVAYQGFASGSLDEDAASVRLFAERGMEFFVAQSYSKNLGLYAERIGAINVVCSSADAATRVKSQLKRIARPMYSNPPVHGARIVANVVGDAAMFNEWKAEMEMMAGRIKTVRQQLYDSLVSKDKSGKDWSFILKQIGMFSFTGLNKAQSDNMTDKWHVYMTKDGRISLAGLSMAKCEYLADAIIDSYHNVS

SEQ ID NO: 66653 - DNA, 1281 bp, Triticum aestivum
  CDS (1)..(1281)
atggcgatgtctcgcgccgcggcagcggtcgggcggcgccggtgcgggccgcgcctgcccgcggcgaggtccatggcgtcgtggttcggccacgtggagccggccgccaaggaccccatcctcggcgtcaccgaggccttcctcgccgacccctcgccggacaaagtgaacgtcggcgtcggtgcgtaccgggacgacgacgggaagcccgtggtgctcgagtgcgtgcgcgaggcggagcggcgcatcgccgggagcaccaacatggagtaccttccaatgggaggaagcgtgaagatgatcgaggagtcgctgaagctggcatacggggaggattctgagttcatcaaggacaagaggattgcggcagtgcaggctctttcagggactggtgcatgtcgcctctttgcagatttccagaaacgcttcttgccggattcacagatctacatacctacgcctacatggtcaaaccatcacaacatttggagggatgcccaggtaccacaaagaacatttgcctactaccacccggaatcaagaggactggactttgcaggcctaatggatgatatcaagaacgctccagagggttccttctttttgcttcatgcatgtgctcacaatcccactggggtcgatccttctgaggaacagtggagagagatatctcaacaattcaaggtgaagaaccatttcccatttttcgacatggcataccaaggatttgccagtggtgacccagagagagatgccaaggcaattcggatctttctcgaagatggacatcaaattggatgtgcacagtcatatgcaaaaaacatgggactttatggccaaagagcaggatgccttagtattctctgcgacgatgaaatacaagcagttgatgtgaagagccagttacaacagattgccagacctatgtacagcaacccaccccttcacggcgcactaattgtttccactatccttggtgatccagcactgaaaagcttatggctgaaagaggtcaagggtatggctgatcgcattattggaatgcgaaaagcacttaaggagagccttgaaaagttgggttcaccattatcatgggaacatattactaatcagattggcatgttttgctacagcgggatgacacctgaacaagttgatcgcttaacaaatgaatttcacatatacatgactcgtaatggcaggataagcatggctggtgtaacaacaggaaatgtcgcatatttggctaacgctattcatgaggtcactaagccaatttaa

SEQ ID NO: 66654 - protein, 426 aa, Triticum aestivum
MAMSRAAAAVGRRRCGPRLPAARSMASWFGHVEPAAKDPILGVTEAFLADPSPDKVNVGVGAYRDDDGKPVVLECVREAERRIAGSTNMEYLPMGGSVKMIEESLKLAYGEDSEFIKDKRIAAVQALSGTGACRLFADFQKRFLPDSQIYIPTPTWSNHHNIWRDAQVPQRTFAYYHPESRGLDFAGLMDDIKNAPEGSFFLLHACAHNPTGVDPSEEQWREISQQFKVKNHFPFFDMAYQGFASGDPERDAKAIRIFLEDGHQIGCAQSYAKNMGLYGQRAGCLSILCDDEIQAVDVKSQLQQIARPMYSNPPLHGALIVSTILGDPALKSLWLKEVKGMADRIIGMRKALKESLEKLGSPLSWEHITNQIGMFCYSGMTPEQVDRLTNEFHIYMTRNGRISMAGVTTGNVAYLANAIHEVTKPI

SEQ ID NO: 66655 - DNA, 1386 bp, Zea mays
  CDS (1)..(1386)
atggcccctgctaacgtgcgcgcggcgcaggcgcaggcgcaggcccccagcgccgaccgcaggttaagtacgctagtggggcacctgctgccttcctccccacgaagagcagcagcagacacctccgccacctccaccctcgaatcgttccccaccatggcgtcgcagggatcctccgtcttcgccgcactcgagcaggccccggaggaccccatcctcggagtgaccgttgcctacaacaaggatcccagccccatgaaggtcaacctcggggttggcgcctaccggaccgaggaagggaagcccctagtgctgaacgtggtcaggcgcgccgagcaaatgttgatcaataatccgtcacgtgtcaaggagtacctaccaatcaccggtctggctgaattcaataagctgagcgctaagcttatctttggcgctgacagccctgctattcaggagaatagggttgctaccgtgcagtgcctatcgggtactggttctttaagagtcggaggtgaatttcttgcaaggcactatcacgagcgcactatctacatcccacaaccaacctggggaaatcacccaaaagtcttcaccctatctggcttgaacgttaggagctaccgctattatgatcctgcaacatgcagccttcacttcgaaggactcatggaagacctcggttctgctccttcaggttcaattgtactgctgcatgcctgtgcccacaaccctactggagtagatcctaccatcgaacagtgggaacagattaggcagctgatgagatcaaaatcactgcttccgttctttgacagtgcctatcaaggctttgcaagtggaagtcttgacaaagatgctcagtcagtgcgtatgtttgttgctgatggtggtgaactgctcatggctcagagctacgctaagaacatgggattgtatggagagcgtgttggcgctttgagcattgtatgtagaagtgccgatgtagctgttagggttgaaagtcaactcaaacttgtcatcaggcctatgtattcaaaccctcctcttcatggtgcctctattgttgctaccatactcagggacagcgagatgttcaacgaatggactctggaactgaaggccatggctgataggatcattaacatgaggcaacaactatttaatgcgctgaaatccagaggaacccctggtgattggagccatatcattaagcaaattgggatgtttactttcactgggctgaatagcgaacaagtggcattcatgaggcaggaataccacatttatatgacatctgatgggaggatcagcatggccggtttgagcatgaggactgtgccccatcttgcagatgccatacacgctgcagttactcaactgaaatga

SEQ ID NO: 66656 - protein, 461 aa, Zea mays
MAPANVRAAQAQAQAPSADRRLSTLVGHLLPSSPRRAAADTSATSTLESFPTMASQGSSVFAALEQAPEDPILGVTVAYNKDPSPMKVNLGVGAYRTEEGKPLVLNVVRRAEQMLINNPSRVKEYLPITGLAEFNKLSAKLIFGADSPAIQENRVATVQCLSGTGSLRVGGEFLARHYHERTIYIPQPTWGNHPKVFTLSGLNVRSYRYYDPATCSLHFEGLMEDLGSAPSGSIVLLHACAHNPTGVDPTIEQWEQIRQLMRSKSLLPFFDSAYQGFASGSLDKDAQSVRMFVADGGELLMAQSYAKNMGLYGERVGALSIVCRSADVAVRVESQLKLVIRPMYSNPPLHGASIVATILRDSEMFNEWTLELKAMADRIINMRQQLFNALKSRGTPGDWSHIIKQIGMFTFTGLNSEQVAFMRQEYHIYMTSDGRISMAGLSMRTVPHLADAIHAAVTQLK

SEQ ID NO: 66657 - DNA, 1230 bp, Zea mays
  CDS (1)..(1230)
atggcgtcgcagggatcctccgtcttcgccgcactcgagcaggccccggaggaccccatcctcggagtgaccgttgcctacaacaaggatcccagccccatgaaggtcaacctcggggttggcgcctaccggaccgaggaagggaagcccctagtgctgaacgtggtcaggcgcgccgagcaaatgttgatcaataatccgtcacgtgtcaaggagtacctaccaatcaccggtctggctgaattcaataagctgagcgctaagcttatctttggcgctgacagccctgctattcaggagaatagggttgctaccgtgcagtgcctatcgggtactggttctttaagagtcggaggtgaatttcttgcaaggcactatcacgagcgcactatctacatcccacaaccaacctggggaaatcacccaaaagtcttcaccctatctggcttgaacgttaggagctaccgctattatgatcctgcaacatgcagccttcacttcgaaggactcatggaagacctcggttctgctccttcaggttcaattgtactgctgcatgcctgtgcccacaaccctactggagtagatcctaccatcgaacagtgggaacagattaggcagctgatgagatcaaaatcactgcttccgttctttgacagtgcctatcaaggctttgcaagtggaagtcttgacaaagatgctcagtcagtgcgtatgtttgttgctgatggtggtgaactgctcatggctcagagctacgctaagaacatgggattgtatggagagcgtgttggcgctttgagcattgtatgtagaagtgccgatgtagctgttagggttgaaagtcaactcaaacttgtcatcaggcctatgtattcaaaccctcctcttcatggtgcctctattgttgctaccatactcagggacagcgagatgttcaacgaatggactctggaactgaaggccatggctgataggatcattaacatgaggcaacaactatttaatgcgctgaaatccagaggaacccctggtgattggagccatatcattaagcaaattgggatgtttactttcactgggctgaatagcgaacaagtggcattcatgaggcaggaataccacatttatatgacatctgatgggaggatcagcatggccggtttgagcatgaggactgtgccccatcttgcagatgccatacacgctgcagttactcaactgaaatga

SEQ ID NO: 66658 - protein, 409 aa, Zea mays
MASQGSSVFAALEQAPEDPILGVTVAYNKDPSPMKVNLGVGAYRTEEGKPLVLNVVRRAEQMLINNPSRVKEYLPITGLAEFNKLSAKLIFGADSPAIQENRVATVQCLSGTGSLRVGGEFLARHYHERTIYIPQPTWGNHPKVFTLSGLNVRSYRYYDPATCSLHFEGLMEDLGSAPSGSIVLLHACAHNPTGVDPTIEQWEQIRQLMRSKSLLPFFDSAYQGFASGSLDKDAQSVRMFVADGGELLMAQSYAKNMGLYGERVGALSIVCRSADVAVRVESQLKLVIRPMYSNPPLHGASIVATILRDSEMFNEWTLELKAMADRIINMRQQLFNALKSRGTPGDWSHIIKQIGMFTFTGLNSEQVAFMRQEYHIYMTSDGRISMAGLSMRTVPHLADAIHAAVTQLK

SEQ ID NO: 66659 - DNA, 1374 bp, Hordeum vulgare
  CDS (1)..(1374)
atggcctccgccctctccgcgccggcggcctccgccgtcgccgccgccgccgcccggcgcaaggtgttcggcggaggaaggaacgacgggagggccgggtgccgcgtcgggatcgcgaggaagaatactggccacatagcgatggcacttacagtacacgcttctcgctttgaaggagtgtcgatggcccctccagacccgatccttggggtctcggaagcgtttaaagcagatacaagtgatctgaagctcaaccttggtgttggcgcctacagaacggaagagctacagcccgcagtcctcaacgttgtcaagaaggctgaaaaacttatgctagagaaaggagaaaacaaagagtatctgcctattgaaggctttgctgcatttaacaaagcaactgcagatctattgcttggagctgacaatcctgtcatcaagcaaggacgggttgctactcttcagtctctctcagggactggatcattacgccttgctgcagcatttattcagagatacttccctgatgcaaaagtacttatatcatctcccacatggggaaaccacaaaaacatattcaatgatgctagggtgccatggtcagaataccggtattatgatcccaagactgttgggctggattttgaaggaatgatagctgacatacaggctgccccagaagggtcttttgttctgctacatggttgtgctcacaatccaactggaatagacccaactcctcaacagtgggagaaactggcagatctgattgaagagaaaaaacatatgcctttctttgatgttgcctatcaaggttttgccagtggaagccttgatgaagatgcatcctccgtcaggctttttgttaagcgtggcctggaagtgtttgttgcacagtcttacagcaagaaccttggtctatatgcagaaaggatcggtgcgataaatgtcatttgcacagcaccggaagttgcagatagggtgaagagccagttgaagcgattggcgcggcccatgtactcaaacccacctattcacggtgccaagatcgtcgccaacgttgttggagaccctaccatgttcggtgagtggaaagaagagatggaacaaatggcagggcggatcaagaatgttcggcagaagctttacgatagcttgactgcaaaggaccagtctggcaaggactggtctttcattcttagccagataggcatgttctccttcacgggcttgaacagaacccagagcgataacatgaccgataaatggcacatatatatgaccaaggacgggaggatttcgttggcagggctgaacctggcgaaatgcgagtaccttgctgatgccatcatcgactccttccacaatgtcaactag

SEQ ID NO: 66660 - protein, 457 aa, Hordeum vulgare
MASALSAPAASAVAAAAARRKVFGGGRNDGRAGCRVGIARKNTGHIAMALTVHASRFEGVSMAPPDPILGVSEAFKADTSDLKLNLGVGAYRTEELQPAVLNVVKKAEKLMLEKGENKEYLPIEGFAAFNKATADLLLGADNPVIKQGRVATLQSLSGTGSLRLAAAFIQRYFPDAKVLISSPTWGNHKNIFNDARVPWSEYRYYDPKTVGLDFEGMIADIQAAPEGSFVLLHGCAHNPTGIDPTPQQWEKLADLIEEKKHMPFFDVAYQGFASGSLDEDASSVRLFVKRGLEVFVAQSYSKNLGLYAERIGAINVICTAPEVADRVKSQLKRLARPMYSNPPIHGAKIVANVVGDPTMFGEWKEEMEQMAGRIKNVRQKLYDSLTAKDQSGKDWSFILSQIGMFSFTGLNRTQSDNMTDKWHIYMTKDGRISLAGLNLAKCEYLADAIIDSFHNVN

SEQ ID NO: 66661 - DNA, 1359 bp, Brassica napus
  CDS (1)..(1359)
atgaaaactaacgacttctcttcttcatcttcgtcgtcgccaagcgatcgcaggatcggcgctctcctccgtcatctcaccgccgggacagatgcggatcgcgtgagctccgttttcgcctcgcctacgtcgggaggcgcgggaggttctgttttcgctcatctcgttcaagctcccgaggatgctattctcggggtgacaattgcatataacaaagaccccagcccaatcaagctgaatttgggagttggtgcttaccgaactgaggaggggaaacctttggttcttaatgttgtgaggaaagctgagcagcagcttatcaatgacaggtcacggatcaaggagtatcttcccattgttggattggttgagttcaacaagttaagcgctaagctcatattaggcgctgacagtcctgctattcgggagaatcgggttacaaccgtggagtgtttgtctggtactggttccctgagagttggaggggaatttttggccaggcattatcatcagaaaacaatttatattcctcagccaacatggggaaaccatcccaaaattttcaccctcgctggcttgtcagtgaaaacttaccgctactatgatccatcaacacgtgggttgaactttcaaggtttattagaagaccttagtgctgccccacagggttcgatagtgcttctccatgcctgtgctcataacccaactggtgttgatcaaacccttgaacaatgggagcaaatcaggaagttgatgcgttccaaaggattgatgccattctttgacagtgcttatcagggctttgcgagtggaagtctggatacagatgcgaaaccaattaggatgtttgttgctgatggaggagaattgctcgttgctcagagttatgcaaagaacatgggactctatggagaacgagttggagctctcagcattgtatgcaaagcagcagatgtggcgggcagagttgaaagccagctgaaacttgtaataaggccaatgtactcaaaccctccgattcatggtgcatcgatcgtggctgtaatcctccgtgacaggaacttgttcaacgaatggactctggaactgaaagccatggccgatcgtatcatcagcatgaggaaacagcttttcgaggcattacgtgctcgaggcacgcctggagactggactcacatcatcaaacagatcggtatgtttaccttcacagggctaaacccagctcaagtctcctacatgactaaagagtaccacatctacatgacatccgacgggaggataagcatggctggtctgagctcgaagactgtaccgcaccttgcagacgctatccatgccgttgtcaccaaagccctctga

SEQ ID NO: 66662 - protein, 452 aa, Brassica napus
MKTNDFSSSSSSSPSDRRIGALLRHLTAGTDADRVSSVFASPTSGGAGGSVFAHLVQAPEDAILGVTIAYNKDPSPIKLNLGVGAYRTEEGKPLVLNVVRKAEQQLINDRSRIKEYLPIVGLVEFNKLSAKLILGADSPAIRENRVTTVECLSGTGSLRVGGEFLARHYHQKTIYIPQPTWGNHPKIFTLAGLSVKTYRYYDPSTRGLNFQGLLEDLSAAPQGSIVLLHACAHNPTGVDQTLEQWEQIRKLMRSKGLMPFFDSAYQGFASGSLDTDAKPIRMFVADGGELLVAQSYAKNMGLYGERVGALSIVCKAADVAGRVESQLKLVIRPMYSNPPIHGASIVAVILRDRNLFNEWTLELKAMADRIISMRKQLFEALRARGTPGDWTHIIKQIGMFTFTGLNPAQVSYMTKEYHIYMTSDGRISMAGLSSKTVPHLADAIHAVVTKAL

SEQ ID NO: 66663 - DNA, 1218 bp, Brassica napus
  CDS (1)..(1218)
atggagtccgtcttctcaaacgtcgttcgtgctcccgaagatcctattctcggtgtgacggttgcttacaataatgatccaagcccagctaagctcaatttgggtgtcggtgcctatcgaactgaggaagggaagccacttgttcttgacgtggtgcgaagggcggagcaacagcttgtgaacgatccgtcccgggtcaaggaatacattcctattgctggacttgctgattttaacaaacttagcgctaagctcatcttaggtgctgatagtcctgcaattcaagagagtagagttgctacaatccagtgcttgtctggtactgggtcattgagagttggggctgagtttctcaaaaaacactaccaccaaagtgtcattttcattccgaaaccaacttgggggaaccatcccaaagttttcaacctggctggcttgtctgtggagtactaccgttactatgatccctcgacccgtggacttgacttccaaggcttactcgaggatcttggtgctgcaccatctggagcgattgtcttacttcatgcatgtgctcacaatcccactggagttgacccaacctctgaacagtgggaacagattcggcaactaataagatctaaaagcttgttaccgttttttgatagtgcatatcagggttttgctagtggtagcctagacacagatgcacattcagtccgcacctttgttgctgatggcggtgaatgcttgatagctcaaagttatgccaaaaatatgggactctatggagagcgtgttgcagcccttagcattgtctgcaagtcaacagatgtggctagtaaggttgagagccaggtgaaacttgttgtgcgtcccatgtattcgagcccacctattcatggagcatcaattgttgccaccattctcaaaagcagcgatatgtacaacgactggaccatcgagctgaaaggaatggctgaccgcataattagcatgcgccaacagttatttgaagctctacaagccaaaggaacacctggtgattggagtcacattatcaaacagattggcatgtttacttttaccggattgaacaaggagcaagttgccttcatgaccaaagagtatcacatttacatgacatctgacgggagaataagcatggcaggtctcagtacgaagacggtgcctcacctcgttgaagctatccatgctgcagttacccgcgtcgcctaa

SEQ ID NO: 66664 - protein, 405 aa, Brassica napus
MESVFSNVVRAPEDPILGVTVAYNNDPSPAKLNLGVGAYRTEEGKPLVLDVVRRAEQQLVNDPSRVKEYIPIAGLADFNKLSAKLILGADSPAIQESRVATIQCLSGTGSLRVGAEFLKKHYHQSVIFIPKPTWGNHPKVFNLAGLSVEYYRYYDPSTRGLDFQGLLEDLGAAPSGAIVLLHACAHNPTGVDPTSEQWEQIRQLIRSKSLLPFFDSAYQGFASGSLDTDAHSVRTFVADGGECLIAQSYAKNMGLYGERVAALSIVCKSTDVASKVESQVKLVVRPMYSSPPIHGASIVATILKSSDMYNDWTIELKGMADRIISMRQQLFEALQAKGTPGDWSHIIKQIGMFTFTGLNKEQVAFMTKEYHIYMTSDGRISMAGLSTKTVPHLVEAIHAAVTRVA

SEQ ID NO: 66665 - DNA, 1362 bp, Brassica napus
  CDS (1)..(1362)
atggcttcttcaatgctgtctctcggttctacttctctgctacctcgcgagattaacaaggataagctaaagcttggaacttccggttccaaccccttcctgaaagcaaagtcttttagcagggtgaccatgtcggttacagtcaagccttctcgctttgagggtatcactatggctccaccagaccctattcttggagtcagcgaagctttcaaagctgacactaacgagcttaagctcaatctcggtgttggtgcttatcgaactgaggaactccagccttatgtccttaatgttgttaaaaaggcggagaacctgatgttggagagaggagataataaagagtatctaccaatagaagggttggctgcattcaacaaggccactgctgagctgctgttcggagctggtcatcctgttattaaggaacaaaaagtggcaacaattcaaggtctttccggaacaggttcactgagactagcagcggctcttatcgagcgttacttccctggagcaaaagtgctgatatcagcaccaacatggggtaaccacaagaacatcttcaacgacgccaaagttccatggtctgaataccgctactatgatccaaaaacaattggtttggactttgaggggatgatacaagatattaaggaagctccagaaggatcattcattttgcttcatggatgtgctcacaacccaactgggattgacccaacaccagaacaatgggtgaaaatagctgatgtcattcaggagaagaaccatataccgtttttcgatgttgcataccagggatttgctagtggaagccttgatgaagatgcagcatctgtgagattatttgctgagcgtggaatggagttttttgttgctcagtcatatagtaaaaacttgggtctttatgctgaaagaattggagcaatcaacgtcgtctgctcatcagccgatgctgctacaagggtgaagagccagttgaaaaggatagctaggcctatgtactcgaacccaccggttcacggggcgaggatcgtggctaatgtggtgggagatgcaactatgtttggtgagtggaaagcagagatggaaatgatggcggggaggataaagactgtgagacaaaggttgtatgacagcctcgtttcaaaagacaagagtggtaaggactggtcgtttattctgaagcaaattggcatgttctcattcactggcctcaacaaagctcagagtgataacatgacgaacaagtggcatgtgtacatgactaaagacgggaggatatcgttggctggactgtctatggcgaaatgcgagtaccttgctgatgccatcatcgactcgtaccataacgtaagctga

SEQ ID NO: 66666 - protein, 453 aa, Brassica napus
MASSMLSLGSTSLLPREINKDKLKLGTSGSNPFLKAKSFSRVTMSVTVKPSRFEGITMAPPDPILGVSEAFKADTNELKLNLGVGAYRTEELQPYVLNVVKKAENLMLERGDNKEYLPIEGLAAFNKATAELLFGAGHPVIKEQKVATIQGLSGTGSLRLAAALIERYFPGAKVLISAPTWGNHKNIFNDAKVPWSEYRYYDPKTIGLDFEGMIQDIKEAPEGSFILLHGCAHNPTGIDPTPEQWVKIADVIQEKNHIPFFDVAYQGFASGSLDEDAASVRLFAERGMEFFVAQSYSKNLGLYAERIGAINVVCSSADAATRVKSQLKRIARPMYSNPPVHGARIVANVVGDATMFGEWKAEMEMMAGRIKTVRQRLYDSLVSKDKSGKDWSFILKQIGMFSFTGLNKAQSDNMTNKWHVYMTKDGRISLAGLSMAKCEYLADAIIDSYHNVS

SEQ ID NO: 66667 - DNA, 1374 bp, Brassica napus
  CDS (1)..(1374)
atgaaaactaacgacttctcttcttcatcttcgtcgtcgccaagcgatcgcaggatcggcgctctcctccgtcatctcaccgccgggacagatgcggatcgcgtgagctccgttttcgcttcgcctacgtcgggaggcgcgggaggttctgttttcgctcatctcgttcaagctcccgaggatgctattctcggggtgacaattgcatataacaaggaccccagcccaattaagcttaatttgggagttggtgcttaccgaactgaggaggggaaacctttggttcttaatgttgtgaggaaagctgagcagcagcttatcaatgacaggtcacggatcaaggagtatcttcccattgttggattggttgagttcaacaagttaagcgctaagctcattttaggcgctgacagtcctgctattcgggagaatcgtgttacaaccgtggagtgtttgtctggtactggttccctgagagttggtggggaatttttggctaggcattatcatcagaaaacaatttatattcctcagccaacatggggaaaccatcccaaaattttcaccctcgctggcttgtcagtgaaaacttaccgctactatgatccatcaacacgtgggttgaactttcaaggtttattagaagaccttagtgctgccccacagggttcgatagtgcttctccatgcctgtgctcataacccaactggtgttgatccaacccttgaacaatgggagcaaatcaggaagttgatgcgttccaaaggattgatgccattctttgacagtgcttatcagggctttgcgagtggaagtctggatacagatgcgaaaccaattaggatgtttgttgctgatggaggagaattgctcgttgctcagagttatgcaaagaacatgggactctatggagaacgacttggagctctcagcattgtaagattcagcattgtatgcaaagcagcagatgtggcgggcagagttgaaagccagctgaaacttgtaataaggccaatgtactcaaaccctccgattcatggtgcatcgatcgtggctgtaatcctccgtgacaggaacttgttcaacgaatggactctggaactgaaagccatggccgatcgtatcatcagcatgaggaaacagcttttcgaggcattacgtgctcgaggcacgcctggagactggactcacatcatcaaacagatcggtatgtttaccttcacagggctaaacccagctcaagtctcctacatgactaaagagtaccacatctacatgacatccgacgggaggataagcatggctggtctgagctcgaagactgtaccgcaccttgcagacgctatccatgccgttgtcaccaaagccctctga

SEQ ID NO: 66668 - protein, 457 aa, Brassica napus
MKTNDFSSSSSSSPSDRRIGALLRHLTAGTDADRVSSVFASPTSGGAGGSVFAHLVQAPEDAILGVTIAYNKDPSPIKLNLGVGAYRTEEGKPLVLNVVRKAEQQLINDRSRIKEYLPIVGLVEFNKLSAKLILGADSPAIRENRVTTVECLSGTGSLRVGGEFLARHYHQKTIYIPQPTWGNHPKIFTLAGLSVKTYRYYDPSTRGLNFQGLLEDLSAAPQGSIVLLHACAHNPTGVDPTLEQWEQIRKLMRSKGLMPFFDSAYQGFASGSLDTDAKPIRMFVADGGELLVAQSYAKNMGLYGERLGALSIVRFSIVCKAADVAGRVESQLKLVIRPMYSNPPIHGASIVAVILRDRNLFNEWTLELKAMADRIISMRKQLFEALRARGTPGDWTHIIKQIGMFTFTGLNPAQVSYMTKEYHIYMTSDGRISMAGLSSKTVPHLADAIHAVVTKAL

SEQ ID NO: 66669 - DNA, 1218 bp, Brassica napus
  CDS (1)..(1218)
atggagtccgtcttctcaaacgtcgttcgtgctcccgaagatcctattctcggtgtgacggttgcttacaataatgatccaagcccagctaagctcaatttgggtgtcggtgcctatcgaactgaggaagggaagccacttgttcttgacgtggtgcgaagggcggagcaacagcttgtgaacgatccgtcccgggtcaaggaatacattcctattgctggacttgctgattttaacaaacttagcgctaagctcatcttaggtgctgatagtcctgcaattcaagagagtagagttgctacaatccagtgcttgtctggtactggttctttgagagttggggctgagtttctcaaaaaacactaccaccaaagtgtcattttcattccgaaaccaacttgggggaaccatcccaaagttttcaacctggctggcttgtctgtggagtactaccgttactatgatccctcgacccgtggacttgacttccaaggcttactcgaggatcttggtgctgcaccatctggagcgattgtcttacttcatgcatgtgctcacaatcccactggagttgacccaacctctgaacagtgggaacagattcggcaactaataagatctaaaagcttgttaccgttttttgatagtgcatatcagggttttgctagtggtagcctagacacagatgcacattcagtccgcacctttgttgctgatggcggtgaatgcttgatagctcaaagttatgccaaaaatatgggactctatggggagcgtgttggtgcccttagcattgtctgcaagtcatcagatgtggctagtaaggttgagagccaggtgaaacttgttgtgcgacccatgtattcgagcccacctattcatggagcatcaattgttgccaccattctgaaaagcagtgatatgtacaacgactggaccatcgagctgaaaggaatggctgaccgcattattagcatgcgccaacagttatttgaagctctacaagctaaaggcacacctggtgattggagtcacattatcaaacagattggcatgtttacttttactggattgaacaaggagcaagttgccttcatgaccaaagagtatcacatttacatgacatctgacgggagaataagcatggcaggtctcagttcgaagacggtgcctcacctggttgaagctatccatgctgcagttacccgcgtcgcctaa

SEQ ID NO: 66670 - protein, 405 aa, Brassica napus
MESVFSNVVRAPEDPILGVTVAYNNDPSPAKLNLGVGAYRTEEGKPLVLDVVRRAEQQLVNDPSRVKEYIPIAGLADFNKLSAKLILGADSPAIQESRVATIQCLSGTGSLRVGAEFLKKHYHQSVIFIPKPTWGNHPKVFNLAGLSVEYYRYYDPSTRGLDFQGLLEDLGAAPSGAIVLLHACAHNPTGVDPTSEQWEQIRQLIRSKSLLPFFDSAYQGFASGSLDTDAHSVRTFVADGGECLIAQSYAKNMGLYGERVGALSIVCKSSDVASKVESQVKLVVRPMYSSPPIHGASIVATILKSSDMYNDWTIELKGMADRIISMRQQLFEALQAKGTPGDWSHIIKQIGMFTFTGLNKEQVAFMTKEYHIYMTSDGRISMAGLSSKTVPHLVEAIHAAVTRVA

SEQ ID NO: 66671 - DNA, 1362 bp, Brassica napus
  CDS (1)..(1362)
atggcttcttcaatgctgtctctcggttctacttctctgctacctcgcgagattaacaaggataagctaaagcttggaacttccggttccaaccccttcctgaaagcaaagtgttttagtcgggtgaccatgtcggttgcagtcaagccttctcgctttgagggtatcactatggctccaccagaccctattcttggagtcagcgaagctttcaaagctgacactaacgagcttaagctcaatctcggcgttggtgcttatcgaactgaagaactccagccttatgtccttaatgttgttaaaaaggcggagaacctgatgttggagagaggagataataaagagtatctcccaatcgaagggttggctgcattcaacaaggccactgctgagctgctgtttggagctggtcatcctgttattaaggaacaaaaggtggcaacaattcaaggtctttccggaacaggttcactgagactagcagcggctcttatcgagcgttattttcctggagctaaagtgcttatatctgcaccaacatggggtaaccacaagaacatcttcaacgacgccaaagttccctggtctgaataccgctactatgatcccaaaacaattggtttggactttgaagggatgatagcagatataaaggaagctccagaaggatcattcatactgctacacggatgtgctcacaacccaactggaatcgacccaacacctgaacagtgggtgaaaattgctgacgtcattcaagaaaagaaccacatcccatttttcgatgttgcataccagggctttgctagtggaagccttgacgaagacgcagcttccgtgagactatttgctgagcgtgggatggagtttttcgtcgctcagtcgtatagtaaaaacttgggtctttatgctgaaaggattggagctatcaacgtcgtctgctcatcagctgatgctgctacaagggtgaagagccagttgaaaaggatagctaggcctatgtactcgaacccaccggttcacggtgcgaggatcgtggctaatgtagtgggagatgcagctatgttcaacgagtggaaagcagagatggaaatgatggcggggaggattaagacggtgagacagcagctgtacgacagcctcgtttcgaaggataagagcggtaaggactggtcgtttattctgaagcagattggcatgttctcattcaccggtctcaataaagctcagagtgataacatgacggacaagtggcatgtgtacatgactaaagacgggaggatatcgttggctggactgtctatggcgaaatgcgagtaccttgctgatgccatcatcgactcgtaccataacgtaagctga

SEQ ID NO: 66672 - protein, 453 aa, Brassica napus
MASSMLSLGSTSLLPREINKDKLKLGTSGSNPFLKAKCFSRVTMSVAVKPSRFEGITMAPPDPILGVSEAFKADTNELKLNLGVGAYRTEELQPYVLNVVKKAENLMLERGDNKEYLPIEGLAAFNKATAELLFGAGHPVIKEQKVATIQGLSGTGSLRLAAALIERYFPGAKVLISAPTWGNHKNIFNDAKVPWSEYRYYDPKTIGLDFEGMIADIKEAPEGSFILLHGCAHNPTGIDPTPEQWVKIADVIQEKNHIPFFDVAYQGFASGSLDEDAASVRLFAERGMEFFVAQSYSKNLGLYAERIGAINVVCSSADAATRVKSQLKRIARPMYSNPPVHGARIVANVVGDAAMFNEWKAEMEMMAGRIKTVRQQLYDSLVSKDKSGKDWSFILKQIGMFSFTGLNKAQSDNMTDKWHVYMTKDGRISLAGLSMAKCEYLADAIIDSYHNVS

SEQ ID NO: 66673 - DNA, 1392 bp, Glycine max
  CDS (1)..(1392)
atggcttcttcgtttctatccgcagcttcgcacgctgtctcaccctcttgttctctgtccaccacgcacaagggaaagcccatgcttggaggcaacactttgagatttcacaaaggacccaattccttctctagttcaaggtctagaggtcggatctctatggctgttgcagttaatgtatctcggtttgaaggcatacctatggctcctcctgatccaattctcggagtttccgaggcgtttaaggcagacaatagtgatgtcaagctcaatcttggagttggggcatacagaacagaagaactacagccatatgtgcttaatgttgttaagaaggcagagaatcttatgctggagagaggggataacaaagagtatctcccaattgagggtttggcagcatttaataaggcaactgcagagttgttactcggagcagacaacccagcaatcaaacagcaaagagttgccactgtccaaggtctttctggaactggttctctgcgactaggtgcagctctgatagagcgatattttcctggggcaaaagttttgatatcagctcctacctggggtaatcacaagaatattttcaatgatgctagtgtcccatggtctgagtaccgatattatgatcccaagacagttgggttggattttgagggcatgattgaagatataaagtcagctccggaaggatcttttatcttacttcatggatgtgctcataatcctactggtattgatccaacacctgaacagtgggaaaaaatagctgatttaattgaagaaaagaaccacattcccttttttgatgttgcttaccaggggtttgctagtggaagccttgatgaagatgcagcttctgtgagactgtttgtggcacgtggcatcgaggttcttgtagctcaatcttacagtaaaaatctcggtctctatgctgaaaggattggagcaatcaatgtgatttcatcgtcaccagaatctgcagcaagggtaaagagccaactgaaaaggattgcccgaccaatgtactctaatccaccggtacacggggctaggatagttgccgatgttgttggaaacccagttctctttaatgaatggaaagcagagatggaaatgatggctggaaggataaagaatgttagacagcagctatatgatagtattacttcaaaagacaaaagtggaaaggattggtcattcatacttaagcagataggcatgttctcattcactggcttgaacaagaaccagagtgacaacatgacaaacaagtggcacgtatacatgacaaaggatggaaggatttccctggcaggattgtcgttggctaaatgcgaataccttgcggatgctattattgattcatatcataatgtcagctga

SEQ ID NO: 66674 - protein, 463 aa, Glycine max
MASSFLSAASHAVSPSCSLSTTHKGKPMLGGNTLRFHKGPNSFSSSRSRGRISMAVAVNVSRFEGIPMAPPDPILGVSEAFKADNSDVKLNLGVGAYRTEELQPYVLNVVKKAENLMLERGDNKEYLPIEGLAAFNKATAELLLGADNPAIKQQRVATVQGLSGTGSLRLGAALIERYFPGAKVLISAPTWGNHKNIFNDASVPWSEYRYYDPKTVGLDFEGMIEDIKSAPEGSFILLHGCAHNPTGIDPTPEQWEKIADLIEEKNHIPFFDVAYQGFASGSLDEDAASVRLFVARGIEVLVAQSYSKNLGLYAERIGAINVISSSPESAARVKSQLKRIARPMYSNPPVHGARIVADVVGNPVLFNEWKAEMEMMAGRIKNVRQQLYDSITSKDKSGKDWSFILKQIGMFSFTGLNKNQSDNMTNKWHVYMTKDGRISLAGLSLAKCEYLADAIIDSYHNVS

SEQ ID NO: 66675 - DNA, 1284 bp, Glycine max
  CDS (1)..(1284)
atggcgattcgcaactcgctcaccggccaattcctccgccgcagctccgtcgccggagcaaggctcatgtcttcttcgtcctcatggttccggagcatcgagcccgctcccaaggatcctatcctcggagtcactgaagctttcctcgccgatcagagtccaaacaaagtcaacgtcggagtgggtgcgtatcgcgatgaccacggaaaacctgtggttttggaatgtgttagagaagcagagaggagggttgccggaagtcaattcatggagtatcttcccatgggtggaagcataaaaatgatagaagaatcgctgaagctggcatttggagacaactctgagttcatcaaggataaaagaatagctgcagtgcaggctttatctgggactggtgcatgtcgactttttgctgcatttcaacagagatttcatcctaatacccaaatctatataccagtgcctacctgggccaaccaccataacatttggagagatgctggagtgcctatgaagacattccgttactatcaccctgagtctagaggattggatttttcaggactgatggatgacataaagaatgctccagatggttccttctttctgcttcatgcttgtgctcataatcctactggagtagatccttcagaagaacaatggagagagatctcttcccagataaaggctaagggtcatttccctttctttgacatggcatatcaaggttttgctagtggtgatccagagagagatgcaaaagccataaagatttttcttgaggatggtcatttaataggacttgctcagtcatatgcaaaaaatatgggactgtatggccagcgagcaggaagcctgagtgtgctttgtgaagatgagaaacaagctgtggctgtaaaaagtcagttgcagctgattgctagacccatgtacagtaacccacctctccatggagcacttatagtttctactgtccttggtgatccagatttgaagaagttatggcttaaagaagtcaaggttatggcagaccgcatcatcggaatgaggactacactacgagaaaacttagaaaagaaggggtctactttgccatggcagcatataactaatcagattggtatgttctgctacagtggattgacacctgaacaggttgatcgtatgacaaacgagtttcatatttacatgacccgtaacggtcgtatcagtatggctggtcttaatacgggcaacgttggatatgttgctgacgctatccatgaggttacaaaatcattctag

SEQ ID NO: 66676 - protein, 427 aa, Glycine max
MAIRNSLTGQFLRRSSVAGARLMSSSSSWFRSIEPAPKDPILGVTEAFLADQSPNKVNVGVGAYRDDHGKPVVLECVREAERRVAGSQFMEYLPMGGSIKMIEESLKLAFGDNSEFIKDKRIAAVQALSGTGACRLFAAFQQRFHPNTQIYIPVPTWANHHNIWRDAGVPMKTFRYYHPESRGLDFSGLMDDIKNAPDGSFFLLHACAHNPTGVDPSEEQWREISSQIKAKGHFPFFDMAYQGFASGDPERDAKAIKIFLEDGHLIGLAQSYAKNMGLYGQRAGSLSVLCEDEKQAVAVKSQLQLIARPMYSNPPLHGALIVSTVLGDPDLKKLWLKEVKVMADRIIGMRTTLRENLEKKGSTLPWQHITNQIGMFCYSGLTPEQVDRMTNEFHIYMTRNGRISMAGLNTGNVGYVADAIHEVTKSF

SEQ ID NO: 66677 - DNA, 1383 bp, Zea mays
  CDS (1)..(1383)
atggccaccgccgccgccttctccgtctcctcgccggcggcctccgccgtcgccgcgcgatccaaggtgtttggaggaggagttaaccaggcgagaactagaactggctgccgcgtcggcatcacgcggaagaactttggccgtgtcatgatggcccttgcagtggatgtttctcgttttgaaggagtgccaatggctcctccagacccaattcttggggtttctgaggcctttaaagcagataaaagcgagctgaagctcaatcttggtgttggtgcctataggacagaagagctgcagccatacgtgctcaatgtagtcaagaaggctgaaaatcttatgttggagaaaggagaaaacaaagagtatcttcccattgaaggtttagccgcgtttaacaaagcaacagcagagctattgcttggagctgataaccctgttattaatcaaggactggttgctacacttcagtctctctcgggcactggatcactgcgtctcgctgcagcattcatacaaagatactttcctgaagctaaagtgctgatatcgtcgcctacctggggtaaccacaagaatatcttcaatgatgctagggtaccttggtcagagtacaggtactatgaccccaagactgttgggttggattttgagggaatgatagctgatattgaggctgctcctgaaggatcttttgttctgctacatggttgtgctcacaacccaactggaatagacccaactcctgaacagtgggagaaaattgcagatgtcattcaagagaaaaagcatatgccattctttgatgttgcatatcagggttttgccagtggaagccttgatgaagatgcattttctgtcaggctttttgttaagcgtggcatggaagtgtttgttgcacaatcttacagcaagaaccttggtctatattctgaaagggttggtgcaataaatgtcgtgtgctcagcaccagaagttgcagatagggtaaagagccagctgaaacgattggcacgtcccatgtactcgaacccccctattcacggtgccaagatagttgccaacgttgttggtgatccaaccatgtttggtgaatggaaacaagagatggagctaatggctggacggatcaagaatgtaagacagaagctctacgacagtttgtctgccaaggacaagagcggcaaggactggtctttcattctgaggcagattggcatgttctcctacaccggcttgaacaaagcgcagagtgacaacatgacggataaatggcatatttacatgaccaaggatgggcggatctcgttagctgggctgtccctggctaagtgtgattatcttgccgacgccatcatcgattccttccataatgtgaactag

SEQ ID NO: 66678 - protein, 460 aa, Zea mays
MATAAAFSVSSPAASAVAARSKVFGGGVNQARTRTGCRVGITRKNFGRVMMALAVDVSRFEGVPMAPPDPILGVSEAFKADKSELKLNLGVGAYRTEELQPYVLNVVKKAENLMLEKGENKEYLPIEGLAAFNKATAELLLGADNPVINQGLVATLQSLSGTGSLRLAAAFIQRYFPEAKVLISSPTWGNHKNIFNDARVPWSEYRYYDPKTVGLDFEGMIADIEAAPEGSFVLLHGCAHNPTGIDPTPEQWEKIADVIQEKKHMPFFDVAYQGFASGSLDEDAFSVRLFVKRGMEVFVAQSYSKNLGLYSERVGAINVVCSAPEVADRVKSQLKRLARPMYSNPPIHGAKIVANVVGDPTMFGEWKQEMELMAGRIKNVRQKLYDSLSAKDKSGKDWSFILRQIGMFSYTGLNKAQSDNMTDKWHIYMTKDGRISLAGLSLAKCDYLADAIIDSFHNVN

SEQ ID NO: 66679 - DNA, 1293 bp, Zea mays
  CDS (1)..(1293)
atggcgatgctatcccgcgcagcctcctccgcggcccggcgcccgctgccgccgccgcctaggcttctggcggtgagggcgatggcgtcgtcgctcttcggccacgtcgagccggcgcccaaggaccccatcctcggcgtcaccgaggctttcctcgccgacccctcgtccgacaaagtgaacgtcggcgtcggcgcctaccgggacgacaacggccagcccgtcgtgctcagctgcgtgcgcgaggccgagcgccggatcgcgggcaacctcaacatggagtaccttccgatgggaggcagcgtcaagatgattgaagagtcactgaagctggcgtacggcgaagattctgacttcatcaaagataagaggatagcagcggtgcaggcgctttcaggcactggtgcctgccggctctttgctgatttccaaaagcgttttttgccggattcgcagatctacataccaacaccaacgtggtccaaccatcacaatatttggagggatgctcaagtgccacagaagacattcacatactaccatccagagtcaagagggcttgatttctcaggattgatgaatgaaatcaagaatgctccagacggttcattctttttgcttcatgcatgtgctcataatcccaccggtgtagatcctacggaggaacaatggagagaaatatcccatcagttcaaggtgaaaaaacattttccattctttgacatggcataccaagggtttgccagtggtgatccagagagagatgccaaggcaatccgaattttccttgaagatggacaccaaattggatgtgctcagtcatacgcaaagaacatgggactttatggacaaagagcaggatgcctgagtattctgtgtgaggatgagatgcaagcagttgctgtcaagagccaactgcaacagatcgcaagaccaatgtacagcaacccacctgttcatggtgcactggttgtttctataatcctcagtgatccagaattgaagagtttgtggttaaaagaagtcaagggtatggctgatcgtatcattggaatgcggaaggcacttaaggaaaatcttgaaaagctaggttcacctttgtcatgggatcatatcactaatcagattggaatgttctgctacagtgggatgacacctgaacaagttgaccgtttaacaaatgaataccacatttacatgacccgcaatgggaggataagcatggctggtgtaacgacaggaaatgttggttacctagcaaatgcaattcatgaggttaccaaaccaaattga

SEQ ID NO: 66680 - protein, 430 aa, Zea mays
MAMLSRAASSAARRPLPPPPRLLAVRAMASSLFGHVEPAPKDPILGVTEAFLADPSSDKVNVGVGAYRDDNGQPVVLSCVREAERRIAGNLNMEYLPMGGSVKMIEESLKLAYGEDSDFIKDKRIAAVQALSGTGACRLFADFQKRFLPDSQIYIPTPTWSNHHNIWRDAQVPQKTFTYYHPESRGLDFSGLMNEIKNAPDGSFFLLHACAHNPTGVDPTEEQWREISHQFKVKKHFPFFDMAYQGFASGDPERDAKAIRIFLEDGHQIGCAQSYAKNMGLYGQRAGCLSILCEDEMQAVAVKSQLQQIARPMYSNPPVHGALVVSIILSDPELKSLWLKEVKGMADRIIGMRKALKENLEKLGSPLSWDHITNQIGMFCYSGMTPEQVDRLTNEYHIYMTRNGRISMAGVTTGNVGYLANAIHEVTKPN

SEQ ID NO: 66681 - DNA, 1380 bp, Zea mays
  CDS (1)..(1380)
atggccaccgccgccgccttctctgtctcctcgccggcggcctccgccgtcgccgcgcgatccaaggtgtttggaggagttaaccaggcgagaactagaactggctgccgcgtcggcatcacgcggaagaactttggccgtgtcatgatggcccttgcagtggatgtttctcgttttgaaggagtgccaatggctcctccagacccaattcttggggtttctgaggcctttaaagcagataaaagcgagctgaagctcaatcttggtgttggtgcctataggacagaagagctgcagccctacgtgctcaatgtagtcaagaaggctgaaaatcttatgttggagaaaggagaaaacaaagagtatcttcccattgaaggtttagccgcgtttaacaaagcaacagcagagctattgcttggagctgataaccctgttattaatcaaggactggttgctacacttcagtctctctcgggcactggatcactgcgtctcgctgcagcattcatacaaagatactttcctgaagctaaagtgctgatatcgtcgcctacctggggtaaccacaagaatatcttcaatgatgctagggtaccttggtcagagtaccggtattatgaccccaagactgttgggttggattttgagggaatgatagctgacattgaggctgctcctgaaggttcttttgttctgctacatggttgtgctcacaacccaactggaatagacccaactcctgaacagtgggagaaaattgcagatgtcattcaagagaaaaagcatatgccattctttgatgttgcatatcaaggttttgccagtggaagccttgatgaagatgcattttctgtcaggctttttgttaagcgtggcatggaagtgtttgttgcacaatcttacagcaagaaccttggtctatattctgaaagggttggtgcgataaatgtcgtgtgctcagcaccagaagttgcagatagggtaaagagccagctgaaacgattggcacgtcccatgtactcgaacccccctattcacggtgccaagatagttgccaacgttgttggtgatccaatcatgtttggtgaatggaaacaagagatggagctaatggctggacggatcaagaatgtaagacagaagctctacgacagtttgtctgccaaggataagagcggcaaggactggtctttcattctgaggcagattggcatgttctcctacaccggcttgaacaaagcacagagtgacaacatgacggataaatggcatatttacatgaccaaggatgggcggatctccttagctgggctgtccctggctaagtgtgattatcttgccgacgccatcatcgattccttccataatgtgaactag

SEQ ID NO: 66682 - protein, 459 aa, Zea mays
MATAAAFSVSSPAASAVAARSKVFGGVNQARTRTGCRVGITRKNFGRVMMALAVDVSRFEGVPMAPPDPILGVSEAFKADKSELKLNLGVGAYRTEELQPYVLNVVKKAENLMLEKGENKEYLPIEGLAAFNKATAELLLGADNPVINQGLVATLQSLSGTGSLRLAAAFIQRYFPEAKVLISSPTWGNHKNIFNDARVPWSEYRYYDPKTVGLDFEGMIADIEAAPEGSFVLLHGCAHNPTGIDPTPEQWEKIADVIQEKKHMPFFDVAYQGFASGSLDEDAFSVRLFVKRGMEVFVAQSYSKNLGLYSERVGAINVVCSAPEVADRVKSQLKRLARPMYSNPPIHGAKIVANVVGDPIMFGEWKQEMELMAGRIKNVRQKLYDSLSAKDKSGKDWSFILRQIGMFSYTGLNKAQSDNMTDKWHIYMTKDGRISLAGLSLAKCDYLADAIIDSFHNVN

SEQ ID NO: 66683 - DNA, 1383 bp, Zea mays
  CDS (1)..(1383)
atggccaccgccgccgccttctccgtctcctcgccggcggcctccgccgtcgccgcgcgatccaaggtgtttggaggaggagttaaccaggcgagaactagaactggctgccgcgtcggcatcacgcggaagaactttggccgtgtcatgatggcccttgcagtggatgtttctcgttttgaaggagtgccaatggctcctccagacccaattcttggggtttctgaggcctttaaagcagataaaagcgagctgaagctcaatcttggtgttggtgcctataggacagaagagctgcagccatacgtgctcaatgtagtcaagaaggctgaaaatcttatgttggagaaaggagaaaacaaagagtatcttcccattgaaggtttagccgcgtttaacaaagcaacagcagagctattgcttggagctgataaccctgttattaatcaaggactggttgctacacttcagtctctctcgggcactggatcactgcgtctcgctgcagcattcatacaaagatactttcctgaagctaaagtgctgatatcgtcgcctacctggggtaaccacaagaatatcttcaatgatgctagggtaccttggtcagagtacaggtactatgaccccaagactgttgggttggattttgagggaatgatagctgatattgaggctgctcctgaaggatcttttgttctgctacatggttgtgctcacaacccaactggaatagacccaactcctgaacagtgggagaaaattgcagatgtcattcaagagaaaaagcatatgccattctttgatgttgcatatcaaggttttgccagtggaagccttgatgaagatgcattttctgtcaggctttttgttaagcgtggcatggaagtgtttgttgcacaatcttacagcaagaaccttggtctatattctgaaagggttggtgcgataaatgtcgtgtgctcagcaccagaagttgcagatagggtaaagagccagctgaaacgattggcacgtcccatgtactcgaacccccctattcacggtgccaagatagttgccaacgttgttggtgatccaatcatgtttggtgaatggaaacaagagatggagctaatggctggacggatcaagaatgtaagacagaagctctacgacagtttgtctgccaaggataagagcggcaaggactggtctttcattctgaggcagattggcatgttctcctacaccggcttgaacaaagcacagagtgacaacatgacggataaatggcatatttacatgaccaaggatgggcggatctccttagctgggctgtccctggctaagtgtgattatcttgccgacgccatcatcgattccttccataatgtgaactag

SEQ ID NO: 66684 - protein, 460 aa, Zea mays
MATAAAFSVSSPAASAVAARSKVFGGGVNQARTRTGCRVGITRKNFGRVMMALAVDVSRFEGVPMAPPDPILGVSEAFKADKSELKLNLGVGAYRTEELQPYVLNVVKKAENLMLEKGENKEYLPIEGLAAFNKATAELLLGADNPVINQGLVATLQSLSGTGSLRLAAAFIQRYFPEAKVLISSPTWGNHKNIFNDARVPWSEYRYYDPKTVGLDFEGMIADIEAAPEGSFVLLHGCAHNPTGIDPTPEQWEKIADVIQEKKHMPFFDVAYQGFASGSLDEDAFSVRLFVKRGMEVFVAQSYSKNLGLYSERVGAINVVCSAPEVADRVKSQLKRLARPMYSNPPIHGAKIVANVVGDPIMFGEWKQEMELMAGRIKNVRQKLYDSLSAKDKSGKDWSFILRQIGMFSYTGLNKAQSDNMTDKWHIYMTKDGRISLAGLSLAKCDYLADAIIDSFHNVN

SEQ ID NO: 66685 - DNA, 1293 bp, Zea mays
  CDS (1)..(1293)
atggcgatgctatcccgcgcagcctcctccgcggcccggcgcccgctgctgccgccgcctaggcttctggcggtgagggcgatggcgtcgtcgctcttcggccacgtcgagccggcgcccaaggaccccatcctcggcgtcaccgaggctttcctcgccgacccctcgtccgacaaagtgaacgtcggcgtcggcgcctaccgggacgacaacggccagcccgtcgtgctcagctgcgtgcgcgaggccgagcgccggatcgcgggcaacctcaacatggagtaccttccgatgggaggcagcgtcaagatgattgaagagtcactgaagctggcgtacggagaagattctgacttcatcaaagataagaggatagcagcggtgcaggcgctttcaggcactggtgcctgccggctctttgctgatttccaaaagcgttttttgccggattcgcagatctacataccaacaccaacgtggtccaaccatcacaatatttggagggatgctcaagtgccacagaagacattcacatactaccatccagagtcaagagggcttgatttctcaggattgatgaatgaaatcaagaatgctccagatggttcattctttttgcttcatgcatgtgctcataatcccaccggtgtagatcctacggaggaacaatggagagaaatatcccatcagttcaaggtgaaaaaacattttccattctttgacatggcataccaagggtttgccagtggtgatccagagagagatgccaaggcaatccgaattttccttgaagatggacaccaaattggatgtgctcagtcatacgcaaagaacatgggactttatggacaaagagcaggatgcctgagtattttgtgtgaggatgagatgcaagcagttgctgtcaagagccaactgcaacagatcgcaagaccaatgtacagcaacccacctgttcatggtgcactggttgtttctataatcctcagtgatccagaattgaagagtttgtggttaaaagaagtcaagggtatggctgatcgtatcattggaatgcggaaggcacttaaggaaaatcttgaaaagctaggttcacctttgtcatgggatcatatcactaatcagattggaatgttctgctacagtgggatgacacctgaacaagttgaccgtttaacaaatgaataccacatttacatgacccgcaatgggaggataagcatggctggtgttacgacaggaaatgttggttacctagcaaatgcaattcatgaggttaccaaaccaaattga

SEQ ID NO: 66686 - protein, 430 aa, Zea mays
MAMLSRAASSAARRPLLPPPRLLAVRAMASSLFGHVEPAPKDPILGVTEAFLADPSSDKVNVGVGAYRDDNGQPVVLSCVREAERRIAGNLNMEYLPMGGSVKMIEESLKLAYGEDSDFIKDKRIAAVQALSGTGACRLFADFQKRFLPDSQIYIPTPTWSNHHNIWRDAQVPQKTFTYYHPESRGLDFSGLMNEIKNAPDGSFFLLHACAHNPTGVDPTEEQWREISHQFKVKKHFPFFDMAYQGFASGDPERDAKAIRIFLEDGHQIGCAQSYAKNMGLYGQRAGCLSILCEDEMQAVAVKSQLQQIARPMYSNPPVHGALVVSIILSDPELKSLWLKEVKGMADRIIGMRKALKENLEKLGSPLSWDHITNQIGMFCYSGMTPEQVDRLTNEYHIYMTRNGRISMAGVTTGNVGYLANAIHEVTKPN

SEQ ID NO: 66687 - DNA, 25 bp, Artificial sequence
  primer
atgttgaggacgaggcttactaatt

SEQ ID NO: 66688 - DNA, 25 bp, Artificial sequence
  primer
ttatgcgagtttgtccattttcgag

SEQ ID NO: 66689 - protein, 443 aa, Artificial sequence
  consensus sequence
  Variant (2)..(2): Xaa in position 2 is any amino acid
  Variant (4)..(4): Xaa in position 4 is any amino acid
  Variant (6)..(14): Xaa in position 6 to 14 is any amino acid
  Variant (16)..(19): Xaa in position 16 to 19 is any amino acid
  Variant (21)..(21): Xaa in position 21 is any amino acid
  Variant (25)..(25): Xaa in position 25 is any amino acid
  Variant (27)..(27): Xaa in position 27 is any amino acid
  Variant (29)..(34): Xaa in position 29 to 34 is any amino acid
  Variant (35)..(37): Xaa in position 35 to 37 is any or no amino acid
  Variant (39)..(40): Xaa in position 39 to 40 is any amino acid
  Variant (42)..(43): Xaa in position 42 to 43 is any amino acid
  Variant (46)..(55): Xaa in position 46 to 55 is any amino acid
  Variant (56)..(59): Xaa in position 56 to 59 is any or no amino acid
  Variant (61)..(64): Xaa in position 61 to 64 is any amino acid
  Variant (66)..(67): Xaa in position 66 to 67 is any amino acid
  Variant (68)..(75): Xaa in position 68 to 75 is any or no amino acid
  Variant (77)..(78): Xaa in position 77 to 78 is any amino acid
  Variant (80)..(84): Xaa in position 80 to 84 is any amino acid
  Variant (85)..(95): Xaa in position 85 to 95 is any or no amino acid
  Variant (97)..(100): Xaa in position 97 to 100 is any amino acid
  Variant (102)..(104): Xaa in position 102 to 104 is any amino acid
  Variant (108)..(114): Xaa in position 108 to 114 is any amino acid
  Variant (116)..(128): Xaa in position 116 to 128 is any amino acid
  Variant (129)..(141): Xaa in position 129 to 141 is any or no amino acid
  Variant (143)..(143): Xaa in position 143 is any amino acid
  Variant (145)..(145): Xaa in position 145 is any amino acid
  Variant (148)..(160): Xaa in position 148 to 160 is any amino acid
  Variant (161)..(167): Xaa in position 161 to 167 is any or no amino acid
  Variant (169)..(169): Xaa in position 169 is any amino acid
  Variant (172)..(178): Xaa in position 172 to 178 is any amino acid
  Variant (180)..(181): Xaa in position 180 to 181 is any amino acid
  Variant (183)..(199): Xaa in position 183 to 199 is any amino acid
  Variant (200)..(204): Xaa in position 200 to 204 is any or no amino acid
  Variant (207)..(207): Xaa in position 207 is any amino acid
  Variant (209)..(209): Xaa in position 209 is any amino acid
  Variant (215)..(215): Xaa in position 215 is any amino acid
  Variant (217)..(220): Xaa in position 217 to 220 is any amino acid
  Variant (223)..(235): Xaa in position 223 to 235 is any amino acid
  Variant (237)..(238): Xaa in position 237 to 238 is any amino acid
  Variant (240)..(240): Xaa in position 240 is any amino acid
  Variant (247)..(247): Xaa in position 247 is any amino acid
  Variant (249)..(251): Xaa in position 249 to 251 is any amino acid
  Variant (252)..(252): Xaa in position 252 is any or no amino acid
  Variant (255)..(257): Xaa in position 255 to 257 is any amino acid
  Variant (259)..(260): Xaa in position 259 to 260 is any amino acid
  Variant (261)..(279): Xaa in position 261 to 279 is any or no amino acid
  Variant (281)..(282): Xaa in position 281 to 282 is any amino acid
  Variant (285)..(285): Xaa in position 285 is any amino acid
  Variant (289)..(289): Xaa in position 289 is any amino acid
  Variant (290)..(290): Xaa in position 290 is any or no amino acid
  Variant (293)..(293): Xaa in position 293 is any amino acid
  Variant (295)..(310): Xaa in position 295 to 310 is any amino acid
  Variant (311)..(323): Xaa in position 311 to 323 is any or no amino acid
  Variant (326)..(330): Xaa in position 326 to 330 is any amino acid
  Variant (332)..(333): Xaa in position 332 to 333 is any amino acid
  Variant (336)..(336): Xaa in position 336 is any amino acid
  Variant (339)..(340): Xaa in position 339 to 340 is any amino acid
  Variant (343)..(353): Xaa in position 343 to 353 is any amino acid
  Variant (354)..(354): Xaa in position 354 is any or no amino acid
  Variant (356)..(358): Xaa in position 356 to 358 is any amino acid
  Variant (360)..(365): Xaa in position 360 to 365 is any amino acid
  Variant (367)..(368): Xaa in position 367 to 368 is any amino acid
  Variant (371)..(373): Xaa in position 371 to 373 is any amino acid
  Variant (375)..(376): Xaa in position 375 to 376 is any amino acid
  Variant (378)..(391): Xaa in position 378 to 391 is any amino acid
  Variant (392)..(402): Xaa in position 392 to 402 is any or no amino acid
  Variant (404)..(404): Xaa in position 404 is any amino acid
  Variant (406)..(408): Xaa in position 406 to 408 is any amino acid
  Variant (411)..(412): Xaa in position 411 to 412 is any amino acid
  Variant (413)..(413): Xaa in position 413 is any or no amino acid
  Variant (416)..(418): Xaa in position 416 to 418 is any amino acid
  Variant (420)..(429): Xaa in position 420 to 429 is any amino acid
  Variant (431)..(434): Xaa in position 431 to 434 is any amino acid
  Variant (437)..(437): Xaa in position 437 is any amino acid
  Variant (439)..(439): Xaa in position 439 is any amino acid
  Variant (440)..(441): Xaa in position 440 to 441 is any or no amino acid
PXDXIXXXXXXXXXDXXXXKXNLGXGXYXXXXXXXXXLXXVXXAEXXXXXXXXXXXXXXYXXXXGXXXXXXXXXXLXXGXXXXXXXXXXXXXXXXRXXXXQXXXGTGXXXXXXXFXXXXXXXXXXXXXXXXXXXXXXXXXXPXWXNHXXXXXXXXXXXXXXXXXXXXYXYYXXXXXXXDXXFXXXXXXXXXXXXXXXXXXXXXXLHXCXHNPTGXDXXXXQWXXXXXXXXXXXXXPXXDXAYQGFAXGXXXXDAXXXRXXXXXXXXXXXXXXXXXXXXXSXXKNXGLYXXERXGXXXXXXXXXXXXXXXXXXXXXXXXXXXXXSQXXXXXRXXYSXPPXXGAXXXXXXXXXXXXLXXXWXXXXXXMXXRIXXXRXXLXXXXXXXXXXXXXXXXXXXXXXXXXQXGXXXMFXXXGLXXXQXXXXXXXXXXYXXXXGRXSXXXAG

SEQ ID NO: 66690 - protein, 21 aa, Artificial sequence
  protein pattern
  Variant (3)..(3): Xaa in position 3 is Ala, Gly or Pro
  Variant (5)..(5): Xaa in position 5 is Ala or Cys
  Variant (11)..(11): Xaa in position 11 is any amino acid
  Variant (13)..(16): Xaa in position 13 to 16 is any amino acid
  Variant (19)..(20): Xaa in position 19 to 20 is any amino acid
  Variant (21)..(21): Xaa in position 21 is Ile, Leu, Met or Val
LHXCXHNPTGXDXXXXQWXXX

SEQ ID NO: 66691 - protein, 36 aa, Artificial sequence
  protein pattern
  Variant (2)..(4): Xaa in position 2 to 4 is any amino acid
  Variant (5)..(5): Xaa in position 5 is Ile, Leu or Met
  Variant (6)..(10): Xaa in position 6 to 10 is any amino acid
  Variant (11)..(11): Xaa in position 11 is Ile or Val
  Variant (12)..(16): Xaa in position 12 to 16 is any amino acid
  Variant (19)..(19): Xaa in position 19 is any amino acid
  Variant (20)..(20): Xaa in position 20 is Cys, Asn or Ser
  Variant (21)..(21): Xaa in position 21 is any amino acid
  Variant (22)..(22): Xaa in position 22 is Ala, Cys or Ser
  Variant (24)..(24): Xaa in position 24 is Ile, Leu, Met or Val
  Variant (25)..(35): Xaa in position 25 to 35 is any amino acid
  Variant (36)..(36): Xaa in position 36 is Phe, Ile, Leu, Met or Val
QXXXXXXXXXXXXXXXGRXXXXGXXXXXXXXXXXXX

SEQ ID NO: 66692 - protein, 26 aa, Artificial sequence
  protein pattern
  Variant (3)..(7): Xaa in position 3 to 7 is any amino acid
  Variant (9)..(11): Xaa in position 9 to 11 is any amino acid
  Variant (13)..(13): Xaa in position 13 is Asn, Ser or Thr
  Variant (15)..(15): Xaa in position 15 is Ala or Pro
  Variant (16)..(17): Xaa in position 16 to 17 is any amino acid
  Variant (19)..(19): Xaa in position 19 is Ala, Gly, Pro or Ser
  Variant (20)..(21): Xaa in position 20 to 21 is any amino acid
  Variant (22)..(22): Xaa in position 22 is Ala, Ile or Val
  Variant (23)..(24): Xaa in position 23 to 24 is any amino acid
  Variant (25)..(25): Xaa in position 25 is Ile, Leu or Val
  Variant (26)..(26): Xaa in position 26 is Phe, Leu, Met or Val
SQXXXXXRXXXSXPXXXGXXXXXXXX

SEQ ID NO: 66693 - protein, 14 aa, Artificial sequence
  protein pattern
  Variant (2)..(3): Xaa in position 2 to 3 is any or no amino acid
  Variant (6)..(6): Xaa in position 6 is any amino acid
  Variant (10)..(11): Xaa in position 10 to 11 is any amino acid
  Variant (13)..(13): Xaa in position 13 is any amino acid
  Variant (14)..(14): Xaa in position 14 is Ala or Gly
SXXKNXGLYXXRXX

SEQ ID NO: 66694 - protein, 13 aa, Artificial sequence
  protein pattern
  Variant (2)..(5): Xaa in position 2 to 5 is any amino acid
  Variant (6)..(6): Xaa in position 6 is Glu or Gln
  Variant (7)..(7): Xaa in position 7 is Ala, Cys, Gly, Ser or Thr
  Variant (8)..(8): Xaa in position 8 is Ile, Leu, Pro or Val
  Variant (9)..(9): Xaa in position 9 is Ala, Gly or Ser
  Variant (11)..(11): Xaa in position 11 is Ala, Ser or Thr
  Variant (13)..(13): Xaa in position 13 is Ala, Cys or Ser
RXXXXXXXXGXGX

SEQ ID NO: 66695 - DNA, 546 bp, Saccharomyces cerevisiae
  CDS (1)..(546)
atggctggcaaagcagggaggaaacaggctagttcaaatgcaaaaataattcagggcttatacaagcaagtctctttgtttttaggaatggctatcgtacgtctattcatttcacgtaaggttacaattggccaatggattaagctggtggctttgaacgttcctatgttcgttgctctgtatatcattgtgctatccggtaagcccaaatatgatggcaatcgcgtagtaaaacaaggtatagacttgaacgacaatacaaatttgatatcatatttttttgatttgatatatctatcactttttggtaacattggtattatagctttcaggacattcaaattttggtggtgtctactattgtgccccatctatgctggttacaagttatatggcctcaaaaacatgttcatgcctggcgctcaacaaactcaggcagataatcgctcaaaaaatgctaatgagggacaatccaaatccaaaaggcagatgaaaagggagaggaggggtgaaactgactctaaaattaagtacaagtatcgttaa

SEQ ID NO: 66696 - protein, 181 aa, Saccharomyces cerevisiae
MAGKAGRKQASSNAKIIQGLYKQVSLFLGMAIVRLFISRKVTIGQWIKLVALNVPMFVALYIIVLSGKPKYDGNRVVKQGIDLNDNTNLISYFFDLIYLSLFGNIGIIAFRTFKFWWCLLLCPIYAGYKLYGLKNMFMPGAQQTQADNRSKNANEGQSKSKRQMKRERRGETDSKIKYKYR

SEQ ID NO: 66697 - DNA, 525 bp, Oryza sativa (japonica cultivar-group)
  CDS (1)..(525)
atggcgaagcaaggggtgaagaagacgagggacgcgaacaagaagcggatggacctcatcctgcgcctaatcctcgcggccaacgttatttacatagtagtgagaatggctgtaatgcattcgtctttcacctggaagcattggattggtcttgctgtgacatctgctgcatattttctgccgtacaagcaacttgccaatatgtcagagccagaatactctgagaatggagagttaattaatgctggttatgacttgaacgctggtggaatgtccgaatatttacaagatgtgatatatatcactctctttgtgcagctgatgtctattttttctgataaattttggtggacatatttggtgattccagcttatggtggatacaagatttccggtctgttgagaggagcatttttcggtggtagttcagagggcgaagaagaggatgagaagacccgaaagaaaagggagaagatggagaagaaggcatctagggggaagattatcaaaaccaggactcgttga

SEQ ID NO: 66698 - protein, 174 aa, Oryza sativa (japonica cultivar-group)
MAKQGVKKTRDANKKRMDLILRLILAANVIYIVVRMAVMHSSFTWKHWIGLAVTSAAYFLPYKQLANMSEPEYSENGELINAGYDLNAGGMSEYLQDVIYITLFVQLMSIFSDKFWWTYLVIPAYGGYKISGLLRGAFFGGSSEGEEEDEKTRKKREKMEKKASRGKIIKTRTR

SEQ ID NO: 66699 - DNA, 522 bp, Candida glabrata CBS 138
  CDS (1)..(522)
atggcgggcaaagctactaagaaacaagctgcttccaatagcaatactttgaacactctgcacaaagttgctggacccgtgctggtcttagcgttcttgaggacagtactgggctctaacaacacatatatcaagtttgtgatgttcaatttgccaatgtgtgcatgcctttacattttggagaagactggtaggccgcaatatgacagcaaggggaaagttgtgcgtgaaggtatggacttgagccaagctggtggtatgactgagtacatgtttgatttgatctatctgagtatcattgccaatgttggtagaattatcttcaataccaacaaatggtggtacttgctgctcttgtgcccaatctacgtcggctacaagctatactccttgaagcagcaatactttggatctaccccaggaccagtcatcccagacaagatgcctgaagaaactaagtccaagagacaaatgaaaagagagaagcgtggtgacgataaagttaagtacaaatacaggtaa

SEQ ID NO: 66700 - protein, 173 aa, Candida glabrata CBS 138
MAGKATKKQAASNSNTLNTLHKVAGPVLVLAFLRTVLGSNNTYIKFVMFNLPMCACLYILEKTGRPQYDSKGKVVREGMDLSQAGGMTEYMFDLIYLSIIANVGRIIFNTNKWWYLLLLCPIYVGYKLYSLKQQYFGSTPGPVIPDKMPEETKSKRQMKREKRGDDKVKYKYR

SEQ ID NO: 66701 - DNA, 546 bp, Kluyveromyces lactis NRRL Y-1140
  CDS (1)..(546)
atggctggaaaatcgtccaagaagattgctgcaaagaacgcagccatcttaaagcagttgcacgtactagtcgtcgctatactatctttaacgttattgaggaaatggttcagtaatgggctgatttcaaccctaaaacctattcttttcaatgtgccgatgttgttatgtttatatattctcgaacgtaccggtagaccaaaatatgaagtcagtaacgctgcgcatggaaaatataaactagttaatgaagggttcgatttggaatctggtggactcactgaatacatgaaagatatcgtgtatgtttccttgttctgtaacctgggaacagttttcttcaacacgatgaaatggtggttcttggtattagtgtgccctgcgtttattttctacaagttgtactacttgaagcaacagtatttccccggtgcctcagcttcaaaggcggatctcgcagagacaacgcccgctgaaccttccaaatcaaagagacaattgaagagggaaaaacgtggtgataaatctcaggtaagataccgatag

SEQ ID NO: 66702 - protein, 181 aa, Kluyveromyces lactis NRRL Y-1140
MAGKSSKKIAAKNAAILKQLHVLVVAILSLTLLRKWFSNGLISTLKPILFNVPMLLCLYILERTGRPKYEVSNAAHGKYKLVNEGFDLESGGLTEYMKDIVYVSLFCNLGTVFFNTMKWWFLVLVCPAFIFYKLYYLKQQYFPGASASKADLAETTPAEPSKSKRQLKREKRGDKSQVRYR

SEQ ID NO: 66703 - DNA, 546 bp, Candida albicans SC5314
  CDS (1)..(546): transl_table=12
atggcatctgcatcagctaagaagttggcagtagccaataccaacatattaaatcaattattaatcatttccgcatcaattaacattattgtgtttttaattatctccattttccatcgtccatcttcctataaaccgtggataattttctccatcccaagtatatttttacaatattctttggaaaaatttggtcgtcccaaatataccaatggtaactctttagtttcaagtggtgaagacattagattactggggagtttatatgaatattattttgatgttatctatttgacttgggggttcgatattttgatgattatttttggaagtaataaagtatggtatgggtacttgataattcctggatttgctatttacaaattgagtaattttattttaccattcattaaaaagaataaatcaaatggctctacaccagaggaacaacaagcagaaactaaacaaaccaattctgctactagtaaacgtcaacaaaaattgcaagctagaagagaaaagggaccagctgttaaatatagatga

SEQ ID NO: 66704 - protein, 181 aa, Candida albicans SC5314
MASASAKKLAVANTNILNQLLIISASINIIVFLIISIFHRPSSYKPWIIFSIPSIFLQYSLEKFGRPKYTNGNSLVSSGEDIRLSGSLYEYYFDVIYLTWGFDILMIIFGSNKVWYGYLIIPGFAIYKLSNFILPFIKKNKSNGSTPEEQQAETKQTNSATSKRQQKLQARREKGPAVKYR

SEQ ID NO: 66705 - DNA, 531 bp, Aspergillus niger
  CDS (1)..(531)
atggctcaaaaagccgccaaaaccctcgccgcgcgcaacgcgtccctcctcacccgcacccacctcatcagtttcgccctacacttcctcttcctcgctctccactggctcttcaaccgccctcgctctctaaccccctacttcacactcgcctgcccgaccctcatcatcgaattctacctcgaacggctcggccgcccggtctacaaccccgctgatggatccctccgctctcccggagaggatctcggcgccgcaggactgacggaatacatgtgggacgtgctgtactggacgtgggggtgcattggtgctgcctgcttgtttggcgatcgtgcttggtggttgtggatcgtcgtgccagtgtattcggtgtggttggcgtacagtacctttatgggcatgaagagtgggttggcagggatgggtggtgctggtgcgggtgctgggcaggagcaaggaggtgcggcggagagtaagaggcagaagaagatggagaagaggggtgccaggggggtgcagtatcgctga

SEQ ID NO: 66706 - protein, 176 aa, Aspergillus niger
MAQKAAKTLAARNASLLTRTHLISFALHFLFLALHWLFNRPRSLTPYFTLACPTLIIEFYLERLGRPVYNPADGSLRSPGEDLGAAGLTEYMWDVLYWTWGCIGAACLFGDRAWWLWIVVPVYSVWLAYSTFMGMKSGLAGMGGAGAGAGQEQGGAAESKRQKKMEKRGARGVQYR

SEQ ID NO: 66707 - DNA, 519 bp, Pichia angusta
  CDS (1)..(519)
atggctggagcttctgacaaaaagcaggccgcggccaactcgtctatcttgaagcagctgcacctggcctcggttgtggtgaacatggtggctttactggcgctttttcttttgcacaggcccgcagcgaaaaagtactattttatattcagtctcccaggcttggggtgtcaatatgtgctcgaaaaggtgggcaggcccaaataccacatcaatccgcagggctacagcgttttatcttctgctggacaggatctacaacaacagggtctgacagagtacatgatcgacattgtttatttgacattgataattgacgttttgatgatacttttcggttccaacaaggcctggctgcttctgctggctgtgcctgcctacgctggatacaaattgaagggtttcatttcgccgttctttgctcgcagacagaaagaggagcaaatagaaacagagcccgtgaaaagcaagcggcagcaaaagctggaaaacaggaagaacaaggttagatacaggtga

SEQ ID NO: 66708 - protein, 172 aa, Pichia angusta
MAGASDKKQAAANSSILKQLHLASVVVNMVALLALFLLHRPAAKKYYFIFSLPGLGCQYVLEKVGRPKYHINPQGYSVLSSAGQDLQQQGLTEYMIDIVYLTLIIDVLMILFGSNKAWLLLLAVPAYAGYKLKGFISPFFARRQKEEQIETEPVKSKRQQKLENRKNKVRYR

SEQ ID NO: 66709 - DNA, 525 bp, Zea mays
  CDS (1)..(525)
atggcgaagcagggggcgaagaagatgaaggacgagaacaagaagcgcttggacttactcctgcgcatcatcctcatatccaacgttatttacatagtggtgaggatggctataatgcattcatccttcacctggaagcattggattggccttatggtaacatcggccggatattttcttccatataagcaactcgccagtatggcaaagccagtttactctgataacggagaactactggatggtggcttcgatttgagcactggtggggtttgcgagtatttatatgatgtgatctacatcactgtctttgtgcaattgatgtctatcatttctgaaaaattttggtggacatatttagtgattccagcttttgctggatacaagatttccggcttgttgagaggagcatttttcagtggtggctcagagggtgaagttgaagatgagaagacccgaaagaaaagggagaagatggagaagaaggcatctagggggaagatgatcaaaactaggactcgctga

SEQ ID NO: 66710 - protein, 174 aa, Zea mays
MAKQGAKKMKDENKKRLDLLLRIILISNVIYIVVRMAIMHSSFTWKHWIGLMVTSAGYFLPYKQLASMAKPVYSDNGELLDGGFDLSTGGVCEYLYDVIYITVFVQLMSIISEKFWWTYLVIPAFAGYKISGLLRGAFFSGGSEGEVEDEKTRKKREKMEKKASRGKMIKTRTR

SEQ ID NO: 66711 - DNA, 22 bp, Artificial sequence
  primer
atggctggcaaagcagggagga

SEQ ID NO: 66712 - DNA, 28 bp, Artificial sequence
  primer
ttaacgatacttgtacttaattttagag

SEQ ID NO: 66713 - protein, 179 aa, Artificial sequence
  consensus sequence
  Variant (3)..(6): Xaa in position 3 to 6 is any amino acid
  Variant (9)..(12): Xaa in position 9 to 12 is any amino acid
  Variant (14)..(59): Xaa in position 14 to 59 is any amino acid
  Variant (60)..(64): Xaa in position 60 to 64 is any or no amino acid
  Variant (66)..(70): Xaa in position 66 to 70 is any amino acid
  Variant (72)..(72): Xaa in position 72 is any amino acid
  Variant (74)..(81): Xaa in position 74 to 81 is any amino acid
  Variant (82)..(88): Xaa in position 82 to 88 is any or no amino acid
  Variant (90)..(90): Xaa in position 90 is any amino acid
  Variant (93)..(94): Xaa in position 93 to 94 is any amino acid
  Variant (95)..(95): Xaa in position 95 is any or no amino acid
  Variant (97)..(98): Xaa in position 97 to 98 is any amino acid
  Variant (99)..(99): Xaa in position 99 is any or no amino acid
  Variant (102)..(103): Xaa in position 102 to 103 is any amino acid
  Variant (105)..(106): Xaa in position 105 to 106 is any amino acid
  Variant (108)..(120): Xaa in position 108 to 120 is any amino acid
  Variant (121)..(122): Xaa in position 121 to 122 is any or no amino acid
  Variant (124)..(124): Xaa in position 124 is any amino acid
  Variant (126)..(128): Xaa in position 126 to 128 is any amino acid
  Variant (130)..(131): Xaa in position 130 to 131 is any amino acid
  Variant (133)..(136): Xaa in position 133 to 136 is any amino acid
  Variant (139)..(162): Xaa in position 139 to 162 is any amino acid
  Variant (163)..(172): Xaa in position 163 to 172 is any or no amino acid
  Variant (174)..(176): Xaa in position 174 to 176 is any amino acid
  Variant (178)..(178): Xaa in position 178 is any amino acid
MAXXXXKKXXXXNXXXXXXXXXXXXXXXXXXXXXXXXXXXXXXXXXXXXXXXXXXXXXXXXXXXLXXXXXPXYXXXXXXXXXXXXXXXGXDLXXXGXXXEYXXDXXYXXXXXXXXXXXXXXXKXWXXXLXXPXXXXYKXXXXXXXXXXXXXXXXXXXXXXXXXXXXXXXXXXKXXXKXE

SEQ ID NO: 66714 - protein, 18 aa, Artificial sequence
  protein pattern
  Variant (2)..(2): Xaa in position 2 is any amino acid
  Variant (3)..(3): Xaa in position 3 is any or no amino acid
  Variant (5)..(6): Xaa in position 5 to 6 is any amino acid
  Variant (7)..(7): Xaa in position 7 is any or no amino acid
  Variant (9)..(9): Xaa in position 9 is Ala, Ile, Leu or Val
  Variant (10)..(10): Xaa in position 10 is any amino acid
  Variant (12)..(12): Xaa in position 12 is Ala, Gly or Ile
  Variant (13)..(13): Xaa in position 13 is Phe or Tyr
  Variant (14)..(14): Xaa in position 14 is Ala, Gly, Ile or Val
  Variant (15)..(15): Xaa in position 15 is any amino acid
  Variant (18)..(18): Xaa in position 18 is Ile or Leu
KXXWXXXLXXPXXXXYKX

SEQ ID NO: 66715 - DNA, 660 bp, Saccharomyces cerevisiae
  CDS (1)..(660)
atgaaccaagcaatagacttcgcacaagcaagcattgactcctacaagaagcacggcattctggaggatgtaattcatgacacaagctttcaaccctccgggatacttgccgtagagtactcatcaagtgcacctgttgccatgggtaacacgctgcccactgagaaggcacgttccaagccccaattccagttcacgttcaataagcaaatgcaaaaaagcgtaccacaggcgaatgcgtacgttccccaagacgacgatttgttcacactggtaatgaccgatccggatgctccctctaagacagatcacaagtggtctgaattctgccacttggtagaatgcgacttaaagctgttgaatgaggctactcacgagacctccggagcaaccgaattttttgcatcagagttcaatacgaagggctcgaacacactaatagaatatatgggaccagctccacccaagggatccggtccccacagatatgttttcttgttatataagcagcctaagggcgtggactcatctaagttctcgaaaattaaggatagaccgaactggggttacggcacccctgccaccggtgttggcaaatgggctaaggaaaacaacctgcaactagttgcctccaatttcttctatgcggaaacgaaatag

SEQ ID NO: 66716 - protein, 219 aa, Saccharomyces cerevisiae
MNQAIDFAQASIDSYKKHGILEDVIHDTSFQPSGILAVEYSSSAPVAMGNTLPTEKARSKPQFQFTFNKQMQKSVPQANAYVPQDDDLFTLVMTDPDAPSKTDHKWSEFCHLVECDLKLLNEATHETSGATEFFASEFNTKGSNTLIEYMGPAPPKGSGPHRYVFLLYKQPKGVDSSKFSKIKDRPNWGYGTPATGVGKWAKENNLQLVASNFFYAETK

SEQ ID NO: 66717 - DNA, 774 bp, Drosophila melanogaster
  CDS (1)..(774)
atgatttgtatgcggctccgggtgttgcgtaatctcaatcgcagcgctttaaatggatttagaaaagattacatccgatcaaccggtgtgaatgtcaattattcagctgtcaactttccggccgccattagaacgctgaaaacttttagcaattctatcctaaccaaggaaccgaaaccaatctttgcatttatcgcatctcagcggcagtattcttgcgaaaaagtaggcaaaacaatggaggagcactgcgtagttccggatgtgatcgccaaggcaccggcgcagacagctgtggtggaatatcccggcgatattgtcgtgaagccgggtcaggtcctgacccccacccaggtgaaggatgagccgtgcgtgaaatgggaggcggacgccaataagctgtacaccctctgcatgaccgatccggatgcgcccagtcgcaaggatcccaagtttagggagtggcaccattggctggtgggcaacatacccggtggagatgtcgccaagggcgaggttctctccgcctacgtgggatccgggcctccaccagacaccggactccatcgttacgttttcctgatctacgagcagcggtgcaagctcacattcgacgagaagcgactgcccaataacagcggagatggacgcggtggcttcaaaatcgccgagttcgccaagaagtacgccctcggcaatcccattgccggtaacctctaccaggctgagtacgacgactatgtgcccatcctctacaagcagctgggcgcttag

SEQ ID NO: 66718 - protein, 257 aa, Drosophila melanogaster
MICMRLRVLRNLNRSALNGFRKDYIRSTGVNVNYSAVNFPAAIRTLKTFSNSILTKEPKPIFAFIASQRQYSCEKVGKTMEEHCVVPDVIAKAPAQTAVVEYPGDIVVKPGQVLTPTQVKDEPCVKWEADANKLYTLCMTDPDAPSRKDPKFREWHHWLVGNIPGGDVAKGEVLSAYVGSGPPPDTGLHRYVFLIYEQRCKLTFDEKRLPNNSGDGRGGFKIAEFAKKYALGNPIAGNLYQAEYDDYVPILYKQLGA

SEQ ID NO: 66719 - DNA, 564 bp, Drosophila melanogaster
  CDS (1)..(564)
atgtccgattccaccgtgtgcttctctaagcacaagatcgtgccggatatcctgaagacgtgtcctgccactttgcttacggtgacttatggtggtggacaggtggtggatgtaggcggtgaattgacacccacgcaagtgcagagccagccaaaggtgaaatgggatgcagatccgaatgccttttacacgctcctcctgaccgatccggatgcgcccagtcgcaaggagcccaagttccgcgagtggcaccactggctggtggtcaatattccagggaaccaagtcgagaacggcgtagttttgaccgaatatgtgggtgcaggtccgccgcaaggcacggggcttcatcgttacgtcttcctggtcttcaaacagccccaaaagctcacttgcaacgagcccaaaatcccaaaaacgagcggcgacaagcgagccaatttcagcacctccaagttcatgagcaagtacaagctgggagatcccattgccggaaacttttttcaggcacagtgggacgactatgtgcccaagttatacaagcaactatctggcaagaagtag

SEQ ID NO: 66720 - protein, 187 aa, Drosophila melanogaster
MSDSTVCFSKHKIVPDILKTCPATLLTVTYGGGQVVDVGGELTPTQVQSQPKVKWDADPNAFYTLLLTDPDAPSRKEPKFREWHHWLVVNIPGNQVENGVVLTEYVGAGPPQGTGLHRYVFLVFKQPQKLTCNEPKIPKTSGDKRANFSTSKFMSKYKLGDPIAGNFFQAQWDDYVPKLYKQLSGKK

SEQ ID NO: 66721 - DNA, 609 bp, Apis mellifera
  CDS (1)..(609)
atgaaatactttacgatattaggaattctcgcctgcagtgtccacattatcacggctaaggatactcgtacagaatttgaaaaagcgctgattgtaccgaatatattagacacagcgccgacggagaaaatcgaggtgaaatatggaaacaagagtgttgatttgggaaatgaactaactccaacagaaacacaacagattccagaaattcattacaaacacgaaggaggtgtactttacacgttagtaatgacagatcctgatgtgccgactagaaaaggatacaatagagaatttcgacactggttagtaggaaatattcccgaagagaatattgccaaaggagaaatattggccgaatacgttggtccagcgccgccaaaaaatagtggaaaacatcggtacgtcttccttgtttacaaacagaatcaaggatccattacgttcgacgagagaaggttaagcaacagagatggcccacagcggaaacggttcaacgtaaagaagttcgcagaaaaatataatctggagggtccattagcgggaaatttcatgagagttgaatacgatgataatgtgcccgcgtacgcgaagctgttaggattttga

SEQ ID NO: 66722 - protein, 202 aa, Apis mellifera
MKYFTILGILACSVHIITAKDTRTEFEKALIVPNILDTAPTEKIEVKYGNKSVDLGNELTPTETQQIPEIHYKHEGGVLYTLVMTDPDVPTRKGYNREFRHWLVGNIPEENIAKGEILAEYVGPAPPKNSGKHRYVFLVYKQNQGSITFDERRLSNRDGPQRKRFNVKKFAEKYNLEGPLAGNFMRVEYDDNVPAYAKLLGF

SEQ ID NO: 66723 - DNA, 558 bp, Strongylocentrotus purpuratus
  CDS (1)..(558)
atggaatgctacagtgagcacgagattgtcccacacgtgttggatgcaccaccgcccgccatcttgaaagtggaatggaacgatgacgtcaaatgcatgcttggtaatgaacttactccaacccaagtacaaaagcaaccgtcggttttggaatgggagacggaggaggacgccctctataccattctcttcacagatcccgattcgcctactcgaaccgatccgaaccgagtcgaggtcgttcattggctggttttcaatatacctggttgtgacgtcagcaagggacttgtccacgctgcttacattgaatcaggtcccagggagggatcaggattccataggtacgtttacctcgtctacaagcagtctcaacccatcacccctaatgattcctaccgcccccgtagccctgagagacgcaagccctggaacacgagaaaattcgtcgaggagtacggcctaggggcgcccatcgcgggcaacttttacattgctcagtttgacaattatgtgacccagttcagagcggagatgatggctgctggatcaaagtaa

SEQ ID NO: 66724 - protein, 185 aa, Strongylocentrotus purpuratus
MECYSEHEIVPHVLDAPPPAILKVEWNDDVKCMLGNELTPTQVQKQPSVLEWETEEDALYTILFTDPDSPTRTDPNRVEVVHWLVFNIPGCDVSKGLVHAAYIESGPREGSGFHRYVYLVYKQSQPITPNDSYRPRSPERRKPWNTRKFVEEYGLGAPIAGNFYIAQFDNYVTQFRAEMMAAGSK

SEQ ID NO: 66725 - DNA, 567 bp, Anopheles gambiae str. PEST
  CDS (1)..(567)
atgtcggactttgtgcgcgatatgcgcaaccacaagatagtgccggacgtggtgccggtcccgcccgagagcctcctgcacgtgacctatcccggcgggctgcgcgtcaaccttggcaacatcctcaccccgaccgaggtgaagcacgtgccggaggtggcctggccggaggcggaaccggacgcctactacgcgctcgtgctgaccgatccggacgcgccgagccggacggcgcccaagtttcgcgaatggcaccactggctggtggtgaacatacccggcatggacctggcgaagggggacacgctgtcggattacattggcgctgcgccgccccgcaaaactggcctccatcggtacgtgtttctgctgtaccggcagaacgagcggatctactacaaggagtcacggctaagcacccagggtcggggcaagttctccacgcacaagttttcggaaaagtacgagctggggctgccggtggcggggaacttcttccaggcccagttcgatgactacgtgccgaagctgtaccgtcagctgggacactttcaaaacgcattctaa

SEQ ID NO: 66726 - protein, 188 aa, Anopheles gambiae str. PEST
MSDFVRDMRNHKIVPDVVPVPPESLLHVTYPGGLRVNLGNILTPTEVKHVPEVAWPEAEPDAYYALVLTDPDAPSRTAPKFREWHHWLVVNIPGMDLAKGDTLSDYIGAAPPRKTGLHRYVFLLYRQNERIYYKESRLSTQGRGKFSTHKFSEKYELGLPVAGNFFQAQFDDYVPKLYRQLGHFQNAF

SEQ ID NO: 66727 - DNA, 600 bp, Nasonia vitripennis
  CDS (1)..(600)
atgaagcttctgacagtagggctctttgttttcgcatggagtttcgcagcagccgatgttgcatcggagttaaaagctgcaaaaattgacccagagctcatcgacaatgccccaaatgagaccatcgagatcaagtacggagataaagaggtgaagctgggaaacgagttcactccatcggagaccaaagagatacccgaggtgcattacaaacatgaaggcggagttctgtacaccctcgttatgacagatccagacgtcccggttcgtggttacaatcgcgaatggcagcactgggtggtcggaaacatccctgaagacaaagtggccaagggagaagtattaaccgagtacgttgcgccggcgccttcgaaaactaccgggctccatcgcttcgtcttcctcctctacaagcagaaccagggctctatcacttttgacgaaagacgcattggaaaccgagacaagaggaggaaccgattctctactaagaagttcgccgagaaatacaatctggaagggccgattgccggcaactacatgaaggcaaagtacgacgactacgttcctacagtcatgaaacaacttggaattttttga

SEQ ID NO: 66728 - protein, 199 aa, Nasonia vitripennis
MKLLTVGLFVFAWSFAAADVASELKAAKIDPELIDNAPNETIEIKYGDKEVKLGNEFTPSETKEIPEVHYKHEGGVLYTLVMTDPDVPVRGYNREWQHWVVGNIPEDKVAKGEVLTEYVAPAPSKTTGLHRFVFLLYKQNQGSITFDERRIGNRDKRRNRFSTKKFAEKYNLEGPIAGNYMKAKYDDYVPTVMKQLGIF

SEQ ID NO: 66729 - DNA, 630 bp, Nasonia vitripennis
  CDS (1)..(630)
atgttcgtgatttctctcggcgcaacttccctcattgcaaaaagaccattattgaatattggagcacgctttttggcaactatggcagatgctctaaagactcatgaagttataccggatgtgattgatacggtacctccagcaatcgttaaagtatcctatcctagtggagtttccgtagacatcggcaaggaacttacacctacccaagtcaaagatcaaccatctgttgagtgggatgctgatagctcaagctattatactctttgcatgactgatcctgatgcaccaagccgcaaggacccgaaattccgcgaatggcaccactggcttgtcaccaacattccaggaaaggatgtatccaaaggagatgtcttatccgactacattggatctggacccccaccagataccggtcttcaccggtatgtcttcctggtatacaaacagccgagcaaaataacttttgatgagaagcgtttaacaaatcgcagtggagacggtcgcaacaatttctccatcaagaaattcgcgcaaaagtataatttgggaaatccaattgctggaagcatgtatcaagctgcttttgatgattatgtacctaaattgtacaaacagctagaaggatag

SEQ ID NO: 66730 - protein, 209 aa, Nasonia vitripennis
MFVISLGATSLIAKRPLLNIGARFLATMADALKTHEVIPDVIDTVPPAIVKVSYPSGVSVDIGKELTPTQVKDQPSVEWDADSSSYYTLCMTDPDAPSRKDPKFREWHHWLVTNIPGKDVSKGDVLSDYIGSGPPPDTGLHRYVFLVYKQPSKITFDEKRLTNRSGDGRNNFSIKKFAQKYNLGNPIAGSMYQAAFDDYVPKLYKQLEG

SEQ ID NO: 66731 - DNA, 561 bp, Nasonia vitripennis
  CDS (1)..(561)
atggcgactgatatttcatcgagttttaaatcctctgaaattgtgcccgatgttgtgaatacgcctccgaaagagttactttccgtaacgtacaatgatcgaccggtagaattcagtatggaattaacaccaacgcaagtgaaagatgctccggcagtcacgtggtctcccgaagcttctaccttctatacactctgcatgaccgatccagacgcgacgagtcgcaagaatccgatacttcgagaggtccttcactggctggtcacgaacatacccggaaacgatgtaagccagggagagaatttggcggagtatcgaggctctggtccacccgagggaagcggtcttcatcgctacgttttcctgctgtacaagcagcccggaaagctgagcttcgacggcgagaaacggatcagcaatagatcgagagatggacgcttgaagttctcgattcgaaaatttgccgacaagtacggactcggcgaaccgattgctggtaacatgtatcaggcgcagtacgatgattacgtaccgatgctccatgcgcagtatactgattga

SEQ ID NO: 66732 - protein, 186 aa, Nasonia vitripennis
MATDISSSFKSSEIVPDVVNTPPKELLSVTYNDRPVEFSMELTPTQVKDAPAVTWSPEASTFYTLCMTDPDATSRKNPILREVLHWLVTNIPGNDVSQGENLAEYRGSGPPEGSGLHRYVFLLYKQPGKLSFDGEKRISNRSRDGRLKFSIRKFADKYGLGEPIAGNMYQAQYDDYVPMLHAQYTD

SEQ ID NO: 66733 - DNA, 621 bp, Nasonia vitripennis
  CDS (1)..(621)
atgaagctccttctgactagtgtactcctctgcagcttcggcattgttttcggctccaaggttgcatcgaaatttaaatcatcagaaattgtgccagatgttttgacaactgcacctaatgatttactgtcggtgagcttcgaagataaagtgttacgatttattggagaggagctaacgcctacgcaagtaaaagatgtcccgagcgtcgcttggaagtctgaagcctccggtttctacactatttgcatgaccgatccagacgccccaagtcgcagtgagccgaaattccgcgagttccttcactggctggtggtgaacgtgccaggcgaggacatcgccaagggcgacaccctggcagcctacgtcggctcgggtcctcccaaggataccggtctgcaccgctacgtgctgttagcctacaaacaaccggccggcaaaatcgacgtcagcgaggagaagcgtatccccaacaactcgcgagacggtcggccgaaattctcgatccagaagttcgccgataagtacaaactaggtgcgccgatcgctggcaatatgtaccaggcggagtacgatgattacgtgcccaatatcagcaagcaactcggcggaggtgcttag

SEQ ID NO: 66734 - protein, 206 aa, Nasonia vitripennis
MKLLLTSVLLCSFGIVFGSKVASKFKSSEIVPDVLTTAPNDLLSVSFEDKVLRFIGEELTPTQVKDVPSVAWKSEASGFYTICMTDPDAPSRSEPKFREFLHWLVVNVPGEDIAKGDTLAAYVGSGPPKDTGLHRYVLLAYKQPAGKIDVSEEKRIPNNSRDGRPKFSIQKFADKYKLGAPIAGNMYQAEYDDYVPNISKQLGGGA

SEQ ID NO: 66735 - DNA, 576 bp, Anopheles gambiae str. PEST
  CDS (1)..(576)
atgtcggactttgtgcgcgatatgcgcaaccacaagatagtgccggacgtggtgccggtcccgcccgagagcctcctgcacgtgacctatcccggcgggctgcgcgtcaaccttggcaacatcctcaccccgaccgaggtgaagcacgtgccggaggtggcctggccggaggcggaaccggacgcctactacgcgctcgtgctgaccgatccggacgcgccgagccggacggcgcccaagtttcgcgaatggcaccactggctggtggtgaacatacccggcatggacctggcgaagggggacacgctgtcggattacattggcgctgcgccgccccgcaaaactggcctccatcggtacgtgtttctgctgtaccggcagaacgagcggatctactacaaggagtcacggctgtcgaacagaagcacccagggtcggggcaagttctccacgcacaagttttcggaaaagtacgagctggggctgccggtggcggggaacttcttccaggcccagttcgatgactacgtgccgaagctgtaccgtcagctgggacactttcaaaacgcattctaa

SEQ ID NO: 66736 - protein, 191 aa, Anopheles gambiae str. PEST
MSDFVRDMRNHKIVPDVVPVPPESLLHVTYPGGLRVNLGNILTPTEVKHVPEVAWPEAEPDAYYALVLTDPDAPSRTAPKFREWHHWLVVNIPGMDLAKGDTLSDYIGAAPPRKTGLHRYVFLLYRQNERIYYKESRLSNRSTQGRGKFSTHKFSEKYELGLPVAGNFFQAQFDDYVPKLYRQLGHFQNAF

SEQ ID NO: 66737 - DNA, 633 bp, Candida glabrata CBS 138
  CDS (1)..(633)
atgaactacagcgtcaacactacacaggctattgtagaccctttgaagaagcacgaggtcatccccgatgtggttcctgactttgagccacaggggttcctcaccattgagtacccacacagcaactccgtaaccctcggcaacgacatcagcgtcccaatggccagctcgctgcccgagatcacttacacttccacctccggcgtgagcgacccggacaacgacaggttcatcgtggtcctcacagacccggacgcgccttcccgcacggaccacaagtggtccgagtactgccactacgtcagaacagacatacagctggtgcctaacaacaagctcgcctcggctgcaggtgccgccggcggcgtctcccgcgagtttgtctgcgccgacctcaacgcaaacggcaacaccctggtggagtacatggggccggcacctcctaagggcaccggcaagcacaggtacgtgttccttctgtacagacagaacgcgccctcttcccagctgacaaagatcaaggatagagccaactggggatacggcgagcctgccgtcggcgccgacaagtgggccaaggagaacaagctagagcttttggctgctaacttcttcttcgccgaaaacgcttaa

SEQ ID NO: 66738 - protein, 210 aa, Candida glabrata CBS 138
MNYSVNTTQAIVDPLKKHEVIPDVVPDFEPQGFLTIEYPHSNSVTLGNDISVPMASSLPEITYTSTSGVSDPDNDRFIVVLTDPDAPSRTDHKWSEYCHYVRTDIQLVPNNKLASAAGAAGGVSREFVCADLNANGNTLVEYMGPAPPKGTGKHRYVFLLYRQNAPSSQLTKIKDRANWGYGEPAVGADKWAKENKLELLAANFFFAENA

SEQ ID NO: 66739 - DNA, 594 bp, Kluyveromyces lactis NRRL Y-1140
  CDS (1)..(594)
atgtttgcttcaattaattctgccaaagctatcaaagattcccttacttctcatggagtgatctctaaagtacttccagatttctctaataagggttccaccagtttggtaatcgaatacgcttctaagcatcctgtcgcattgggtaacactttatctatcgacggtactcaggagaaaccggaaattaaagtcgctggtggaaacgatgctcagctagatacagacgctctgtattccttgtgtttgactgatccagatgcaccatctaattccgataacaaatggtctgagtactgtcattatttagagactaacatcaagctaagtctggacccagatactccaatgtcgctggacttaaaggcaggcgatgtgcaattaccgtacgtcggaccagctccaccaaagggcaccggtccacaccgctacgtttggattcttgctcagcaatccccagataaaaaaccggaatctgtcagtgatcggcccaattgggggttcaagaaacctggtaccggtttccagcattatgctgaattgttcaacttgactccagttgcggtaaactttttctacgctgagaataaatga

SEQ ID NO: 66740 - protein, 197 aa, Kluyveromyces lactis NRRL Y-1140
MFASINSAKAIKDSLTSHGVISKVLPDFSNKGSTSLVIEYASKHPVALGNTLSIDGTQEKPEIKVAGGNDAQLDTDALYSLCLTDPDAPSNSDNKWSEYCHYLETNIKLSLDPDTPMSLDLKAGDVQLPYVGPAPPKGTGPHRYVWILAQQSPDKKPESVSDRPNWGFKKPGTGFQHYAELFNLTPVAVNFFYAENK

SEQ ID NO: 66741 - DNA, 639 bp, Debaryomyces hansenii CBS767
  CDS (1)..(639)
atgaatttgatgacaatttcccaatctttggatgaatcatataccaagcataagatcattcctgatgtggttgataagtttgacactcaaggtttgttgacaattgagtacaatgaacaagaccatgttgcgttaggaaataccttaaaagtggaaaatactcagcaccaccctgttattcagtttacccttaattctccaggccaagagaatgactttgaaatttcgaataatgataaattcacgttggttttgaccgatccagatgcaccatctcataaggaccataagtggtctgaatatgctcattggattgttaccgatttaccattgaatgctaatagtaacgacgttgagtctgcagaatccttgactactgttttggattactcaaagggtaaagaactcttgtcttaccaaggtccagcaccaccacctaagaccggtaagcatcgttatgtatttttattatttagacaggatccatcggtatctaagtttgagactccaaaagatagacctaactggggcactggtactccaagttcaggtgtcagagattggataaagaagaatgggcccgaactgaagttattgggggtcaatttcttctacgcacaaaatgatactcaagaataa

SEQ ID NO: 66742 - protein, 212 aa, Debaryomyces hansenii CBS767
MNLMTISQSLDESYTKHKIIPDVVDKFDTQGLLTIEYNEQDHVALGNTLKVENTQHHPVIQFTLNSPGQENDFEISNNDKFTLVLTDPDAPSHKDHKWSEYAHWIVTDLPLNANSNDVESAESLTTVLDYSKGKELLSYQGPAPPPKTGKHRYVFLLFRQDPSVSKFETPKDRPNWGTGTPSSGVRDWIKKNGPELKLLGVNFFYAQNDTQE

SEQ ID NO: 66743 - DNA, 585 bp, Yarrowia lipolytica CLIB122
  CDS (1)..(585)
atgcctttgattactatttccgccgccctgaccgagggattcaagaagcacgaggtcgtccccgacgtcatcgacgagtttgaccccaacactctcctcgagatcacctacggaggtgagaacgtggttgccgtcggaaacaccctggccgtcgctgacacccagcacaagccctccatccacgcctccttccccaaggacaccgagggaacctacactctggttctgaccgaccccgatgctccctctcgaaccgacaacaagtggtccgagtactgccactacattgtgactggtctcaagcccggcgttgttgccgaggccgagggtgctgctgtcgagctcgatctgtccaagggcaaggagctcattccctacatgggccctggacccccaccaaagaccggcaagcaccgatacgtctttgtgctttacaaggagggggccaagtctcccgaggctcctgctgaccgacccacctggggcaccaacgtccctggctctggaacccgggagtgggccaagaagaacgatctgaccctggtcacctccaacttcttctttgctcagaacactgagcagtaa

SEQ ID NO: 66744 - protein, 194 aa, Yarrowia lipolytica CLIB122
MPLITISAALTEGFKKHEVVPDVIDEFDPNTLLEITYGGENVVAVGNTLAVADTQHKPSIHASFPKDTEGTYTLVLTDPDAPSRTDNKWSEYCHYIVTGLKPGVVAEAEGAAVELDLSKGKELIPYMGPGPPPKTGKHRYVFVLYKEGAKSPEAPADRPTWGTNVPGSGTREWAKKNDLTLVTSNFFFAQNTEQ

SEQ ID NO: 66745 - DNA, 636 bp, Anopheles gambiae str. PEST
  CDS (1)..(636)
atggcactgctactccgtgtgaccgttgcgtgcggtgcagttctagcgctggtgaccgttcgcggtcaagcggcgaacccaacaaccgaagcgtttgggcgcaacgaaatcgtgccggatctgatcgacgtcgcaccggagcaaacgatcaagatcacctacccccagtcggacgtggaagtgtcgctcggcaaccagctcacgccgacccaggtaaaagcccgcccgaaactgtgctgggaggtggaaccgagcgccctctacacgctgctgatggccgatccagatgcaccgtcgcgcagcaatccggagatgcgcagctggaaacactggctggtgggtaacatccccggcgcggacgtcgatgcgggcgacgtgctggccgattacgtcggttccggaccgccgcagggtaccgggctgcaccggtacgtgttcctcgtctacaagcagccgtcccggattgtgtttaacgaaaccgtgctcagcagcaggaacccgaaccgtggcaagtggaatccggccgagtttgtgaaggagtacgagctgggcgtcccggttgccggcaacttctaccaggcccagtacgacgactacgtcccggagctgtacgccacctttacggacactgcgtag

SEQ ID NO: 66746 - protein, 211 aa, Anopheles gambiae str. PEST
MALLLRVTVACGAVLALVTVRGQAANPTTEAFGRNEIVPDLIDVAPEQTIKITYPQSDVEVSLGNQLTPTQVKARPKLCWEVEPSALYTLLMADPDAPSRSNPEMRSWKHWLVGNIPGADVDAGDVLADYVGSGPPQGTGLHRYVFLVYKQPSRIVFNETVLSSRNPNRGKWNPAEFVKEYELGVPVAGNFYQAQYDDYVPELYATFTDTA

SEQ ID NO: 66747 - DNA, 780 bp, Candida albicans SC5314
  CDS (1)..(780): transl_table=12
atgtttaatagatcaattcgtatatctagaagcccactattacgatctaggactatactaccaagaacatttgttactaatacacatagattatcttacaggctcaaacaacgaaacccttctacaattttcaagcaatcagcaatgactttaattactatttcccaatccttggacgaagcttacaccaagcacaaagttatccctgaagttgttgatcaatttgacactcaaggtttgttgtcaattgaatatggcccaactgaattggtcactttgggtaacaccctttctgttgaaggtacccaagaagttccaaaaatccaattgactcttaactcaccaactgaagatggtaagattgaatcaattagtgaaaatgacaaattcattcttgtcatgactgatccagatgccccttctaacagtgaccacaagtggtcagaatatttgcattggttagtgacagacttgaaattgccacacaccaagaatgaagatggcgagccagaaatcagtcattttattgacgtcaaagaaggaagagaattggttccatacatgggtccaggaccaccaccaaagaccggaaaacatcgttatgtgtttttattgtacaaacaagatccaaatgctggtgaattgactgctccaaaagatagaccaaactggggtactggagtaccaagcagtggtgtcaaagattggattgaaaagaatgcaccaaactcaaaattgttaagtgtcaactttttctttgctcaaaacgaagacaattaa

SEQ ID NO: 66748 - protein, 259 aa, Candida albicans SC5314
MFNRSIRISRSPLLRSRTILPRTFVTNTHRLSYRLKQRNPSTIFKQSAMTLITISQSLDEAYTKHKVIPEVVDQFDTQGLLSIEYGPTELVTLGNTLSVEGTQEVPKIQLTLNSPTEDGKIESISENDKFILVMTDPDAPSNSDHKWSEYLHWLVTDLKLPHTKNEDGEPEISHFIDVKEGRELVPYMGPGPPPKTGKHRYVFLLYKQDPNAGELTAPKDRPNWGTGVPSSGVKDWIEKNAPNSKLLSVNFFFAQNEDN

SEQ ID NO: 66749 - DNA, 543 bp, Strongylocentrotus purpuratus
  CDS (1)..(543)
atggccagtaagttcagtgagcatggagtcgtaccagacgttgttgatcaggatcctgctgccatagcagcagtcacatgggcgtcaggggtggaggctaatctaggaaatattctcactcctacagttgtgaaggatgcaccaacaatgacatggcctactgaagagggcgctctttacacagtggtgatgacagatccagatgctccgagccgtgcggatcccaagttccgtgagtggaggcattggatagtggtcaacgtccctggaacagatgtcagcaagggtcttgtgtatgctccatacattggctcaggacctcccaaagacacaggtttacatcgctatgtgttgctagtgtacaagcaatcaggtgagctccagctgcaggatccagtgctacaaagaaccactaaagatcggggcgctaccaagacaagggagtttgttgccaagtacaacctaggcaaccctatggcggggaacttctatcaggccgaatgggatgactactgcacacaactttataaggagattgcatag

SEQ ID NO: 66750 - protein, 180 aa, Strongylocentrotus purpuratus
MASKFSEHGVVPDVVDQDPAAIAAVTWASGVEANLGNILTPTVVKDAPTMTWPTEEGALYTVVMTDPDAPSRADPKFREWRHWIVVNVPGTDVSKGLVYAPYIGSGPPKDTGLHRYVLLVYKQSGELQLQDPVLQRTTKDRGATKTREFVAKYNLGNPMAGNFYQAEWDDYCTQLYKEIA

SEQ ID NO: 66751 - DNA, 537 bp, Tribolium castaneum
  CDS (1)..(537)
atggaaaaacacggagttgttcctgatgttgtttctgttgtgccgaaacacgtcgccgaagttcattatccaaaaggtgtgaaagtccagctggggaatacgctaactcccacacaagtcaaggacccgccaactgttaaatgggaggccgaaagtgacgcattctacacgctttgtatgacagatccggatgctccaagtcgcaaagatccgaagttccgggaatggcatcactggctcgttgtgaacattccgggtgatagcattgaaaagggcgaagtcctttcgggatacattggatcagggcctccgaaagggtcaggattgcatcggtacgttttcgtcaattacaagcaaaaggggaagattagttgcaacgagaagcgtttgcccagcaattcgggagacggacgcggcaagttttctattaagaaatttgctgaaaagtatcagctgggggagccgctggcagggaactttttccaagccgagtgggacgattatgtcccgactttgtacaagaaactgggaatgtaa

SEQ ID NO: 66752 - protein, 178 aa, Tribolium castaneum
MEKHGVVPDVVSVVPKHVAEVHYPKGVKVQLGNTLTPTQVKDPPTVKWEAESDAFYTLCMTDPDAPSRKDPKFREWHHWLVVNIPGDSIEKGEVLSGYIGSGPPKGSGLHRYVFVNYKQKGKISCNEKRLPSNSGDGRGKFSIKKFAEKYQLGEPLAGNFFQAEWDDYVPTLYKKLGM

SEQ ID NO: 66753 - DNA, 669 bp, Tribolium castaneum
  CDS (1)..(669)
atgacgacaacagccggcatttttctgtcatttttgcaacttgtgattgtgttctggaaagatcttagcaaaatgtttgctcttagacgaccggtatattctagtcgttttttctcttctgtagcaaaaaatatggaaaaacacggcgtagtcccggatgttgttgatgtggctcccgagaccacagcagaggtaacttatcccagcggcgtcaaggtggagatgggcaacgagttaacccctacccaagtcaaggatgtcccaactgtcaaatggaacgccgataataacgccttgtacaccctttgcatgactgacccagatgcccccagccgcaaggagcctaagtttagagagtggcaccactggttggttggcaacattccaggcggaaatgtcggccaaggggaaaccctgagtgcttacgtcggctctggacccccggaaggcacaggacttcatcgctatgtcttcctcatttacaaacaaagcgggaaaattaacttcgacgagaagcggcttcccaacacttctggagataaccgcggatgcttttccatcagaaagttcgccgagaaatacaaattggggcaaccggtggccggcaacttctaccaagcccaatgggacgactatgtcccaattttgtacaaacagttaggaggttaa

SEQ ID NO: 66754 - protein, 222 aa, Tribolium castaneum
MTTTAGIFLSFLQLVIVFWKDLSKMFALRRPVYSSRFFSSVAKNMEKHGVVPDVVDVAPETTAEVTYPSGVKVEMGNELTPTQVKDVPTVKWNADNNALYTLCMTDPDAPSRKEPKFREWHHWLVGNIPGGNVGQGETLSAYVGSGPPEGTGLHRYVFLIYKQSGKINFDEKRLPNTSGDNRGCFSIRKFAEKYKLGQPVAGNFYQAQWDDYVPILYKQLGG

SEQ ID NO: 66755 - DNA, 564 bp, Tribolium castaneum
  CDS (1)..(564)
atgattataagagcatattacgccgttgcgttcactaaatctcagatagcccccgacgtggtgcacgtcgccccctcgaagctgctcaaagtcgagtacaagaaaaccaacaaggaggtgcacctgggcaacgaactagcccccaaggatgtccgggacgcacccagcgtcacctacagcggggacccccatgccttctacaccctcgttatgaccgacccggacgccccaagccgcaaaaaccccaaagctaaagaatggaaccattggttggtgggcaacatccccggatctgacctttccaaggcccaagttttgactgaatacgtgggtgccgggcccccgaaagacaccggattgcaccgctacgtgttccttttgtacaaacagcccggaaaaatcaccttccaggaagagcacaagagcaacactaatggaaacagagccaaattttcaaccgaaaatttcgcaaagaaatacgggcttggaaacccagtcgctggaaatttctaccaagcgaagtttgacgattcggttcctgctttgcacagccagttgcattaa

SEQ ID NO: 66756 - protein, 187 aa, Tribolium castaneum
MIIRAYYAVAFTKSQIAPDVVHVAPSKLLKVEYKKTNKEVHLGNELAPKDVRDAPSVTYSGDPHAFYTLVMTDPDAPSRKNPKAKEWNHWLVGNIPGSDLSKAQVLTEYVGAGPPKDTGLHRYVFLLYKQPGKITFQEEHKSNTNGNRAKFSTENFAKKYGLGNPVAGNFYQAKFDDSVPALHSQLH

SEQ ID NO: 66757 - DNA, 522 bp, Zea mays
  CDS (1)..(522)
atgtctaggtctgtggagcctctcatagtcgggcgggtgattggagaagttctcgactcctttaacccatgtgtcaagatgatagtaacctacgactcaaacaaacttgtattcaatggccatgagatctacccatcagcaattgtatctaaacctagggtagaggttcaagggggtgatttgcggtctttcttcacattggttatgacagacccagatgttccaggaccaagtgatccatatctaggggagcaccttcattggatcgtgactgatatacctgggacaacagatgcctcctttgggcgagaggtcataagctatgagagcccaagacctaacatcggtatccacaggttcatttttgtgctcttcaagcagaagggtaggcaaactgtaaccgtgccatccttcagagatcatttcaacacccggcagtttgctgaggaaaatgaccttggcctcccagtagctgctgtctacttcaatgcacagagagaaactgcagctaggagacgttga

SEQ ID NO: 66758 - protein, 173 aa, Zea mays
MSRSVEPLIVGRVIGEVLDSFNPCVKMIVTYDSNKLVFNGHEIYPSAIVSKPRVEVQGGDLRSFFTLVMTDPDVPGPSDPYLGEHLHWIVTDIPGTTDASFGREVISYESPRPNIGIHRFIFVLFKQKGRQTVTVPSFRDHFNTRQFAEENDLGLPVAAVYFNAQRETAARRR

SEQ ID NO: 66759 - DNA, 540 bp, Branchiostoma belcheri tsingtauense
  CDS (1)..(540)
atggagaagcacggtgtggtaccagacgtgatcgacgcagcaccgaaaggcgttttggaggttcagtacggagggcagaaggtggaccttgggaacgagctgactccaacccaggtgaaggataagcccacggttctgaagtgggacagcgaaccgggagccttctacaccctcattctaacagatcctgacgcgcccagccgtgccaaccccgagtacagagagaggcaccactggctggtggtcaacatccccggaaatgacgtcagtaagggggaggagctgtctcagttcgttggggcggggccaccccagggaacaggcctgcatcgttacgtctacctggtctacaagcagcctggtaagatctcttgtgaaaacgagcccaaactgaccaacacttctggggaaaacagggggaagtttagcgctcgtgacttcgccaagaagtacaatctgggcgcgccagtggcgggaaacctgttccaggcccagtatgacgactacgtgcccatcctctacaaacaactcggcttctaa

SEQ ID NO: 66760 - protein, 179 aa, Branchiostoma belcheri tsingtauense
MEKHGVVPDVIDAAPKGVLEVQYGGQKVDLGNELTPTQVKDKPTVLKWDSEPGAFYTLILTDPDAPSRANPEYRERHHWLVVNIPGNDVSKGEELSQFVGAGPPQGTGLHRYVYLVYKQPGKISCENEPKLTNTSGENRGKFSARDFAKKYNLGAPVAGNLFQAQYDDYVPILYKQLGF

SEQ ID NO: 66761 - DNA, 522 bp, Populus nigra
  CDS (1)..(522)
atggcaaatctgtcggatcctcttgtggttgggagagtgattggagatgtaattgattatttcactccaaatgtgaaaatgactgtcacttataactccaacaagcaggtttataatggccatgagcttttcccatctgctgtcactcataaacctaaagttgaggtccatggtggtgatatgagatcttttttcaccctggtcatgacagacccagatgttccaggacctagtgatccatacctgagggagcacctacactggatagtaactgatatcccaggcactacagatgccacattcggaagggaagtggtgaactatgagatgccaaggcctaacatcgggatccacaggtttgtttaccttcttttcaggcagaaaggaagacaaacagtgagcacaccatcctcaagggacaaatttaacacgaggaaatttgctgaagaaaatgagcttgacctgccggtagcagctgtcttcttcaatgctcaaagggaaacagctgcaaggagacgttga

SEQ ID NO: 66762 - protein, 173 aa, Populus nigra
MANLSDPLVVGRVIGDVIDYFTPNVKMTVTYNSNKQVYNGHELFPSAVTHKPKVEVHGGDMRSFFTLVMTDPDVPGPSDPYLREHLHWIVTDIPGTTDATFGREVVNYEMPRPNIGIHRFVYLLFRQKGRQTVSTPSSRDKFNTRKFAEENELDLPVAAVFFNAQRETAARRR

SEQ ID NO: 66763 - DNA, 519 bp, Solanum lycopersicum
  CDS (1)..(519)
atggcaagaagtttagagcctttaattgttgggagagtaattggtgatgttattgattcattcaatccaacaataaaaatgtcaataacttataacaacaaattagtttgcaatggacatgaacttttcccttctgttgtttcttctagacctaaagttgaagttcaaggaggagatttgagaactttcttcacactggtcatgacagatcctgatgttcctggacctagtgatccttatatgagagagcatctacactggataattactgatattccaggtacaactgatgctacttttggaagagaattggtgagctatgagaccccaaggccaaatattgggattcataggtttgtgtttgttctcttcaagcaaaaaagcagaagttcagttagtcaaccaacttcgagagatcatttcaacactcgaaatttcgctcaagagaataatcttgaacaacctgttactgcggtttttttcaatgcacaacgtgaaaccgctgcgcgaagacgctaa

SEQ ID NO: 66764 - protein, 172 aa, Solanum lycopersicum
MARSLEPLIVGRVIGDVIDSFNPTIKMSITYNNKLVCNGHELFPSVVSSRPKVEVQGGDLRTFFTLVMTDPDVPGPSDPYMREHLHWIITDIPGTTDATFGRELVSYETPRPNIGIHRFVFVLFKQKSRSSVSQPTSRDHFNTRNFAQENNLEQPVTAVFFNAQRETAARRR

SEQ ID NO: 66765 - DNA, 606 bp, Saccharomyces cerevisiae
  CDS (1)..(606)
atgtctagtgccatcgttgctaaactgaacaaagaggacatcattaaggacaccgtcaaggacttggcgttcgagattcttggtgagttgtcggtttcgtacgttgattctgacgacatcaaattgggcaatcccatgccaatggaagctacgcaagccgctcctaccatcaagttcacgcccttcgataaaagccaattgtcagccgaggataaactcgctttgttgatgactgacccggacgcgccctctagaacagaacataagtggtcggaggtttgtcactacatcatcactgatattcctgtcgagtacggacctgggggagatattgccatttcggggaagggtgtcgtgagaaataactatattgggcctggtccaccaaagaactccggttatcacagatacgtgttcttcctgtgcaagcaacccaagggagcggattcgtccacttttaccaaggttgagaacattatctcctgggggtacggtactcctggtgcgggtgcctatgactatatcaaggagaacaatctgcaactggtcggtgccaattattacatggtcgaaaacacgaccgttgatttcaactatgacatgtaa

SEQ ID NO: 66766 - protein, 201 aa, Saccharomyces cerevisiae
MSSAIVAKLNKEDIIKDTVKDLAFEILGELSVSYVDSDDIKLGNPMPMEATQAAPTIKFTPFDKSQLSAEDKLALLMTDPDAPSRTEHKWSEVCHYIITDIPVEYGPGGDIAISGKGVVRNNYIGPGPPKNSGYHRYVFFLCKQPKGADSSTFTKVENIISWGYGTPGAGAYDYIKENNLQLVGANYYMVENTTVDFNYDM

SEQ ID NO: 66767 - DNA, 24 bp, Artificial sequence
  primer
atgaaccaagcaatagacttcgca

SEQ ID NO: 66768 - DNA, 25 bp, Artificial sequence
  primer
ctatttcgtttccgcatagaagaaa

SEQ ID NO: 66769 - protein, 199 aa, Artificial sequence
  consensus sequence
  Variant (2)..(18): Xaa in position 2 to 18 is any amino acid
  Variant (19)..(22): Xaa in position 19 to 22 is any or no amino acid
  Variant (24)..(25): Xaa in position 24 to 25 is any amino acid
  Variant (27)..(28): Xaa in position 27 to 28 is any amino acid
  Variant (30)..(37): Xaa in position 30 to 37 is any amino acid
  Variant (39)..(51): Xaa in position 39 to 51 is any amino acid
  Variant (52)..(67): Xaa in position 52 to 67 is any or no amino acid
  Variant (69)..(70): Xaa in position 69 to 70 is any amino acid
  Variant (75)..(75): Xaa in position 75 is any amino acid
  Variant (77)..(82): Xaa in position 77 to 82 is any amino acid
  Variant (83)..(84): Xaa in position 83 to 84 is any or no amino acid
  Variant (86)..(87): Xaa in position 86 to 87 is any amino acid
  Variant (90)..(90): Xaa in position 90 is any amino acid
  Variant (92)..(94): Xaa in position 92 to 94 is any amino acid
  Variant (96)..(101): Xaa in position 96 to 101 is any amino acid
  Variant (102)..(125): Xaa in position 102 to 125 is any or no amino acid
  Variant (127)..(131): Xaa in position 127 to 131 is any amino acid
  Variant (133)..(133): Xaa in position 133 is any amino acid
  Variant (135)..(136): Xaa in position 135 to 136 is any amino acid
  Variant (139)..(140): Xaa in position 139 to 140 is any amino acid
  Variant (141)..(141): Xaa in position 141 is any or no amino acid
  Variant (143)..(143): Xaa in position 143 is any amino acid
  Variant (148)..(152): Xaa in position 148 to 152 is any amino acid
  Variant (154)..(183): Xaa in position 154 to 183 is any amino acid
  Variant (184)..(192): Xaa in position 184 to 192 is any or no amino acid
  Variant (194)..(194): Xaa in position 194 is any amino acid
  Variant (196)..(198): Xaa in position 196 to 198 is any amino acid
VXXXXXXXXXXXXXXXXXXXXXVXXGXXLXXXXXXXXPXXXXXXXXXXXXXXXXXXXXXXXXXXXXXLXXTDPDXPXXXXXXXXEXXHWXVXXXPXXXXXXXXXXXXXXXXXXXXXXXXXXXXXXGXXXXXYXGXXPPXXXGXHRYVXXXXXQXXXXXXXXXXXXXXXXXXXXXXXXXXXXXXXXXXXXXXXAXNXXXA

SEQ ID NO: 66770 - protein, 10 aa, Artificial sequence
  protein pattern
  Variant (2)..(2): Xaa in position 2 is any amino acid
  Variant (3)..(3): Xaa in position 3 is Leu or Met
  Variant (4)..(4): Xaa in position 4 is Ala or Thr
  Variant (8)..(8): Xaa in position 8 is Ala or Val
  Variant (10)..(10): Xaa in position 10 is Gly, Ser, Thr or Val
LXXXDPDXPX

SEQ ID NO: 66771 - protein, 20 aa, Artificial sequence
  protein pattern
  Variant (2)..(2): Xaa in position 2 is Ala, Pro or Ser
  Variant (3)..(3): Xaa in position 3 is Ala or Gly
  Variant (6)..(7): Xaa in position 6 to 7 is any amino acid
  Variant (8)..(8): Xaa in position 8 is Ser or Thr
  Variant (10)..(10): Xaa in position 10 is any amino acid
  Variant (15)..(15): Xaa in position 15 is any amino acid
  Variant (16)..(16): Xaa in position 16 is Phe, Ile, Leu or Val
  Variant (17)..(19): Xaa in position 17 to 19 is any amino acid
  Variant (20)..(20): Xaa in position 20 is Glu or Gln
GXXPPXXXGXHRYVXXXXXX

SEQ ID NO: 66772 - DNA, 2337 bp, Saccharomyces cerevisiae
  CDS (1)..(2337)
atgctgtctgcacgttctgccatcaagagacccattgttcgtggtcttgcgacagtctccaacttgactagagattcaaaagtcaaccaaaacttattagaagatcattcttttattaactacaagcagaatgtggaaacgctggatatcgtaagaaaaagattaaacaggccatttacctacgcggaaaagattttgtacggtcacttggatgaccctcatggtcaagatattcagagaggtgtttcatacctaaaattaagaccagatcgtgttgcctgtcaagatgctactgctcaaatggctattttacaatttatgtccgctggtttaccacaggttgctaagccagtcactgtccactgtgaccatttgattcaagcacaagttggtggtgaaaaagatttgaagagagctatagatctaaacaaggaagtttatgatttcttggcctctgccactgcgaaatataacatgggtttctggaagccaggttccggtatcattcaccaaattgttctggaaaactacgctttcccaggtgctttgatcattggtactgactcccatacaccaaatgctggtggtttaggtcaattggctattggtgttggtggtgctgatgccgttgatgttatggcaggtcgtccatgggaattgaaggctccaaagatcttaggtgttaagttgactggtaagatgaacggttggacttctccaaaggatattattttgaaattggctggtatcacaactgtcaaaggtggtactggtaaaattgttgaatatttcggtgatggtgttgacaccttctccgctactggtatgggtaccatttgtaatatgggtgctgaaatcggtgctaccacatctgttttcccattcaacaaatctatgattgaatatttggaagcaactggtcgtggtaagatcgctgactttgctaaattataccacaaggacctattatctgctgataaggatgctgaatacgatgaggtcgtcgaaattgacttgaacactctggaaccatacatcaatgggccatttacccccgatttggctactccagtttctaagatgaaggaagttgctgttgctaataactggccattggatgtcagagtcggtttgatcggttcttgtaccaattcctcttatgaagatatgtctcgttcagcatccattgtcaaggatgctgctgctcatggtttgaaatccaagaccattttcactgttactccaggttctgaacaaatcagagccactattgaacgtgatggccaattagaaaccttcaaagaatttggtggtatcgttttggcaaacgcctgtggcccatgtattggtcaatgggatcgtagagatatcaagaaaggtgacaagaatactatcgtttcctcttacaacagaaatttcacttctagaaatgatggtaacccacaaactcatgcttttgttgcatctccagaattagtaactgcgttcgccattgcgggtgatttgagattcaaccctctaacagacaaattaaaggacaaggatggtaatgagttcatgttgaaaccaccacatggtgatggtttgcctcaaagaggttatgatgctggtgagaacacttaccaagctccacctgcagaccgtagcaccgttgaagttaaagtttctccaacttcagaccgtctacaactgttgaaaccattcaaaccttgggatggtaaggatgctaaagacatgccaatcttgattaaggccgtcggtaagacaactactgatcatatttctatggctggtccatggttgaaatacagaggtcatttagaaaacatttctaataactatatgattggtgctattaatgctgaaaacaagaaggctaactgtgttaaaaatgtatatactggtgaatacaaaggtgttccagacactgctagagattacagagaccaaggtatcaagtgggttgttattggtgatgaaaactttggtgaaggttcctctcgtgaacacgctgctttggaaccaagattcttgggcggtttcgctatcatcacaaagtctttcgctcgtatccatgaaactaacttgaaaaaacaaggtctattgccattgaacttcaagaacccagctgactatgacaagatcaaccctgatgacagaatcgatattctgggtctagctgaattggctccaggtaagcctgtaacaatgagagttcatccaaagaatggtaagccatgggatgctgtgttgacccatactttcaacgatgagcaaattgaatggttcaaatatggttctgccttaaataaaattaaggccgatgagaagaaataa

SEQ ID NO: 66773 - protein, 778 aa, Saccharomyces cerevisiae
MLSARSAIKRPIVRGLATVSNLTRDSKVNQNLLEDHSFINYKQNVETLDIVRKRLNRPFTYAEKILYGHLDDPHGQDIQRGVSYLKLRPDRVACQDATAQMAILQFMSAGLPQVAKPVTVHCDHLIQAQVGGEKDLKRAIDLNKEVYDFLASATAKYNMGFWKPGSGIIHQIVLENYAFPGALIIGTDSHTPNAGGLGQLAIGVGGADAVDVMAGRPWELKAPKILGVKLTGKMNGWTSPKDIILKLAGITTVKGGTGKIVEYFGDGVDTFSATGMGTICNMGAEIGATTSVFPFNKSMIEYLEATGRGKIADFAKLYHKDLLSADKDAEYDEVVEIDLNTLEPYINGPFTPDLATPVSKMKEVAVANNWPLDVRVGLIGSCTNSSYEDMSRSASIVKDAAAHGLKSKTIFTVTPGSEQIRATIERDGQLETFKEFGGIVLANACGPCIGQWDRRDIKKGDKNTIVSSYNRNFTSRNDGNPQTHAFVASPELVTAFAIAGDLRFNPLTDKLKDKDGNEFMLKPPHGDGLPQRGYDAGENTYQAPPADRSTVEVKVSPTSDRLQLLKPFKPWDGKDAKDMPILIKAVGKTTTDHISMAGPWLKYRGHLENISNNYMIGAINAENKKANCVKNVYTGEYKGVPDTARDYRDQGIKWVVIGDENFGEGSSREHAALEPRFLGGFAIITKSFARIHETNLKKQGLLPLNFKNPADYDKINPDDRIDILGLAELAPGKPVTMRVHPKNGKPWDAVLTHTFNDEQIEWFKYGSALNKIKADEKK

SEQ ID NO: 66774 - DNA, 2961 bp, Oryza sativa (japonica cultivar-group)
  CDS (1)..(2961)
atgcctcccctcacgagcgccctcctctcccgctcctcctctacccgcatccccgccgcggcggcggcggcggcggcgatctcgaatcccgcgggcgccgccgcgtcgtcgtcgtcgccgtcaccgccgcctccgagctctcgccccaggccggcgtcccccttcgcgtccggcctcgctggccgcatcttcggcggccgccgcgccgccgcgcgctcctcgtcgtccgccgcggccgtcttcgagcggcgcttcgcctcggcggcggcgaagaactcgtacgatgaaatcctgacgggcctcgcgaagccgggaggcggagcggagttcgggaaatactacagcctgcccgcgctatccgatccgcggatcgagcgactcccttactcgataaggattcttctcgagtcggcaatcagaaactgtgatgagttccaggtcaccgggaaggacgttgagaaaatcctggactgggagaacagcgcaccaaagcaagtcgaaatcccatttaagccagcccgtgtcctcctccaggatttcactggtgttccagcagtggttgatcttgcgtgcatgagggatgctatgagcaaacttggcagtgacccaaacaaaattaatcctctggtacctgtagatcttgttattgatcattcagtacaagttgatgtggcaagatcagaaaatgctgttcaggcaaatatggagctagagttccatcgtaacaaggagaggtttggatttttgaaatggggttcaactgctttccgtaacatgcttgttgttccacctggatctggaattgtgcatcaggttaaccttgaatatctggccagagttgtgtttaacaatggtgggatcctttaccctgatagtgttgttggaacagactcccacacaactatgatagatggtcttggtgttgctggatggggagttggtggtatagaggcagaagctacaatgcttggccagccaatgagcatggtattgccaggagttgtgggcttcaagttaacagggaagctgaggaacggtgttactgctacagatttggttctaacagtaactcaaatgcttaggaaacatggcgttgtcggaaaatttgttgaattttacgggggaggcatgagtgaattatcactggctgatagggctacaattgcaaacatgtcaccagaatatggtgcaactatgggtttcttcccagttgatggaaagacattggactacttgaagctaactggcagaagtgatgacactgtggccatgatagagtcttacctgcgtgccaataagatgttcgtcgactacaaccagcctgaagctgaaagagtgtactcatcttatctggaacttaacttggaggaggtagagccatgcttgtctggaccaaaacggcctcatgaccgagtgactttgaagaacatgaaatcagattggctgtcttgcttggataatgatgtaggcttcaagggttttgctgtccccaaagaatcacagggtaaagttgctgagttctctttccatgggacaccagcaaagctaaagcatggtgatgttgtaattgctgctataaccagttgcaccaacacatcaaatcctaatgtaatgctgggagctgctttagttgccaaaaaggcttgtgaattaggccttgaggtcaagccatggattaagacaagtcttgcacctggttctggagttgtgaagaagtacttggacaagagtggtctgcagaaatatctagaccagcttggcttccatattgtaggctatggttgcacaacctgcataggaaattctggagaacttgatgaaacagtatctgctgcaatttctgacaacgatattgtcgctgctgccgtgttatctggaaacagaaattttgaagggcgtgtgcacgcattaaccagagcaaattatcttgcctctcctccattggttgtggcctatgcccttgctggcacggtcaatattgattttgagaaagaaccaattggcatctcgaaagatgggaaggaggtttacttcagggacatctggccttccactgaagagattgctgaggttgttaaatcaagtgtgctacctgacatgtttaagagcacatacgaggcaataaccaaaggaaatcctatgtggaatgagctgtctgtatcagcaagcactctctacccatgggacccgacatctacttacatccatgagcctccttatttcaaggatatgacaatgtcccctcctggcccacggcctgtgaaggatgcttactgtctcctgaactttggtgacagtatcacaactgatcacatctcacctgccggaagtattcaccctgacagccctgctgctagatatctgaaggagcgtggtgttgaaaggaaggacttcaactcatatggcagtcggcgaggaaatgatgagatcatggctaggggaacttttgccaacattcgccttgtgaacaagttcttgaagggtgaggttggcccaaaaaccatccatattccatcaggggagaagctctctgttttcgacgctgctacgaaatacaagaatgaaggacatgacactattatcctggctggtgctgagtacggtagtggaagctctcgggattgggctgcgaagggtccaatgctacagggagtcaaggctgtgattgctaagagctttgaaaggattcaccgcagcaaccttgctggtatgggtatcattcctctatgcttcaagtcaggggaggacgccgacacccttggattgactggccatgagcgtttcacggttcacctcccggccaatgtaagtgagatcaagcctgggcaagatgttactgtgacgactgataatgggaagtccttcacttgcacacttcgatttgacactgaggtggagcttgcatactacgacaatggtggcattttaccgtatgtcatcagaaagatcgccgagcagtag

SEQ ID NO: 66775 - protein, 986 aa, Oryza sativa (japonica cultivar-group)
MPPLTSALLSRSSSTRIPAAAAAAAAISNPAGAAASSSSPSPPPPSSRPRPASPFASGLAGRIFGGRRAAARSSSSAAAVFERRFASAAAKNSYDEILTGLAKPGGGAEFGKYYSLPALSDPRIERLPYSIRILLESAIRNCDEFQVTGKDVEKILDWENSAPKQVEIPFKPARVLLQDFTGVPAVVDLACMRDAMSKLGSDPNKINPLVPVDLVIDHSVQVDVARSENAVQANMELEFHRNKERFGFLKWGSTAFRNMLVVPPGSGIVHQVNLEYLARVVFNNGGILYPDSVVGTDSHTTMIDGLGVAGWGVGGIEAEATMLGQPMSMVLPGVVGFKLTGKLRNGVTATDLVLTVTQMLRKHGVVGKFVEFYGGGMSELSLADRATIANMSPEYGATMGFFPVDGKTLDYLKLTGRSDDTVAMIESYLRANKMFVDYNQPEAERVYSSYLELNLEEVEPCLSGPKRPHDRVTLKNMKSDWLSCLDNDVGFKGFAVPKESQGKVAEFSFHGTPAKLKHGDVVIAAITSCTNTSNPNVMLGAALVAKKACELGLEVKPWIKTSLAPGSGVVKKYLDKSGLQKYLDQLGFHIVGYGCTTCIGNSGELDETVSAAISDNDIVAAAVLSGNRNFEGRVHALTRANYLASPPLVVAYALAGTVNIDFEKEPIGISKDGKEVYFRDIWPSTEEIAEVVKSSVLPDMFKSTYEAITKGNPMWNELSVSASTLYPWDPTSTYIHEPPYFKDMTMSPPGPRPVKDAYCLLNFGDSITTDHISPAGSIHPDSPAARYLKERGVERKDFNSYGSRRGNDEIMARGTFANIRLVNKFLKGEVGPKTIHIPSGEKLSVFDAATKYKNEGHDTIILAGAEYGSGSSRDWAAKGPMLQGVKAVIAKSFERIHRSNLAGMGIIPLCFKSGEDADTLGLTGHERFTVHLPANVSEIKPGQDVTVTTDNGKSFTCTLRFDTEVELAYYDNGGILPYVIRKIAEQ

SEQ ID NO: 66776 - DNA, 2691 bp, Mesorhizobium loti MAFF303099
  CDS (1)..(2691): transl_table=11
gtgtcaaaatccctcgatagtttcaattgccgtcgcacgctgaccgcgggcggcaccgaatatgcctatttcgacctcgtcgaggccgagaagaacggcctcaccggcatcgcccagctgccctattcgatgaaggtgctgctggagaacctgctgcgcaatgaggacggccgctccgtcaccaaggaatcgatccaggcggtggccggctggctgaccgacaagggcaccgccggcgtcgagatcgcctatcgcccggcccgcgtgctgatgcaggatttcaccggcgttccggccgtggtcgaccttgccgccatgcgcgacgccatggcctcgctcggtggcgacccgcaaaagatcaacccgctggtgccggtcgacctcgtcatcgaccattccgtcatcgtcgacgaattcggcacgccgatggccttcgcccgcaatgtcgagctcgaatatgagcgcaacgaggaacgctacaagttcctgaaatggggccagcaggcgttccgcaacttccgcgtcgtgccgcccggcaccggcatatgccaccaggtcaacctcgaatatctcggccaggtggtgtggaccaacaccgaggacggcgaaaccacggcctatcccgacacttgcgtcggcaccgattcgcacaccaccatgatcaacggccttggcgttctcggctggggcgtcggcggcatcgaggccgaggcggccatgctcggccagcccgtctccatgcttttgcccgaagtcatcggcttccgcctcaccggcaagctcaaggaaggcgtcaccgccaccgacctggtgctgaccgtcacccagatgctgcgcaagaagggcgtcgtcggcaagttcgtcgaattcttcggcccgggcctctccaacatgacgctcgccgaccgcgccaccatcggcaatatggcgccggaatatggcgccacctgcggcttcttcccggtcgatgcggagaccatccgctacctgacaatgtccggccgcgaggaaagccgcatcgccctggtcgaagcctattccaaggcgcaaggcatgtggcgcgaggccggctccgccgacccggtcttcaccgacctgctcgaactcgagctgagcagcgtcgtaccgtcgatggccggccccaagcggcccgaaggccgcgtcgcgctggaaggcattccggccggcttcgccaaggcgatggacaccgaatacaagaaggcggcggagatttccaagcgctacgccgtcgaaggcaccgaccatgatctcggccatggcgacgtcgtcatcgccgccatcacgtcgtgcaccaacacctccaacccgagcgtgctgatcggcgccggccttctggcccgcaacgccaaccgcctcggcctcaagcagaagccgtgggtgaagacctcgctcgcccccggcagccaggtggtcgccgaatatctggagaagtcaggcctgcagaaggagctcgaccagatcggcttcaacctggtcggcttcggctgcaccacctgcatcggcaattccggcccgctgccggcgccgatctccaagaccatcaacgataaaggtttgattgctgccgcggtcttgtccggcaaccgcaacttcgaaggccgcgtctcgcccgacgtgcaggccaactacctggcgtcaccgccgctggtcgtggcgcatgcgctggccggcaccgtcaccaaggacctcacgaccgagccgctcggcgaggacaagaacggcaacccggtctacctcaaggacatctggccgagctcggccgagatccaggaattcatcgagaagaacgtcacccgcgagctgttcgcccgcaaatatgccgacgtcttcaagggcgacgagtactggcagaacgtcaaggcgcctgaaggccagacctacgcctgggacgacaactcgacctatgtgcagaacccgccctatttcgccggaatgaccgccggtttcggcaagatcggcgacatcaagggcgcccgcgtgctcggcctgttcggcgacaagatcaccaccgaccacatctcgccggcgggttcgatcaaggccgcctcgccggccggcaagtacctcaccgaccatggcgtcggcgtcgccgacttcaaccagtacggcacgcggcgcggcaatcatgaggtgatgatgcgcggcaccttcgccaacatccgcatccgcaaccacatgctgggcgagaacggccgcgagggcggctacaccatccactacccgtcgaaggaagaggaatcgatctacgacgcggcgatggagtacaagaaggaaggcgtgccgctggtgatcttcgccggcgtcgaatacggcaacggctcgtcgcgcgactgggcggccaagggaacgaatctccttggtgtccgcgccgtcatcgcccggtccttcgagcgcatccatcgctcgaacctggtcggcatgggcgtcatccccttcgtcttcgaggaaggcacatcctgggcttcgctcaacctcaagggcgacgaactggtcgagatcgacggcctgagcaccatcaagccgcgccagacgatgaccgccaagatcacctatggcgacggcacggtgaagaacgtgccgatcatctgccgcatcgatacgctggacgagctcgactacttcaagaacggcggcatcctgcagtacgtgctgcgcgatctggctgcgtag

SEQ ID NO: 66777 - protein, 896 aa, Mesorhizobium loti MAFF303099
MSKSLDSFNCRRTLTAGGTEYAYFDLVEAEKNGLTGIAQLPYSMKVLLENLLRNEDGRSVTKESIQAVAGWLTDKGTAGVEIAYRPARVLMQDFTGVPAVVDLAAMRDAMASLGGDPQKINPLVPVDLVIDHSVIVDEFGTPMAFARNVELEYERNEERYKFLKWGQQAFRNFRVVPPGTGICHQVNLEYLGQVVWTNTEDGETTAYPDTCVGTDSHTTMINGLGVLGWGVGGIEAEAAMLGQPVSMLLPEVIGFRLTGKLKEGVTATDLVLTVTQMLRKKGVVGKFVEFFGPGLSNMTLADRATIGNMAPEYGATCGFFPVDAETIRYLTMSGREESRIALVEAYSKAQGMWREAGSADPVFTDLLELELSSVVPSMAGPKRPEGRVALEGIPAGFAKAMDTEYKKAAEISKRYAVEGTDHDLGHGDVVIAAITSCTNTSNPSVLIGAGLLARNANRLGLKQKPWVKTSLAPGSQVVAEYLEKSGLQKELDQIGFNLVGFGCTTCIGNSGPLPAPISKTINDKGLIAAAVLSGNRNFEGRVSPDVQANYLASPPLVVAHALAGTVTKDLTTEPLGEDKNGNPVYLKDIWPSSAEIQEFIEKNVTRELFARKYADVFKGDEYWQNVKAPEGQTYAWDDNSTYVQNPPYFAGMTAGFGKIGDIKGARVLGLFGDKITTDHISPAGSIKAASPAGKYLTDHGVGVADFNQYGTRRGNHEVMMRGTFANIRIRNHMLGENGREGGYTIHYPSKEEESIYDAAMEYKKEGVPLVIFAGVEYGNGSSRDWAAKGTNLLGVRAVIARSFERIHRSNLVGMGVIPFVFEEGTSWASLNLKGDELVEIDGLSTIKPRQTMTAKITYGDGTVKNVPIICRIDTLDELDYFKNGGILQYVLRDLAA

SEQ ID NO: 66778 - DNA, 2646 bp, Thermoplasma volcanium GSS1
  CDS (1)..(2646): transl_table=11
atggttgagataaaggaagaaacttttgaagtcgatggaagaaagtactactactatccgctcaacaaaattttagatggaaaacggttggaaaagctacctagatccctaaggatattacttgaatcgatggttaggaacctggacgggcgttctataacccaagatgatatagatgcaatagttaactggaatccttcgaacgtacctgacaaagaaattaggttcaaggtttcacgtgtagtgatgcaggatttcaccggtgtccctgctgtagtagaccttgcatctatgagggatacggtaaagaaacttggcaaagaccctgaacttataaacccgcaggttcgtgttgatcttgtcatcgaccattccgtgcaggtagactactacggcgaatcgtttgctatcgaaaaaaatgaggaactcgaattcaacaggaaccttgaaaggtacaagttcctaaaatgggcccaaaagtcattcaagaacttcagagtcataccgcccggaacgggaataatacaccaggtcaatcttgagtatctagcagaagtcatattcgactatgaagaaaaaggaaagaggtatgcatacttcgatacgcttgtaggaacggattctcataccactatgataaatggtattggcgtgcttggctggggtgttggtggaatagaagctgaggcagcgctgctaggccagccgataactatatcgcttcctgaagttataggagtaaggttgcatggggaattaaacccaggtgtaaccgcaacggatctggtattgacaataaccgaacttctcaggaaagttaacgttgtggataagttcgttgagttttttgggccttcagtaaagtatctttcagttccggagagggcaacagtttctaatatgtgtccggaatacggggcaactctagcactgttccctatagatgaccagaccctcgattacctgaggacaacaggaagatccgatcacaaaataaagcttataaaaaaatacctagaactgcaggggatgttcggagaaagtgagggtgtagaatacacaaaagtcatagatcttgatctgtcaactgtcaagccaagcgtagctgggccaaagctgccgcagcagaggctagatttagaccaggtgccatcgagcttcctctcctctgtagaatcgaacagcgacagtcacctagtttctcttaggaaagtcccgctcaagttgaaagggcaggatgtagaactttctgatggcgatatcgtcatagcagctataacaagctgtactaacaccagcaacccctatgtaatgctggctgcaggtttagttgcgaagaaggccgtagagcttggactaaaggtaaatccaaaggtaaaaacaagccttgcgccagggtcgagagttgttacagactatctcactgaatctggtttaatcgattacctagacaagctagggttttacctagtaggatatggatgtacaacatgcataggaaacagcgggccgcttgacaaggatgtcgatgaggctataataaaaaacaatcttaacgtcgtatcagtattatcaggcaacaggaatttcgaggcaaggatacacaaggacgtaaaggcaaactatcttatgtctcctccgctagtagttgcctacgcaatagcaggaaacataactataaacttggataaagacccgttaggagaagttaatgggaaaaagatataccttaaagatatctggccttcaaacaatgaaattaaggatgcagtcaataaatacgtaaagaaggagatgtacgagaagcgctatggaaacataacgaataagagatgggaaagcatagatgtacctgaatcgcctgtatacaactgggacgaatcaagtacttacataaggaatccgccattttttgagaactttaaactcaacgagctcataagcactttctctgtcaaaggggcttatcccctgttgatactcggtgattctgttacgacagatcatatatcgcctgctggatccataccaaaggatagccctgcaggaaaatatttgatcgaacatggcgttaaaccagaggatttcaattcttacggttcgaggagaggaaaccacgaagtcatgatgagaggcacattcgcaaacgttagaataagaaaccttatggtgaacaaggagggtggctacacgatatttattccagacaataaagaaatgtcagtttacgatgctgcaatgaaatacaggtctatggggatacctcttgttgtagtggccggaagggagtatggtacaggaagctccagggattgggctgccaaaggaacatacctgcttggcgtcagggcagtactggcgaaaagctatgaaaggatacacaggagcaacttggtgggaatgggtgttattcctatagaatacgaaagcctcaatccgcaggacatcgactttacgaaaaaaatagatatcgatatagacggcatcgacccaggatcaaaagcaagaatgacttatactgacaagaatggagagagccatactgtacctgtaacgttaagggtagatacccctgctgaggccgattatataagaaacggcggcatactgcagtattctctcagaaagatactttcttcgaattaa

SEQ ID NO: 66779 - protein, 881 aa, Thermoplasma volcanium GSS1
MVEIKEETFEVDGRKYYYYPLNKILDGKRLEKLPRSLRILLESMVRNLDGRSITQDDIDAIVNWNPSNVPDKEIRFKVSRVVMQDFTGVPAVVDLASMRDTVKKLGKDPELINPQVRVDLVIDHSVQVDYYGESFAIEKNEELEFNRNLERYKFLKWAQKSFKNFRVIPPGTGIIHQVNLEYLAEVIFDYEEKGKRYAYFDTLVGTDSHTTMINGIGVLGWGVGGIEAEAALLGQPITISLPEVIGVRLHGELNPGVTATDLVLTITELLRKVNVVDKFVEFFGPSVKYLSVPERATVSNMCPEYGATLALFPIDDQTLDYLRTTGRSDHKIKLIKKYLELQGMFGESEGVEYTKVIDLDLSTVKPSVAGPKLPQQRLDLDQVPSSFLSSVESNSDSHLVSLRKVPLKLKGQDVELSDGDIVIAAITSCTNTSNPYVMLAAGLVAKKAVELGLKVNPKVKTSLAPGSRVVTDYLTESGLIDYLDKLGFYLVGYGCTTCIGNSGPLDKDVDEAIIKNNLNVVSVLSGNRNFEARIHKDVKANYLMSPPLVVAYAIAGNITINLDKDPLGEVNGKKIYLKDIWPSNNEIKDAVNKYVKKEMYEKRYGNITNKRWESIDVPESPVYNWDESSTYIRNPPFFENFKLNELISTFSVKGAYPLLILGDSVTTDHISPAGSIPKDSPAGKYLIEHGVKPEDFNSYGSRRGNHEVMMRGTFANVRIRNLMVNKEGGYTIFIPDNKEMSVYDAAMKYRSMGIPLVVVAGREYGTGSSRDWAAKGTYLLGVRAVLAKSYERIHRSNLVGMGVIPIEYESLNPQDIDFTKKIDIDIDGIDPGSKARMTYTDKNGESHTVPVTLRVDTPAEADYIRNGGILQYSLRKILSSN

SEQ ID NO: 66780 - DNA, 2712 bp, Aeropyrum pernix K1
  CDS (1)..(2712): transl_table=11
ttggctagtggtggaggcttcgatttcaagcctatcgaggctgagctggagactcctgagggcagggctaggatactgttgataaacaagattgaccgcgtgataccctcagacttcaactcgctaccctactccatcagggttctcctagagaatgttgtcaggcactacgacggcttcgtggttagagatgaggatgtggaggctgtagcgaggtggagcgagtacgccgggcgtaaggacgtgccgttccaccccgtgagggttgtaatgcaggacttcacgggagttccagctgtggtcgacttagcggctatgagggatgctatgaagcagttcggaggcgacccgtccaaggtcaaccccctgatacccgtcgacctgatcatcgaccacagcatacaggtggactactatggcaccgccgaggcgttcaggctcaacttgaagagggagtatgaaagaaacagggagaggtatcagctgctgaagtgggctcagaaggccttctcgaacttcagggttgtcccgcccggaaaggggattatacatcaggtcaacctggagtatcttgcgagggtcgtgtggctttccaggaggaacgggaccctctacgcacacccagacagcctgttggggactgatagccacaccactatgataaacggtctgggagtcttcggctggggtgtgggtggtatagaggctgaggctgttatactcgggcagccatactacatgctcctccccgaggtcgtaggagtgaggctggtgggcgagctgagggagggcgtgaccaccacggaccttgttctctacattacggagaagctgaggaagaagaatgtggtcggcaagttcgtggagtacttcggggagggtgtgaagaagctaagcgtgcccgacagggccaccatagccaacatggcccccgagtacggcgccaccatgggcttcttccctgtagacgaggcaactctagagtatctcaggggtactgggaggccagagtggctggtccaacttgtcgagaggtataccaaggagacggggctttggtatagcctcgaggatccggagcccaggtatagcgatgttgtagagatagacctgtccgacgtggagccgagcataagcggcccaagccatccagaggacaggatacccctgagggaggctaaggagcgtgtaaggaagattataatggagtatctggagaagaagggcaggggacccgctatagtggagctcaagctcggtgacgaggaggtccatctgacggacggcagcgtcgtctacgccgctctaactagctgtaccaacaccagcaaccccagcgtcatgatagcggcagccctcctggccaggaatgctgtcaagaagggactcagaactcggccgtgggttaagaccagcaacgcccctggtagcagggttgtgcctgagtactggaaccggctcggcctaatgccatacctagaggccctggggttccatataacaggctacggctgcacagtctgcataggaaacagcggacccttgaggcccgagattgaggaggccataagagagcatgacctctgggttgcaacggtgctcagcggcaacagaaacttctctggcaggatacacccgctggccaggggcaacttcctggctagcccaccgctggttgtggcctatgccctggctggcagggtggatatagacttcgagaaggagcctgtgggctacgaccccaacggcaaccctgtatacctcagagacctatggcctagccagcgggaggtgagggaggcaatagagaaggctctagacccacagcttttcgtggagaagtataaagatatagacaagggggacaagttctgggaggagctgaaggcccctgagggcgagctttacagctgggacccgaagagcacgtacataagaaagcccccatacttcgacaacatgcccctagagccgcagcctccgagggacataaggggtgctagggttctagtctgggcgcctgacaggacaagcaccgaccatataagcccggccggaaggataagcccggactcgaaggcgggccagtacctgatagagcagggggtcccaccctcacagctaaacacctgcggctctagaagaggcaaccacgaggtcatgatgaggtgcaccttcgacaaccccagattcaggaacaagctggtgccagacagggagggaggctggacaatattctggcccaccggggaggtaatgcacgtgttcgacgccgccatgaagtatagagagatgggcgtaccgctcatagtgcttgccggcaagcagtacggcgtgggctccagcagggactgggcggcgaaagggcctgccctgctcggcgtgaaggcggttatagccgagagctacgagaggatacacaggagcaatctagtcggcatgggcgtgctaccgctagagttcatgcccggagagaacgcagagaagctagggctggacggtagtgaagagtacgatataataggtatcgaggagggcctcagccccgggaagatactgacggtgagggctaggaagagcgacggaagagtgatagagtttaaggtcaaggcaaggctggacacgcccatagaggtagagtactacaaacacggcggcatactccagtacgtcctgaggaagcttatcagagagcatggtagaggcaactga

SEQ ID NO: 66781 - protein, 903 aa, Aeropyrum pernix K1
MASGGGFDFKPIEAELETPEGRARILLINKIDRVIPSDFNSLPYSIRVLLENVVRHYDGFVVRDEDVEAVARWSEYAGRKDVPFHPVRVVMQDFTGVPAVVDLAAMRDAMKQFGGDPSKVNPLIPVDLIIDHSIQVDYYGTAEAFRLNLKREYERNRERYQLLKWAQKAFSNFRVVPPGKGIIHQVNLEYLARVVWLSRRNGTLYAHPDSLLGTDSHTTMINGLGVFGWGVGGIEAEAVILGQPYYMLLPEVVGVRLVGELREGVTTTDLVLYITEKLRKKNVVGKFVEYFGEGVKKLSVPDRATIANMAPEYGATMGFFPVDEATLEYLRGTGRPEWLVQLVERYTKETGLWYSLEDPEPRYSDVVEIDLSDVEPSISGPSHPEDRIPLREAKERVRKIIMEYLEKKGRGPAIVELKLGDEEVHLTDGSVVYAALTSCTNTSNPSVMIAAALLARNAVKKGLRTRPWVKTSNAPGSRVVPEYWNRLGLMPYLEALGFHITGYGCTVCIGNSGPLRPEIEEAIREHDLWVATVLSGNRNFSGRIHPLARGNFLASPPLVVAYALAGRVDIDFEKEPVGYDPNGNPVYLRDLWPSQREVREAIEKALDPQLFVEKYKDIDKGDKFWEELKAPEGELYSWDPKSTYIRKPPYFDNMPLEPQPPRDIRGARVLVWAPDRTSTDHISPAGRISPDSKAGQYLIEQGVPPSQLNTCGSRRGNHEVMMRCTFDNPRFRNKLVPDREGGWTIFWPTGEVMHVFDAAMKYREMGVPLIVLAGKQYGVGSSRDWAAKGPALLGVKAVIAESYERIHRSNLVGMGVLPLEFMPGENAEKLGLDGSEEYDIIGIEEGLSPGKILTVRARKSDGRVIEFKVKARLDTPIEVEYYKHGGILQYVLRKLIREHGRGN

SEQ ID NO: 66782 - DNA, 1980 bp, Aquifex aeolicus VF5
  CDS (1)..(1980): transl_table=11
atggctaaagggacggttgcgtggaagatcattaaaaaccaccttgtttcgggaaaaatggagcccggtgaggagatagcgataaagattgaccagactctgactcaggacgctacgggaactatgtgttacctcgagttcgaagcgatgggcgttcccgaggtaaagacggaactctccgtgtcctacatagaccacaacatgctccagacggacttcaggaacgcggacgaccacaagtacttgatgagcgtagctaagaagttcggtatatggctctcaaagcccggaaacggcatatgtcaccaagttcacttagaaaggttcgcaaaacccggaaagacgcttctcggttcggactcccacacacctaccgcgggcggaatgggaatgctcgcaataggtgcgggcggattggacgttgccgcagccatggcgggagaacccttctacctgaagatgcccaagatcgtgggtgtacacctcaaaggcaaaatgcctgagtgggtaaccgcaaaggacataatccttgaactcctcagaaggctcaccgtaaaaggcggtctcggaaagatatttgaatacttcggagagggggtaaaggaactctccgttccggaaagggcaaccataacgaacatgggagcggaactcggagctacaacttcaatattcccctcagacgaaataactagagcttacctcagagctcagggaagggaagaggactgggtagaactcctaccggatcctgacgccgagtacgacgaagttatagagataaacctctccgaattagagcctctaatagctcaacctcactccccggacaacgttgttcccgtaagggaaatagaaggaataaaagtggatcaagtagtgataggttcatgtacgaattcctccttcgttgacctaacgagagctgctaaactccttgaaggaaggagggttcacccggacgtagtctttgcggtagcacccggttctaagcaggcgctagaattaataacccagaacggagcacttcttaacttcctgaaggcgggagcgaggattctggagagtgcatgcggtccctgtataggaatgggattcgctcctcccacgaacggagtttccgtaaggagcttcaacaggaacttcaagggaagggctggaacgcctgacgcaaaagtttacctcgcgtctcccgagacctgtgttgccgcggcaatagctggggagataatagacccgagaaagctcgctgaaagggaaggtgtaaagtggataagggtagaaatgcccgaaaagttcccatacggagacgaagccttcataccgcctcttcccaaggaggaaagggaaaaagttgaaatatacagaggtccaaacataaaacctctccccgaatttgaacccctgcccgaaactatagagggagaagtcgccctcatcgttgaagacaacataaccacggaccacataatgcccgcaggtgcgaagatactccccttgaggtccaacatatacgctatttccgagtacgtttaccactacgttgatcccgaattcgtcccgagaatgaagaaattaaaggaaaaaggaaaagcgggaataattatcggcggagaaaactacggacagggttcctccagagagcacgcagcactagcacccagattcttgggagtaagggcagttatagccaagtccttcgcgagaatccaccacgcaaacctcgtaaacttcggagtagttccattagagttcaagaataaggaggattacgacaagttcagtctaggagatgagatagaaatacctaacctcatagaaagactcaaaaaaggtgaagacatactcgtaataaacaagaccacgggagaggaaatcctgtgtacgtataacctcacacccgtacagaaggaaatactcatagccggcggaagactcaactacataaagaacaaacacaggaaggaggtttccgcatga

SEQ ID NO: 66783 - protein, 659 aa, Aquifex aeolicus VF5
MAKGTVAWKIIKNHLVSGKMEPGEEIAIKIDQTLTQDATGTMCYLEFEAMGVPEVKTELSVSYIDHNMLQTDFRNADDHKYLMSVAKKFGIWLSKPGNGICHQVHLERFAKPGKTLLGSDSHTPTAGGMGMLAIGAGGLDVAAAMAGEPFYLKMPKIVGVHLKGKMPEWVTAKDIILELLRRLTVKGGLGKIFEYFGEGVKELSVPERATITNMGAELGATTSIFPSDEITRAYLRAQGREEDWVELLPDPDAEYDEVIEINLSELEPLIAQPHSPDNVVPVREIEGIKVDQVVIGSCTNSSFVDLTRAAKLLEGRRVHPDVVFAVAPGSKQALELITQNGALLNFLKAGARILESACGPCIGMGFAPPTNGVSVRSFNRNFKGRAGTPDAKVYLASPETCVAAAIAGEIIDPRKLAEREGVKWIRVEMPEKFPYGDEAFIPPLPKEEREKVEIYRGPNIKPLPEFEPLPETIEGEVALIVEDNITTDHIMPAGAKILPLRSNIYAISEYVYHYVDPEFVPRMKKLKEKGKAGIIIGGENYGQGSSREHAALAPRFLGVRAVIAKSFARIHHANLVNFGVVPLEFKNKEDYDKFSLGDEIEIPNLIERLKKGEDILVINKTTGEEILCTYNLTPVQKEILIAGGRLNYIKNKHRKEVSA

SEQ ID NO: 66784 - DNA, 2607 bp, Vibrio cholerae O1 biovar eltor str. N16961
  CDS (1)..(2607): transl_table=11
atgaacagtctgtatcgtaaagccttatcgccaagccctgcgcaatctcaggtcgatttttttgatacgcgcgcggcggtcgaggcgttaaaaccgggcgcataccaaactttgccttatacggcacgtattctggccgaaaacttagtgcgccgctgcccgccggagcaattgagcgaaagtctgctgcaaattatcgagcgtaaacgcgatcttgatttcccttggtatcccgcgcgcgtggtgtgccacgatattctcggccaaaccgcgttggttgatttggcgggcttgcgtgatgcgattgccgaacaaggcggcgaccccgcgcaagtcaatcctgtcgtagagactcagttgattgtcgatcactcgttggcggtggaatattctggctgcgatcctgatgcgtttgaaaaaaatcgcgcagtagaagacagacgcaacgaagatcgcttccactttatcgagtggtgcaaaaccgcgttcaaaaacgtcagtgtgatccctgccggtaacggcatcatgcaccagatcaatctggaaaaaatgtcgccggtgatacaggtgaaagagggcgtggctttccctgattcttgcgtaggcacagatagccatacgccgcacgttgatgcactcggtgtgctggcaattggtgtgggcggccttgaagcggaaaccgtaatgctcggtcggccttccatgatgcgcttgccagatattgtcggtgtgaaactgaccggagcgcgccaaccgggcattaccgcaaccgatattgtgttggccttaaccgaatttctgcgccgcgagcgcgtggtctcagcctatctggaattttttggcgaaggggcgaaagcgctgaccattggcgatcgcgcgactatttccaatatgacgccggaatacggtgcgaccgccggcatgttctacattgatgaacagaccattcaatatttgaaactcacaggccgcgagccagagcaagttgctttggtcgaaagctacgccaaagccgcaggtttatgggcggacagcttagagcacgcggaatacgaacgtgtgctggagtttgatctctccagtgttgagcgcaatttggcggggccttccaatccgcatcgccgtttgccgaccaaagatctgagcgcgcgcggcattgccatacctgctcagcaacgagaagcacaacaagcagagggcttgatgcctgatggcgcggtgatcatcgccgctatcacttcctgtaccaacaccagtaacccgcgcaacgtggttgcggcagggctactcgccaaaaaagctaatcagctcggccttaaacgtcaaccttgggtgaaaacctctttcgcgcccggctcgaaagtcgccaaattgtatttgcaagaagctgggctgctctctgaactcgaacagcttggttttgggattgtggcgtatgcctgtaccacctgtaacggcatgagtggcgcgctcgatcccgctattcaacaagaaattattgaacgcgatctctacgctacagcggtactgtctggcaaccgcaactttgatggccgtatccatccgtatgccaaacaagcgtttttggcttcgccgccactggtcgtggcttacgcgatagcaggcacgatgcgctttgatattgagcgtgacgcgctgggtcacgatgcgcaaggcaagccgatttatctcaatcacttatggccaagtgatgaagagattgatgccgtcgttggccgcgcggtcaagccggagcagttcaagcagatctatatccagatgtttaaactcgatgagacacaaagcgcgagctcgccgctgtatgactggcggccgatgagcacgtatattcgccgtccaccgtattgggaaggggcgttggctgcaccgcgtaccctgaaagcgatgcgaccactggcgattttgggtgacaacatcaccacggatcatttatcgccctccaatgccattttggcgagcagcgcagcaggcgaatacctaactaaaatgggtgtgccggaggaagattttaactcttacgccacccaccgtggcgatcacctgactgcgcagcgcgcgacgtttgccaacccgaaactgtttaacgaaatggtcaaagaaaacgggcaaatcaagcaaggttctctcgcgcgtattgagccggaaggcaaagtgacgcgcatgtgggaagcgattgaaacttacatgaaccgcaaacaaccgctgattgtgatcgcgggagcggattatgggcaaggctcatcacgcgactgggcggccaaaggcgtgcgtttagccggcgttgaagcgattgttgccgaaggctttgagcgcattcaccgcaccaacttggttgggatgggcgtactgccgctagagtttaagccgggcgtcaatcgccactcgctagcgctcgatggcactgagctgtttgatgtggtgggtgagatcaggcccggtgcagatttagccctagtcgttaccagacaaaacggtgagaagctcgatgtggcggtgacgtgtcgtttggacacggccgatgaagtgcacgtatatcaagcgggtggcgtgttgcaacgctttgcgcaagactttttggcgcagtag

SEQ ID NO: 66785 - protein, 868 aa, Vibrio cholerae O1 biovar eltor str. N16961
MNSLYRKALSPSPAQSQVDFFDTRAAVEALKPGAYQTLPYTARILAENLVRRCPPEQLSESLLQIIERKRDLDFPWYPARVVCHDILGQTALVDLAGLRDAIAEQGGDPAQVNPVVETQLIVDHSLAVEYSGCDPDAFEKNRAVEDRRNEDRFHFIEWCKTAFKNVSVIPAGNGIMHQINLEKMSPVIQVKEGVAFPDSCVGTDSHTPHVDALGVLAIGVGGLEAETVMLGRPSMMRLPDIVGVKLTGARQPGITATDIVLALTEFLRRERVVSAYLEFFGEGAKALTIGDRATISNMTPEYGATAGMFYIDEQTIQYLKLTGREPEQVALVESYAKAAGLWADSLEHAEYERVLEFDLSSVERNLAGPSNPHRRLPTKDLSARGIAIPAQQREAQQAEGLMPDGAVIIAAITSCTNTSNPRNVVAAGLLAKKANQLGLKRQPWVKTSFAPGSKVAKLYLQEAGLLSELEQLGFGIVAYACTTCNGMSGALDPAIQQEIIERDLYATAVLSGNRNFDGRIHPYAKQAFLASPPLVVAYAIAGTMRFDIERDALGHDAQGKPIYLNHLWPSDEEIDAVVGRAVKPEQFKQIYIQMFKLDETQSASSPLYDWRPMSTYIRRPPYWEGALAAPRTLKAMRPLAILGDNITTDHLSPSNAILASSAAGEYLTKMGVPEEDFNSYATHRGDHLTAQRATFANPKLFNEMVKENGQIKQGSLARIEPEGKVTRMWEAIETYMNRKQPLIVIAGADYGQGSSRDWAAKGVRLAGVEAIVAEGFERIHRTNLVGMGVLPLEFKPGVNRHSLALDGTELFDVVGEIRPGADLALVVTRQNGEKLDVAVTCRLDTADEVHVYQAGGVLQRFAQDFLAQ

SEQ ID NO: 66786 - DNA, 2724 bp, Bacillus halodurans C-125
  CDS (1)..(2724): transl_table=11
atgacaaagacaaacgatgtgtttaatgccaaatctacattcgatgtagacggaaaaacgtaccactactattccttggaagccttagagaaggcgggagaaggtaacgtttccaagttaccgtattccatcaaggttcttcttgaatccgtcttgcgccaatatgacggctatgtgattaaggaagaacatgtgaaaaaccttgcaaagtggggtactgatcaattaaaggatatcgatgtaccgtttaaaccttcacgtgtcattttgcaagactttacaggtgttccggctgtcgttgacctagcgtcacttcgtaaagcgatggctgacatgggaggttccgcagatcagatcaatcctgagattccagttgatctcgtcattgaccactctgtacaagtggacaagttcggaacgaacgattcccttgagttcaacatgaacctggaatttcaacgaaatgaagagcgttacaagtttttaaattgggcgaagaaagcatttaacaattatcgtgctgtaccaccggcaaccggaattgttcaccaagtaaaccttgagtatattgcaaacgttgtccatgcgaacgagcaggatggggaaaaagttgcgttccctgatactcttgtaggtactgattctcatacaacgatgattaacggtctcggggttctcggctggggtgttggcggaattgaagctgaggcaggaatgcttggacaaccgtcctacttcccagttccagaagtaattggcgtcaaattcacaggaactttaccgagcggaacgacagcaacagatgttgccttaaaagttacacaagttcttcgcgagaaaaaagtagttggaaaatttgtggaatatttcggtccaggccttgccgaaatgccgttagcagaccgcgcgacaatttcgaacatggcaccagaatacggagcaacatgcggattcttcccagttgatgatgaagcgttagattacatgcgtctcaccggtcgttctgaagagcaaatcaagcttgtagaagcttattgcaaagctaatggcctcttttatgtgcctggtgaaacaccagacccaacgtacacagacgttgttgaaatcgacctttcaaaaatcgaggcaaacctttccggtccaaaacgtccgcaagaccttattcctctttcaaaaatgcaagaggagttccaccgtgcggttgtggcaccacaaggaacacaaggcctcgggttaacagaagatgaatttaataaagaagtgaaagtctcgtttaaagacggtcgtgaaacaaccatgcgcacaggttcgattgcgattgcagcgattacaagctgtacgaacacgtcaaacccatacgtgctaatcggagcagggcttgtcgcaaagaaagcggttgagcttggtctagatgtgcctgaatatgttaaaacgtcgcttgctcctggttcaaaggtcgtaacaggatatcttcgtgattctggtttacttccataccttgagcaaattggctttaacatcgttggttatggctgtacgacatgtatcggaaactccggtcctctcgaggatgaaattgaagaggcggttgccgctaacgatttaaccgtgacatctgttctctcaggtaaccgtaactttgaaggtcggatccatccgctcgtcaaagcgaactatttagcatcaccgccgcttgttgttgcctatgctcttgcaggtacggttgacattgatttattaaacgatccaattggaaaagacaaaaatggcaacgatgttttctttaacgacattttcccgtccgctgacgaaattaagaaagtcgttgaagaaacagttacacctgaattgttccgtagagagtacgaaaatgtctttacgagcaatgaacgttggaatgaaatcgaaacaacggatgaaccgctttataagtgggatgatgattcaacatatatccaaaacccaccgttctttgaagatctttcaccagatccagaagaaattaaaccactttctggtttgcgtgtcatcggtaaatttggagatacagtgacgactgaccatatctctccagcaggagcgattggtaaaaatacgccagctggtcagtacttaatttcaaaaggggtagaaccaaaagacttcaactcctacggatctcgtcgtggtaaccatgaagtcatgatgcgcggaacgtttgcaaacattcggattcgcaaccaaattgccccaggaactgaaggtggttacacgacctactggccaacgggagaagtcacaagcatttatgatgctgcgatgcgttataaagaggaaggtacaggccttgccattcttgcagggaaagattatggtatgggttcctctcgtgactgggcagcgaaaggtacgaaccttctcggcattaaaacggttattgctgaaagctacgagcgtattcaccgtagcaacctcgtccttatgggtgttcttccgcttcaatttaaggaaggcgacaatgctgaatctcttggcttaacaggaaaagaaacatttgaagtccacattacaaacgatgtgaagccgcgtgaaacggtaaaggttgtagcaacggacgaagcgggtaacaaaacagaatttgatgttctcgtacgctttgacagtgaagtggaattagattactaccgtcatggtggaatcttacaaatggttcttcgtaacaaatttacccaaatcaaaaagtaa

SEQ ID NO: 66787 - protein, 907 aa, Bacillus halodurans C-125
MTKTNDVFNAKSTFDVDGKTYHYYSLEALEKAGEGNVSKLPYSIKVLLESVLRQYDGYVIKEEHVKNLAKWGTDQLKDIDVPFKPSRVILQDFTGVPAVVDLASLRKAMADMGGSADQINPEIPVDLVIDHSVQVDKFGTNDSLEFNMNLEFQRNEERYKFLNWAKKAFNNYRAVPPATGIVHQVNLEYIANVVHANEQDGEKVAFPDTLVGTDSHTTMINGLGVLGWGVGGIEAEAGMLGQPSYFPVPEVIGVKFTGTLPSGTTATDVALKVTQVLREKKVVGKFVEYFGPGLAEMPLADRATISNMAPEYGATCGFFPVDDEALDYMRLTGRSEEQIKLVEAYCKANGLFYVPGETPDPTYTDVVEIDLSKIEANLSGPKRPQDLIPLSKMQEEFHRAVVAPQGTQGLGLTEDEFNKEVKVSFKDGRETTMRTGSIAIAAITSCTNTSNPYVLIGAGLVAKKAVELGLDVPEYVKTSLAPGSKVVTGYLRDSGLLPYLEQIGFNIVGYGCTTCIGNSGPLEDEIEEAVAANDLTVTSVLSGNRNFEGRIHPLVKANYLASPPLVVAYALAGTVDIDLLNDPIGKDKNGNDVFFNDIFPSADEIKKVVEETVTPELFRREYENVFTSNERWNEIETTDEPLYKWDDDSTYIQNPPFFEDLSPDPEEIKPLSGLRVIGKFGDTVTTDHISPAGAIGKNTPAGQYLISKGVEPKDFNSYGSRRGNHEVMMRGTFANIRIRNQIAPGTEGGYTTYWPTGEVTSIYDAAMRYKEEGTGLAILAGKDYGMGSSRDWAAKGTNLLGIKTVIAESYERIHRSNLVLMGVLPLQFKEGDNAESLGLTGKETFEVHITNDVKPRETVKVVATDEAGNKTEFDVLVRFDSEVELDYYRHGGILQMVLRNKFTQIKK

SEQ ID NO: 66788 - DNA, 2733 bp, Pseudomonas aeruginosa PAO1
  CDS (1)..(2733): transl_table=11
atgcctgctttggacagcctgaaaacccttcgcagtctcgctgtggacggcaagacctaccactactacagcctcccggaagccgcccggaccctgggcgatctcggcaagctgccgatgtcgctgaaggtcctgctggaaaacctcctgcgctgggaggacggcagcaccgtcaccggcgacgacctcaaggccctcgccggctggctcagggagcgccgttccgaccgcgagatccagtaccgcccggcgcgggtcctgatgcaggacttcaccggggttcccgcggtggtcgacctggccgccatgcgcgcggccatggccaaggccggcggcgacccgcagaagatcaacccgctgtcgccggtggacctggtcatcgaccactcggtgatggtcgacaagttcgccagcgaatcggccttcgaacagaacgtcgagatcgagatgcagcgcaacggcgaacgctacgccttcctgcgctggggccagaacgccttcgacaacttcagcgtggtaccgccgggcaccggcatctgccaccaggtcaacctggagtacctgggccgcacggtctggaccaaggacgaggatggcaggacctacgccttccccgacaccctggtcggcaccgactcccacaccaccatgatcaacggcctcggcgtgctcggctggggcgtcggcggcatcgaggcggaagccgccatgctcggccagccggtatcgatgctgatccccgaggtcatcggcttcaagctcaccggcaagctgcgcgagggcatcaccgccaccgacctggtgctgaccgtcacgcagatgctgcgcaagaagggcgtggtggggaaattcgtcgagttctacggcgacggcctggccgacctgcccctggcggaccgcgccaccatcgccaacatggccccggaatacggcgccacctgcggcttcttcccggtggacgagatcaccctcggctacctgcgcctgtccggacgtccggaaagcacggtcaagctggtcgaggcctacagcaaggaacagggcctgtggcgcgagaagggccacgagccggtgttcaccgacaccctgcacctggacatgggcgaagtcgaggccagcctggccggaccgaagcgcccgcaggaccgcgtggccctgcagaacgtcgccagcgccttcaacgagttcctcggcctgcaactgcatccctccagcaccgaagaaggccgcctgctcagcgagggcggcggcggcaccgcggtcggcgccaacgccgccttcggcgagatcgactaccagcacgacggccagacccaccgcctgaagaacggcgcggtggtgatcgccgccatcacctcctgcaccaacacctccaaccccagcgtgatgatggccgccggcctgctggcgaagaaggcagtggagaaaggcctgcaacgcaagccctgggtgaagagttcgctggcgccgggctccaaggtggtcaccgactacttcaaggccgccggcctgacccgctacctcgacgaactcggcttcgatctggtcggctacggctgcaccacctgcatcggcaactccggcccgctgctggagccgatcgagaaagccatccagcaggccgacctgaccgtcgcctcggtactctccggcaaccgcaacttcgaaggccgcgtgcacccgttggtgaagaccaactggctggcctcgccgccgctggtggtggcctacgccctggccggcagcgtgcggatcaacctcagcgaggaaccgctgggcaccggcaaggacggccagccggtctacctgaaggacatctggccgagccagaaggaaatcgccgaggcgatccagaaggtcgacaccgagatgttccacaaggagtacgccgaggtcttcgccggcgacgagaaatggcaggcgatccaggtgccgcagtcggacacctacgagtggcaggccgactccacctacatccagcatccacccttcttcgaacacatcgccgaggcgccgccggccatcgccgacgtcgagcaggcgcgggtgctggcggtgctgggcgactcggtgaccaccgaccacatctcccctgccggcaacatcaaggccgacagcccggccggccgctacctgcgcgagcacggcgtggaaccgaaggacttcaactcctacggctcccgtcgcggcaaccatgaggtgatgatgcgcggcaccttcgccaacatccgcatcaagaacgagatgctcggcggcgaggaaggcggcaataccctgtacgtgcccagcggcgagaaactggcgatctacgacgcggccatgcgttaccaggaggacggcaccccgctggtgatcgtcgccggcaaggaatacggcaccggctcgtcgcgcgactgggcggccaagggtaccaacctgctgggcgtgaaggcggtgatcgcggagagcttcgagcgcatccaccgctccaacctggtcggcatgggcgtgctgccgttgcagttcgagaacggccaggaccgcaagagcctgaagctgaccggcaaggaggtgctgaacatccgcggcctcggcggcgaactcaaaccacacatgccgctcagcgtggaagtgacccgcgaggacggcagccaggacagcttcaaggtcctctgccgcatcgacaccctcaacgaggtcgagtatttcaaggccggcggcatcctccactacgtgctgcgcagcatgctctga

SEQ ID NO: 66789 - protein, 910 aa, Pseudomonas aeruginosa PAO1
MPALDSLKTLRSLAVDGKTYHYYSLPEAARTLGDLGKLPMSLKVLLENLLRWEDGSTVTGDDLKALAGWLRERRSDREIQYRPARVLMQDFTGVPAVVDLAAMRAAMAKAGGDPQKINPLSPVDLVIDHSVMVDKFASESAFEQNVEIEMQRNGERYAFLRWGQNAFDNFSVVPPGTGICHQVNLEYLGRTVWTKDEDGRTYAFPDTLVGTDSHTTMINGLGVLGWGVGGIEAEAAMLGQPVSMLIPEVIGFKLTGKLREGITATDLVLTVTQMLRKKGVVGKFVEFYGDGLADLPLADRATIANMAPEYGATCGFFPVDEITLGYLRLSGRPESTVKLVEAYSKEQGLWREKGHEPVFTDTLHLDMGEVEASLAGPKRPQDRVALQNVASAFNEFLGLQLHPSSTEEGRLLSEGGGGTAVGANAAFGEIDYQHDGQTHRLKNGAVVIAAITSCTNTSNPSVMMAAGLLAKKAVEKGLQRKPWVKSSLAPGSKVVTDYFKAAGLTRYLDELGFDLVGYGCTTCIGNSGPLLEPIEKAIQQADLTVASVLSGNRNFEGRVHPLVKTNWLASPPLVVAYALAGSVRINLSEEPLGTGKDGQPVYLKDIWPSQKEIAEAIQKVDTEMFHKEYAEVFAGDEKWQAIQVPQSDTYEWQADSTYIQHPPFFEHIAEAPPAIADVEQARVLAVLGDSVTTDHISPAGNIKADSPAGRYLREHGVEPKDFNSYGSRRGNHEVMMRGTFANIRIKNEMLGGEEGGNTLYVPSGEKLAIYDAAMRYQEDGTPLVIVAGKEYGTGSSRDWAAKGTNLLGVKAVIAESFERIHRSNLVGMGVLPLQFENGQDRKSLKLTGKEVLNIRGLGGELKPHMPLSVEVTREDGSQDSFKVLCRIDTLNEVEYFKAGGILHYVLRSML

SEQ ID NO: 66790 - DNA, 2607 bp, Neisseria meningitidis MC58
  CDS (1)..(2607): transl_table=11
atggctgccaaccaacgttaccgcaaaccgctgcccggtacggatttggaatactacgacgcgcgtgcggcgtgtgaggacatcaagcccggctcttacgacaagctgccttacacgagccgcattttggcggagaatttggtcaaccgcgcggacaaagtcgatttgccgacgctgcaaagctggctggggcagttgatagaagggaagcaggaaatcgactttccgtggtatccggcgcgggtggtgtgccacgatattctggggcagaccgcgttggtggatttggcaggcctgcgcgatgcgattgccgaaaaaggcggcgatcctgccaaagtgaatccggtggtgcaaacccagctcatcgtcgaccactctctggcggtggagtgcggcggttacgatcctgatgccttccgcaaaaaccgcgaaatcgaagaccgccgtaacgaagaccgtttccacttcatcaactggacaaaaaccgcgtttgaaaatgtggacgtgattccggcgggcaacggcatcatgcaccaaatcaatctagaaaaaatgtcgcccgtcgtccaagtcaaaaacggcgtggctttccccgatacctgcgtcggtactgactcacatacgccgcacgtcgattcattgggcgtgatttccgtgggcgtgggcggattggaagcggaaaccgtaatgctgggacgcgcgtccatgatgcgcctgcccgatattgtcggcgttgagctgaacggcaaacggcaggcgggcattacggcgacggatattgtgttggcactgaccgagtttctgcgcaaagaacgcgtggtcggggcgtttgtcgaattcttcggcgagggcgcgagaagcctgtctatcggcgaccgcgcgaccatttccaacatgacgccggagttcggcgcgactgccgcgatgttcgctattgatgagcaaaccattgattatttgaaactgaccggacgcgacgacgcgcaggtgaaattggtggaaacctacgccaaaaccgcaggcttgtgggcagatgccttgaaaaccgccgtttatcctcgcgttttgaaatttgatttgagcagcgtaacgcgcaatatggcaggcccaagtaacccgcatgcccgttttgcgaccgccgatttggcggcgaaagggctggcgaagccttacgaagagccttcggacggccaaatgcccgacggctcggtcatcatcgccgcgattaccagttgcaccaacacttccaacccgcgcaacgttgttgccgccgcgctcttggcacgcaatgccaaccgtctcggcttgaaacgcaaaccttgggtgaaatcttcgtttgccccgggttcaaaagtagccgaaatctatttgaaagaagcgggcctgttgcccgaaatggaaaaactcggcttcggtatcgtcgccttcgcctgcaccacctgcaacggcatgagtggcgcgctggatccgaaaatccagaaagaaatcatcgaccgcgatttgtacgccaccgccgtattatcaggcaaccgcaacttcgacggccgtatccacccgtatgcgaaacaggctttcctcgcttcgcctccgttggtcgttgcctacgcgctggcaggcagtatccgtttcgatattgaaaacgacgtactcggcgttgcagacggcaaggaaatccgcctgaaagacatttggcctgccgatgaagaaatcgatgccgtcgttgccgaatatgtgaaaccgcagcagttccgcgatgtgtatgtaccgatgttcgacaccggcacagcgcaaaaagcacccagtccgctgtacgattggcgtccgatgtccacctacatccgccgtccgccttactgggaaggcgcgctggcaggggaacgcacattaagaggtatgcgtccgctggcgattttgcccgacaacatcaccaccgaccacctctcgccgtccaatgcgattttggccgtcagtgccgcaggcgagtatttggcgaaaatgggtttgcctgaagaagacttcaactcttacgcaacccaccgcggcgaccacttgaccgcccaacgcgctaccttcgccaatccgaaactgtttaacgaaatggtgaaaaacgaagacggcagcgtgcgccaaggctcgttcgcccgcgtcgaacccgaaggcgaaaccatgcgcatgtgggaagccatcgaaacctatatgaaccgcaaacagccgctcatcatcattgccggtgcggactatggtcaaggctcaagccgcgactgggctgcaaaaggcgtacgcctcgccggcgtagaagcgattgttgccgaaggcttcgagcgtatccaccgcaccaaccttatcggcatgggcgtgttgccgctgcagttcaaacccgacaccaaccgccataccctgcaactggacggtacggaaacctacgacgtggtcggcgaacgcacaccgcgctgcgacctgaccctcgtgattcaccgtaaaaacggcgaaaccgttgaagttcccgttacctgctgcctcgatactgcagaagaagtattggtatatgaagccggcggcgtgttgcaacggtttgcacaggattttttggaagggaacgcggcttag

SEQ ID NO: 66791 - protein, 868 aa, Neisseria meningitidis MC58
MAANQRYRKPLPGTDLEYYDARAACEDIKPGSYDKLPYTSRILAENLVNRADKVDLPTLQSWLGQLIEGKQEIDFPWYPARVVCHDILGQTALVDLAGLRDAIAEKGGDPAKVNPVVQTQLIVDHSLAVECGGYDPDAFRKNREIEDRRNEDRFHFINWTKTAFENVDVIPAGNGIMHQINLEKMSPVVQVKNGVAFPDTCVGTDSHTPHVDSLGVISVGVGGLEAETVMLGRASMMRLPDIVGVELNGKRQAGITATDIVLALTEFLRKERVVGAFVEFFGEGARSLSIGDRATISNMTPEFGATAAMFAIDEQTIDYLKLTGRDDAQVKLVETYAKTAGLWADALKTAVYPRVLKFDLSSVTRNMAGPSNPHARFATADLAAKGLAKPYEEPSDGQMPDGSVIIAAITSCTNTSNPRNVVAAALLARNANRLGLKRKPWVKSSFAPGSKVAEIYLKEAGLLPEMEKLGFGIVAFACTTCNGMSGALDPKIQKEIIDRDLYATAVLSGNRNFDGRIHPYAKQAFLASPPLVVAYALAGSIRFDIENDVLGVADGKEIRLKDIWPADEEIDAVVAEYVKPQQFRDVYVPMFDTGTAQKAPSPLYDWRPMSTYIRRPPYWEGALAGERTLRGMRPLAILPDNITTDHLSPSNAILAVSAAGEYLAKMGLPEEDFNSYATHRGDHLTAQRATFANPKLFNEMVKNEDGSVRQGSFARVEPEGETMRMWEAIETYMNRKQPLIIIAGADYGQGSSRDWAAKGVRLAGVEAIVAEGFERIHRTNLIGMGVLPLQFKPDTNRHTLQLDGTETYDVVGERTPRCDLTLVIHRKNGETVEVPVTCCLDTAEEVLVYEAGGVLQRFAQDFLEGNAA

SEQ ID NO: 66792 - DNA, 1986 bp, Halobacterium sp. NRC-1
  CDS (1)..(1986): transl_table=11
atgggacagacgcttaccgaaaaaattctcgatgaccacctcgtcgagggcgacctccagcccggcgaggagatcggcatcgagatcgatcagacgctctcccaagacaccactgggacgatggtctggctgcagttcgaggcactcgaaatggacgaagtccagaccgagctcgccgcgcagtactgcgaccatcagacctaccagttcgacttcaagaacaccgacgaccaccgcttcctgcggtcggccgccggcacctacggcgcgtatttctcccgacctggcaacggcatctgccacaacgtccacaaggagaacttcgccgcgcccggcaagaccctgctcgggtccgacagccacacgccgacccccggcggtctcggccagctcgccatcggcgcgggcggcatcgacatcgccgtcgcgatgggcggcggcgcgtactacgtcgagatgcccgaggtcgtcaacgtccggctcgaaggcgagctccccgagtgggccaccgccaaagacgtcatcctcgagctcctgcgccgcctctccgtgaagggtggcgtcggcaaggtgctcgagtacaccgggcctggcgtggagtcgctgtccgtcccggagcgaaccaccatcacgaacatgggcaccgagctcggtgcgacgtcctcgatcttcccgacggacgaccgcaccgaagactggctcgcccggttcgaccgcgaagacgagttcgtcgacctccaggccgacgccgacgccgagtacgccgacgagatcgtcgtcgacctctcggatctcgaaccgctcatcgcagagccgtcgatgcccgacaacgtcgtcccggtccgcgaggtcgcgggccaggaggtcgaacaggtcatggtcggctcctgcacgaacggcgcctacgaggacgtcctgccggccgccaagatgctggagggccgcgaggtctccaagcacaccgagatgatcgtcgcgccgggctccaagcaggcctccgagatgctcgcccgcgagggctggacggccgagatgatggccgccggcgtgaacttcagcgaggcgacgtgcggtgcctgtatcggcatcggtcacgtgccggcctccgattcggtgagcctccggacgttcaaccgcaacttcgagggccggtcgggcatcgaggacgactccgtgtacctctgctcgccggaggtcgcgaccgcgtcggcgatcgccggcgagatcgtcgatccgcgcgacctctccgatgacctcggtgacctcgaggctcccggcttcgagatggggacctcgtactccggcggctacggggcgggcgacactgacatcatcacgcccgaggagtccatcgacgacgacctcatcaagggcccgaacatctccagtgtaccggtcaaagacccgctgggtgcggacgtgcgtggtgagaccctgctgaagatgcaggacaacatcacgaccgaccacatcattccggcgacctccgacatcctgaagttccgctcgaacatcgagcggctctcggagttcaccctctcgcgcatcgacgacacgttcgccgagcgcgcgaaggcagccgacagcggcgtgctcgttgccggggagaactacgggcaggggtcctcccgcgagcacgcggcgatgtgcccgatgttcctcggcgtggagtccgttctcgcgcagagcttcgcccgcatccacaaggcgaacctcttcaacttcgggatcctgccgctgaacatcgacgaggagacgtacgcccgcatcgagcagggcgacgacgtcgaggtcgtcgacgacgttgcggccgccgtcgcggacggccaggaggagttcacggtccgcgtgaacgacgactgggaggcgaccgcgaccctcgacgcctcggagcgcgagcgccgcacgctcgccgccggtggcaagctgtcgctgacgaagcagcgccacagcgagggctcgggcgccgcgcccgccgacgactga

SEQ ID NO: 66793 - protein, 661 aa, Halobacterium sp. NRC-1
MGQTLTEKILDDHLVEGDLQPGEEIGIEIDQTLSQDTTGTMVWLQFEALEMDEVQTELAAQYCDHQTYQFDFKNTDDHRFLRSAAGTYGAYFSRPGNGICHNVHKENFAAPGKTLLGSDSHTPTPGGLGQLAIGAGGIDIAVAMGGGAYYVEMPEVVNVRLEGELPEWATAKDVILELLRRLSVKGGVGKVLEYTGPGVESLSVPERTTITNMGTELGATSSIFPTDDRTEDWLARFDREDEFVDLQADADAEYADEIVVDLSDLEPLIAEPSMPDNVVPVREVAGQEVEQVMVGSCTNGAYEDVLPAAKMLEGREVSKHTEMIVAPGSKQASEMLAREGWTAEMMAAGVNFSEATCGACIGIGHVPASDSVSLRTFNRNFEGRSGIEDDSVYLCSPEVATASAIAGEIVDPRDLSDDLGDLEAPGFEMGTSYSGGYGAGDTDIITPEESIDDDLIKGPNISSVPVKDPLGADVRGETLLKMQDNITTDHIIPATSDILKFRSNIERLSEFTLSRIDDTFAERAKAADSGVLVAGENYGQGSSREHAAMCPMFLGVESVLAQSFARIHKANLFNFGILPLNIDEETYARIEQGDDVEVVDDVAAAVADGQEEFTVRVNDDWEATATLDASERERRTLAAGGKLSLTKQRHSEGSGAAPADD

SEQ ID NO: 66794 - DNA, 2607 bp, Neisseria meningitidis Z2491
  CDS (1)..(2607): transl_table=11
atggctgccaaccaacgttaccgcaaaccgctgcccggtacggatttggaatactacgacgcgcgtgcggcgtgtgagggcatcaaacccggctcttacgacaagctgccttacacgagccgcattttggcggagaatttggtcaaccgcgcggacaaagtcgatttgccgacgctgcaaagctggctgggtcagctgattgagggaaaacaggaaatcgactttccttggtatccggcgcgggtggtgtgccacgatattctggggcagaccgcgttggtggatttggcaggtctgcgcgatgcgattgccgaaaaaggcggcgatcctgccaaagtgaatccggtggtgcaaacccagctcatcgtcgaccactcgctggcggtggaatgcggcggctacgaccccgatgcgttccgcaaaaaccgcgaaatcgaagacagacgtaacgaagaccgtttccacttcatcaactggacaaaaaccgcttttgaaaatgtggacgtgattccggcgggcaacggcatcatgcaccaaatcaatctagaaaaaatgtcgcccgtcgtccaagtcaaaaacggcgtggctttccccgatacctgcgtcggcacggattcgcacacgccacacgtcgatgcgctgggcgtgatttccgtgggcgtgggcggattggaagcggaaaccgtaatgctgggacgcgcgtccatgatgcgcctgcccgatattgtcggcgttgagctgaacggcaaacggaaggcgggcattacggcgacggatattgtgttggcactgaccgagtttctgcgcaaagaacgcgtggtcggggcgtttgtcgaattcttcggcgagggcgcgagaagcctgtctatcggcgaccgcgcgaccatttccaacatgacgccggagttcggcgcgactgccgcgatgttcgctattgatgagcaaaccattgattatttgaaactgaccggacgcgacgacgcgcaggtgaaattggtggaaacctacgccaaaaccgcaggcttgtgggcagatgccttgaaaaccgccgtttatccgcgcgttttgaaatttgatttgagcagcgtaacgcgcaatatggcaggcccgagcaacccgcacgcgcgttttgcgaccgccgatttggccggcaaaggcttggctaaaccttacgaagagccttcagacggccaaatgcctgacggtgcagtgattattgccgcgattacttcctgtaccaatacttccaatccgcgcaacgttgtcgccgccgcgctgttggcacgcaatgccaaccgcctcggcttgcaacgcaaaccttgggtgaaatcttcgtttgccccgggttcaaaagtagccgaaatctatttgaaagaagcagatctgctgcccgaaatggaaaaactcggcttcggtatcgttgccttcgcatgtaccacctgtaacggcatgagcggcgcgctggatccgaaaatccagaaagaaatcatcgaccgcgatttgtacgccaccgccgtattgtcaggcaaccgcaactttgacggccgtatccatccgtatgcgaaacaggctttcctcgcttcgcctccgttggtcgttgcctacgcgctggcaggcagcatccgtttcgatattgaaaacgacgtactcggcgttgcagacggcaaagaaatccgcctgaaagacatttggcctaccgatgaagaaatcgatgccatcgttgccgaatatgtgaaaccgcagcaatttcgcgacgtttatatcccgatgttcgacaccggcacagcgcaaaaagcaccaagcccgctgtacgactggcgtccaatgtctacctatatccgccgcccaccttactgggaaggcgcactggcaggggaacgcacattaagcggtatgcgtccgctggcgattttgcccgacaacatcaccaccgaccatctctcgccatccaatgcgattttggcaagcagtgccgcaggcgaatatttggcaaaaatgggtttgcctgaagaagacttcaactcttacgcaacccaccgtggcgaccacttgaccgcccaacgcgcaaccttcgccaatccgaaactgtttaacgaaatggtgagaaacgaagacggcagcgtacgccaaggttcgctggcacgcgttgaacccgaaggccaaaccatgcgcatgtgggaagccatcgaaacctatatgaaccgcaaacagccgctcatcatcattgccggcgcggactacggtcaaggctcaagccgcgactgggctgcaaaaggcgtacgcctcgccggcgtggaagcgattgttgccgaaggcttcgagcgtatccaccgcaccaacttgatcggtatgggcgtgttgccgctgcagttcaaaccgggtaccaaccgccacaccctgcaactggacggtacggaaacctacgacgttgtcggcgaacgcacaccgcgctgcgacctgacccttgtgattcaccgtaaaaacggcgagaccgtcgaagtccccattacctgccgcctcgataccgcagaagaagtgttggtatatgaagccggtggcgtattgcaacggtttgcacaggattttttggaagggaacgcggcttag

SEQ ID NO: 66795 - protein, 868 aa, Neisseria meningitidis Z2491
MAANQRYRKPLPGTDLEYYDARAACEGIKPGSYDKLPYTSRILAENLVNRADKVDLPTLQSWLGQLIEGKQEIDFPWYPARVVCHDILGQTALVDLAGLRDAIAEKGGDPAKVNPVVQTQLIVDHSLAVECGGYDPDAFRKNREIEDRRNEDRFHFINWTKTAFENVDVIPAGNGIMHQINLEKMSPVVQVKNGVAFPDTCVGTDSHTPHVDALGVISVGVGGLEAETVMLGRASMMRLPDIVGVELNGKRKAGITATDIVLALTEFLRKERVVGAFVEFFGEGARSLSIGDRATISNMTPEFGATAAMFAIDEQTIDYLKLTGRDDAQVKLVETYAKTAGLWADALKTAVYPRVLKFDLSSVTRNMAGPSNPHARFATADLAGKGLAKPYEEPSDGQMPDGAVIIAAITSCTNTSNPRNVVAAALLARNANRLGLQRKPWVKSSFAPGSKVAEIYLKEADLLPEMEKLGFGIVAFACTTCNGMSGALDPKIQKEIIDRDLYATAVLSGNRNFDGRIHPYAKQAFLASPPLVVAYALAGSIRFDIENDVLGVADGKEIRLKDIWPTDEEIDAIVAEYVKPQQFRDVYIPMFDTGTAQKAPSPLYDWRPMSTYIRRPPYWEGALAGERTLSGMRPLAILPDNITTDHLSPSNAILASSAAGEYLAKMGLPEEDFNSYATHRGDHLTAQRATFANPKLFNEMVRNEDGSVRQGSLARVEPEGQTMRMWEAIETYMNRKQPLIIIAGADYGQGSSRDWAAKGVRLAGVEAIVAEGFERIHRTNLIGMGVLPLQFKPGTNRHTLQLDGTETYDVVGERTPRCDLTLVIHRKNGETVEVPITCRLDTAEEVLVYEAGGVLQRFAQDFLEGNAA

SEQ ID NO: 66796 - DNA, 2721 bp, Deinococcus radiodurans R1
  CDS (1)..(2721): transl_table=11
atgagcgacaaggcgatgaacctgtttggcgcccgtgacaccttgcaggtgcccggcagcgacaagaagctgtacttttacaacctcaacaagctccagggccacgacgtgtcgcgtctgcccgtcagcatcaaggtgctgctggaaagcgtgctgcgcgaagccaacgactatgacgtgcgccgtgaagacgtggaaaccgtcgccggctggagcgccaccaaccccgaagtcgaaattcccttcaagcccgcccgcgtgattttgcaggactttaccggcgtgcccgccgtggtggacctcgccgccatgcgcagcgcgatggtcaagctcggcggcgaccccagcaagatcaacccgctgattccggtggacctcgtcatcgaccactcggtgcaggtggacgagttcggcaccgagttcgcgctcgccaacaacatggcgctggaattcgagcgcaaccgcgaacgctacgagttcctgcgctggggccagcaggccttcgacaacttcggcgtggtgccccctgccagcggcatcgtgcaccaggtcaacctggaatacctcgccaagggcgtgcagagccgcgctgaagacgacggcgaagtcgtgtaccccgacagcctggtcggcaccgactcgcacaccaccatgatcaacggcctgggcatcgtgggctggggcgtgggcggcatcgaagccgaagcggtgatgctgggccagcccatctacatgctgatgcccgaagtcatcggcttcaagatcactggcgcgatgcccgaaggcgccaccgccaccgacctcgcgctgcgcgtgacccagatgctgcgcgagaagggcgtggtcggcaagttcgtcgagttctacggcgcgggcctgagcaacatgaccctgcccgaccgcgcgacgattgccaacatggcccccgaatacggcgccaccatgggctttttcccggtggacgacgaagcgctgcgctacctgcgccgcacgggacgtctggaagacgaaatcggtctggtcgaggcctactacaaggcccagggcatgttccgcaccgacgaaacgcccgaccccgtcttcaccgacaccatcgaactcgacctcgccaccatcgttcctagcctcgccggccccaagcgcccgcaggaccgcgtgaacctcagcgacatgcacagcgtgttcaacgaagcgctcaccgcgccggtcaagaaccgtggctttgaactcggcagcgacaagctggacgcccagggcaccatcggcggtaccgacatcaagatcggccacggcgccgtgaccctcgcctccatcacctcctgcaccaacacctccaaccccagcgtgctcatcgccgccggtctggtcgccaagaaggccgtcgagaagggcctgaagaccaagccctgggtcaagaccagcctcgcccccggctcgcgcgtggtcaccgagtacctcgaaaccgccgggctccagcagtacctcgaccagatcggcttcaacaccgtgggctacggctgcatgacctgcatcggcaactcgggcccgctgcctgaacccgtcgtcgaagcgattcaggaaggcgacctggtggtggcctcggtcctgtcgggcaaccgcaacttcgaaggccgcgtcaacccccacatcaaggccaactacctcgcttctccccccctggtcgtcgcctacgcgctcgccggcacggtcgtcaacgacatcgtgaacgacgccatcggccaggacagcaacggtcaggacgtgttcctgaaagacatctggcccaccaacgccgagattcaggaagcgatggaccgctccatcaacgccgagatgttcaagaaggtctacgacggcatcgagaagagcaacgccgactggaacgccatccccgtcgccgaaggcgcgctgttcgactggaaggaagacagcacatacatccagaacccgcccttcttcgacaccctcgcgggcggcgcccacgaaatcgagagcatcaagggtgcgcgcgccctggtcaaggtcggcgacagcgtgaccaccgaccacatctcccccgccggttcgttcaaggccgacacccccgctggccgctacctgaccgagcgcggtattgcccccaaggacttcaactcctacggctcgcgccgtggcaacgaccgcatcatgacgcgcggcacctttgccaacatccgcctgaagaaccaactcgcccccggcaccgaaggcggcttcaccaccaacttcctgaacggcgaagtcaccagcatcttcgacgcttccaccgcctacaaggaagcgggcgtgcccctcgtcgtgctggccgggaaggactacggcatgggctccagccgtgactgggccgccaaaggcaccttcctgctgggcgtgaaggccgtgattgccgaaagcttcgagcggatccaccgctccaacctggtcggcatgggcgtgctgcccctccagtacaagaacggcgaaaccgccgacagcctgggcatcaacggcgacgaaaccttcgagttcgtgctgcccggcgacctcaagccccgtcaggacgtgaccgtgaaggtcactggcaaggacggcaacacccgcgacatcaccgtgatgtgccgcatcgatacccccgtggaaatcgattactacaagaacggtggcatcctgcaaaccgtgctgcgcggcatcctgagcaagagccagggcgaagtcaaggcgtaa

SEQ ID NO: 66797 - protein, 906 aa, Deinococcus radiodurans R1
MSDKAMNLFGARDTLQVPGSDKKLYFYNLNKLQGHDVSRLPVSIKVLLESVLREANDYDVRREDVETVAGWSATNPEVEIPFKPARVILQDFTGVPAVVDLAAMRSAMVKLGGDPSKINPLIPVDLVIDHSVQVDEFGTEFALANNMALEFERNRERYEFLRWGQQAFDNFGVVPPASGIVHQVNLEYLAKGVQSRAEDDGEVVYPDSLVGTDSHTTMINGLGIVGWGVGGIEAEAVMLGQPIYMLMPEVIGFKITGAMPEGATATDLALRVTQMLREKGVVGKFVEFYGAGLSNMTLPDRATIANMAPEYGATMGFFPVDDEALRYLRRTGRLEDEIGLVEAYYKAQGMFRTDETPDPVFTDTIELDLATIVPSLAGPKRPQDRVNLSDMHSVFNEALTAPVKNRGFELGSDKLDAQGTIGGTDIKIGHGAVTLASITSCTNTSNPSVLIAAGLVAKKAVEKGLKTKPWVKTSLAPGSRVVTEYLETAGLQQYLDQIGFNTVGYGCMTCIGNSGPLPEPVVEAIQEGDLVVASVLSGNRNFEGRVNPHIKANYLASPPLVVAYALAGTVVNDIVNDAIGQDSNGQDVFLKDIWPTNAEIQEAMDRSINAEMFKKVYDGIEKSNADWNAIPVAEGALFDWKEDSTYIQNPPFFDTLAGGAHEIESIKGARALVKVGDSVTTDHISPAGSFKADTPAGRYLTERGIAPKDFNSYGSRRGNDRIMTRGTFANIRLKNQLAPGTEGGFTTNFLNGEVTSIFDASTAYKEAGVPLVVLAGKDYGMGSSRDWAAKGTFLLGVKAVIAESFERIHRSNLVGMGVLPLQYKNGETADSLGINGDETFEFVLPGDLKPRQDVTVKVTGKDGNTRDITVMCRIDTPVEIDYYKNGGILQTVLRGILSKSQGEVKA

SEQ ID NO: 66798 - DNA, 2568 bp, Sulfolobus solfataricus P2
  CDS (1)..(2568): transl_table=11
atgccaaataaattttcatacaaaggctcagagatatattattatcccttaaaagaattggaagagaaaggttacaaaataagtgatctaccctattcgataagaatacttatcgaaaatgtatacagaaatctagatgggagtaaaattacagaggaagatcttgagaatataacaaaatggaaaataggagaggaattagcttttatgccaactagagttgtaatgcaagattacactggagttcccttactagtggatttagctgcgatgagggagaagatgattcaactgaaaagggatcccaaaatgattaacccagtggtccctgctgacctagttatagatcactcagtacaagttgactattatggcacagtttactcgctagagtttaatatgaaaaaagaatttgaaagaaatttagaaagatatcagtttttaaaatgggctcaaggtgcttttaggaacttaagaatagttcctccaggtaagggtataattcatcaagtaaacttagagtacctaagtactgtagtcgcaaaggctgaagtcaaaggtttattaacagcgtttccagaggtaataattgggacagattctcacactactatgattgaaggtctgggaatcctaggatggggtgttggcggattagaagcagaggctgtacttttaggagaaccatactaccttaatgtaccagaggtaataggtgtgagattaactggagaaattcaagaaggggtaactcctactgatgtggttctttacattacagagttattaaggaaaaagaacgtcgtaagtaaatttgttgaattcttcggaccatccttatcattactttcagtaccggatagggcgaccatagctaatatggcaccagagtatggtgcaacagcagcgtacttcccgattgatgatgtaacggtaagctatcttgaactcacaaacagagatggagaattcgttaagaaatacgcccagttacaagaactattttatgacgattctaggaagataagatatagtgatatagtagaagtggatttaagtaagattgaaccggcaattgcgggacctagaaaccctgatgagagaatcagcttaagagaagttaaaggaaaactgagcaaagagaagaagaaaaagggcaaatatgttgaggataacgctgtagttttggctgcaattaccagctgtacaaatacttctaaccctactgtaatgttgggtgcaggtatcttggctaaaaaggctgttgagatgggattaagagtacctccctacatcaaaacgagtactgcacctggatcaccggttgtagctgagtacttaaaggaaacagggttactaccatatttagaggccttaggttttcacttagttggcttcggatgtactacgtgtataggcaatgcaggacctttaccaaaatatgtggaggaagacattaaggaaaacggtatcgagacctatgcggtaattagtggaaataggaattttgaaggtagaataaacccgctactaaagggtacttttctagcctctccgatattagtagttgcttatgcattagcagggagaattgatatagatttctacaatgagcctataggatttgatcctaatgggaaaccagtatatttaagagacatctggccttctttaaaggagataaaagcttacgtgaacatggccttaaaaccagaattatataaaaggaattccaacatctttgaaggaaacgaattatggaactcattaaagacaccacaaggagacatatatagttgggatgagaagtctacctacataaggctgcccccatggtacagtgaagaaaaacaagaggagttagatgatataactaacgctagaatacttttactactgggagacaagataactactgatcatatttcgccagctggaccaattactccagattcacccgcaggattatacttaaagcaatttggtgtgagcgatctaaatacctatggtgctagaagaggcaaccatgaagtaatgttaagaggaggattcttcaatcctaagatgaagaacctattagtggaaaaagaaggagggtatactgtccacttcccagatagaaagatagctagtgtgtatgaagtggcaatgcagtataaaaaggaaggtgtacctctagtaatagtagctggtaaacagtatggaagtggaagttcaagagattgggcggcaaaagtgactaaattgttaggagtcaaagctgtcttagcagaaagttttgagaggatacataggagtaacttagtagctatgggtgtaatacctatacaaattccagactggagagacttgggaataaagggagatgagactgttaacataaagggtattaaggatctcaaacccaaaaaggaattaaccatagagttcgtaaaatctaatggcgagaaaataactactaagggagttgcaagaatagataataacgttgaactaatgtatgttaagaaaggaggaatattaaattatgtgctcgagaaattcttagaaaatgaaaggaagagttag

SEQ ID NO: 66799 - protein, 855 aa, Sulfolobus solfataricus P2
MPNKFSYKGSEIYYYPLKELEEKGYKISDLPYSIRILIENVYRNLDGSKITEEDLENITKWKIGEELAFMPTRVVMQDYTGVPLLVDLAAMREKMIQLKRDPKMINPVVPADLVIDHSVQVDYYGTVYSLEFNMKKEFERNLERYQFLKWAQGAFRNLRIVPPGKGIIHQVNLEYLSTVVAKAEVKGLLTAFPEVIIGTDSHTTMIEGLGILGWGVGGLEAEAVLLGEPYYLNVPEVIGVRLTGEIQEGVTPTDVVLYITELLRKKNVVSKFVEFFGPSLSLLSVPDRATIANMAPEYGATAAYFPIDDVTVSYLELTNRDGEFVKKYAQLQELFYDDSRKIRYSDIVEVDLSKIEPAIAGPRNPDERISLREVKGKLSKEKKKKGKYVEDNAVVLAAITSCTNTSNPTVMLGAGILAKKAVEMGLRVPPYIKTSTAPGSPVVAEYLKETGLLPYLEALGFHLVGFGCTTCIGNAGPLPKYVEEDIKENGIETYAVISGNRNFEGRINPLLKGTFLASPILVVAYALAGRIDIDFYNEPIGFDPNGKPVYLRDIWPSLKEIKAYVNMALKPELYKRNSNIFEGNELWNSLKTPQGDIYSWDEKSTYIRLPPWYSEEKQEELDDITNARILLLLGDKITTDHISPAGPITPDSPAGLYLKQFGVSDLNTYGARRGNHEVMLRGGFFNPKMKNLLVEKEGGYTVHFPDRKIASVYEVAMQYKKEGVPLVIVAGKQYGSGSSRDWAAKVTKLLGVKAVLAESFERIHRSNLVAMGVIPIQIPDWRDLGIKGDETVNIKGIKDLKPKKELTIEFVKSNGEKITTKGVARIDNNVELMYVKKGGILNYVLEKFLENERKS

SEQ ID NO: 66800 - DNA, 1929 bp, Clostridium acetobutylicum ATCC 824
  CDS (1)..(1929): transl_table=11
atgggactaacattaactgaaaaaataataaagagtcatttggtatcaggagaaatgacaaaaggcaatgaaataggaataagaattgataatactcttactcaggattcaacaggtactatggcatatttgcagtttgaagcacttggaatagatcaggtgaaaacaaagagatctgttgcatatatagatcataatatacttcaaacggggcctgaaaatgctgatgatcatttatatatacaaacagtagctaaaaagcatggtatatatttttcaaaaccaggaaatggaatatgccatcaggttaatctagaaagatttgatgttccaggagaaactttaattggatcagatagtcatacacctacagctggcggaatgggaatgcttgcaataggtgcaggaggtcttgatgtggcagttgctatgggcggtggtgaatattatataataaatccgaaggtagttaaggttaatttaaaaggaaagcttaactcaatggtttcagcaaaggatataatattagaagttttaagacaagttacagtaaaaggtggcgttggaaaggtatttgagtattgtggagaaggcgttaaatctctctctatacctgaaagggcgactatttgtaatatgggagctgagcttggggctacaacttctattttccctagtgatgaaaaaacaaaagagtttttacaggctcaaggaagagtagaagattttaaggaactttcgccagattctgatgctgtatacgatgaagaagttgttgttgatttggataagcttgagcctttagtagcgtgtcctcatagtcctgataaagtggagaaggtttctgaaataaaaaatattaaggtgaatcaaatagccataggaagttgtacaaattcatccttccttgatttgatgagagtttccgaaatactaaaaggtaagactattcatgaagatgtatctttagttatagctccaggttcaaagcaagttttaactatgatgtctaagaatggagcacttgcaaatcttgtttcggcaggtgcaagaatacttgaatgtgcatgtggaccatgtataggtatggggcaatcaccttcaacagatgcagtttctcttagaacatttaataggaattttgaaggaagatcaggaactgtttcagctaaagtttatcttgttagtcctgaaactgcagctgtttctgcattaacaggggttttaacagatccaagagaactaaaagaaaatatagaaaaaatagaaataccagagaagtttttaattaatgataacttgatagtaagtccttcagaaaatccagaagaagttgaaatagtaagaggacctaatataaaaccattccctaaggcaaagccacttgcaagtgagcttcatggtaaagcacttattaaagttgaggataatataacaacagatcacattatgccatcaaatgcaaaattattgccatttagatctaacattcctcacttagctgatttttgtttgacaccttgcgataaggaatttcctaagaatgcaaaagaaaataatggtggatttataatagctggttcgaattatggtcaggggtctagtagagaacatgcagcacttgctccactgtatcttgggataaaggcagttcttgctaaatcatttgcaagaatacacaaggctaatctaatcaataatggtattatacctcttgtttttgaaaatgaagctgattatgataaaatagataaaaatgatgaacttcagataaatgatactataaatcaggttcaaacaggttttgtatatgttgaaaatatatctaaaaattcaaagtataaaatgattctagatataccagaaagacaaaaggatatgcttatatgtggtggaaaattaaatcagataaaaaaagacacaaaataa

SEQ ID NO: 66801 - protein, 642 aa, Clostridium acetobutylicum ATCC 824
MGLTLTEKIIKSHLVSGEMTKGNEIGIRIDNTLTQDSTGTMAYLQFEALGIDQVKTKRSVAYIDHNILQTGPENADDHLYIQTVAKKHGIYFSKPGNGICHQVNLERFDVPGETLIGSDSHTPTAGGMGMLAIGAGGLDVAVAMGGGEYYIINPKVVKVNLKGKLNSMVSAKDIILEVLRQVTVKGGVGKVFEYCGEGVKSLSIPERATICNMGAELGATTSIFPSDEKTKEFLQAQGRVEDFKELSPDSDAVYDEEVVVDLDKLEPLVACPHSPDKVEKVSEIKNIKVNQIAIGSCTNSSFLDLMRVSEILKGKTIHEDVSLVIAPGSKQVLTMMSKNGALANLVSAGARILECACGPCIGMGQSPSTDAVSLRTFNRNFEGRSGTVSAKVYLVSPETAAVSALTGVLTDPRELKENIEKIEIPEKFLINDNLIVSPSENPEEVEIVRGPNIKPFPKAKPLASELHGKALIKVEDNITTDHIMPSNAKLLPFRSNIPHLADFCLTPCDKEFPKNAKENNGGFIIAGSNYGQGSSREHAALAPLYLGIKAVLAKSFARIHKANLINNGIIPLVFENEADYDKIDKNDELQINDTINQVQTGFVYVENISKNSKYKMILDIPERQKDMLICGGKLNQIKKDTK

SEQ ID NO: 66802 - DNA, 2568 bp, Sulfolobus tokodaii str. 7
  CDS (1)..(2568): transl_table=11
gtggtagatttattcatgaaatttcagatttctaagttggaggaaaatattcattactatccattaagtcaacttgagcagtatggtataaatattcgtaaatacccctattctattagagttttaatagaaaatgtaattagaaattttgatggaaaaaagataactgaagatgatttagaagctatattaaaatggcaagtagggaaggaattttcatttttccctactagggttataatgcaagattatactggtgtacccttattagttgacctagcagcaatgagggatgaaatgagaagaaaggggaaagatccaaaaattgttaacccagttgttccagcagatttaataattgatcattctattcaagttgactattacggtacttcttatgcattatcttggaatatgaagaaagaatttgaaagaaatgaggaaagatataagtttttaaaatgggcacaattaagctttaggaatttaagagttattccaccaggtaacggaataattcatcaaataaacttagagtatttaagtaaagtggtagacgttagagaagttaaaggggtacagacggctttcccagaaatagtaattggaacagattctcataccacaatggctaatggaattagtgtattatcgtggggtgttggaggtttagaagctgaggccgtacttttaggtgaaccttatacaatgacagtcccagaagttattggagttaaattagttggtgaaatcaatgaaggtgtaactccaacagatatagttctctacattaccgaggttttgaggaaaaagggagttgtaggtaaatttgttgaattttttggaccctcattatcaaaactttctgtaccagatagggctactatagctaatatggcaccagaatatggtgcaactgtaggttacttcccaatagattcgcagactttaaaatatttagccggtactggaagagattatagaatagttgaaacttatgcgaaatcccaagggctattctatgatgaagttcccatttacacggaagtagtcgagatagatctaagtaaaattgaaccttctgttgccggtcctagaaatccagatgagagagttccgttaagggagatgaagaagagaaatgagaagaatgagaaaaagagtggaagcatagtaagcgataatgatgttgtattagctgcaataaccagttgtacaaacacatcaaatccaacagttatgattggcgctggattattagctaaaaaggctatagaacgtggtttaagagtcaaaccctatgtaaagactagcactgcaccaggatcaccagttgttgtagaatatcttaaggaatctggtttgctcccatatcttgaggcactaggttttcatattgtcggatttggctgcacaacatgtattggtaatgcagggcctttacctaaagtagtagaggaagatgtaaagaaatatggactagaagtttatggtgtaattagtggtaatagaaattttgaaggaagagtaaatcctcttcttaaaggagtttatttagcttcaccaattctagttgttgcttatgcactagccgggagaattgatattgattttgataacgaaccaattggttacgatcctaacggtataccagtttacttaaaagatatctggccttctcttcatgaaattagtgagtatattaatctctctcttaatccagaactttataagaaaaggtatgagaaaatatttgaaggagatgagaattggaaatcactaaaggttagtgagagcgagacttacagttgggattctagctcaacatatataaaagaacccccatggtttattttaccaacttctaaacttgatgacatattgaacgcaagaattttacttttacttggcgataaagtaactactgatcatatttctccagctggcccaatactagaagattcagttgctgggaaatatttaagacaattgggagttaaggagttaaatacttatggtgctagaagaggaaatcatgaagtaatgataagaggaggatttgcaaatcccaagcttaagaatctcttagttgatagggagggtggatatactaagcatttcccagatggcaaagtaatgagtgtttacgaagcttctgagttatataagagtgaaggagtgcctctagtaattgttgctggtaagcagtatggctctggaagttcaagagattgggctgccaaagtcacggcattattaggtattaaagctgtattagctgagagcttcgaaaggattcacagaagtaacttggtagctatgggagttttaccaattcaaataccagactggagatcattaggtattaagggtgatgaggttgtgaatatttacggtttaaaggatttaacgccaaagaaaaaggttaagatcgagtttagatcttcaagcggtgaagtgaaagttgtagaaggtttagtaagagttgataccaatgttgaattagaatatgtacgtgaaggtggggttttaaagtatgtaatgaataaattattatatgaaagttag

SEQ ID NO: 66803 - protein, 855 aa, Sulfolobus tokodaii str. 7
MVDLFMKFQISKLEENIHYYPLSQLEQYGINIRKYPYSIRVLIENVIRNFDGKKITEDDLEAILKWQVGKEFSFFPTRVIMQDYTGVPLLVDLAAMRDEMRRKGKDPKIVNPVVPADLIIDHSIQVDYYGTSYALSWNMKKEFERNEERYKFLKWAQLSFRNLRVIPPGNGIIHQINLEYLSKVVDVREVKGVQTAFPEIVIGTDSHTTMANGISVLSWGVGGLEAEAVLLGEPYTMTVPEVIGVKLVGEINEGVTPTDIVLYITEVLRKKGVVGKFVEFFGPSLSKLSVPDRATIANMAPEYGATVGYFPIDSQTLKYLAGTGRDYRIVETYAKSQGLFYDEVPIYTEVVEIDLSKIEPSVAGPRNPDERVPLREMKKRNEKNEKKSGSIVSDNDVVLAAITSCTNTSNPTVMIGAGLLAKKAIERGLRVKPYVKTSTAPGSPVVVEYLKESGLLPYLEALGFHIVGFGCTTCIGNAGPLPKVVEEDVKKYGLEVYGVISGNRNFEGRVNPLLKGVYLASPILVVAYALAGRIDIDFDNEPIGYDPNGIPVYLKDIWPSLHEISEYINLSLNPELYKKRYEKIFEGDENWKSLKVSESETYSWDSSSTYIKEPPWFILPTSKLDDILNARILLLLGDKVTTDHISPAGPILEDSVAGKYLRQLGVKELNTYGARRGNHEVMIRGGFANPKLKNLLVDREGGYTKHFPDGKVMSVYEASELYKSEGVPLVIVAGKQYGSGSSRDWAAKVTALLGIKAVLAESFERIHRSNLVAMGVLPIQIPDWRSLGIKGDEVVNIYGLKDLTPKKKVKIEFRSSSGEVKVVEGLVRVDTNVELEYVREGGVLKYVMNKLLYES

SEQ ID NO: 66804 - DNA, 2610 bp, Thermoplasma acidophilum DSM 1728
  CDS (1)..(2610): transl_table=11
gtgaacggaaagaaggtttactattatccactgaggaagatcttcggtgaaaaggtgaacagcctcccaagatccctgaggataatactagagtcgatggtcaggaatctggatggaagatcaatttcagatagcgacataaatgccattctcaactggaatgcggagaatgttgccgataccgagataaggttcaaggtctcacgtgtggtcatgcaggatttcacaggtgtgcctgcagttgttgatcttgcctcgatgagggataccgtcaagaatcttggaaaggacccagagctcataaatcctcaggtgagggtggatcttgtaatagatcattcggttcaggttgattattacggggaaacgttcgccctggagaagaatgaggaattagaatttgacaggaatatggagaggtacaggttcctcaagtgggcacagaaggctttcaagaacttcaaagtcataccgccaggtaccggtataatacaccaggtcaatcttgaatatctggcagaggtcgttttcgaaggaaaaaaggatggtaaagattacgcttacttcgattcgcttgtgggcacggactcacacacaaccatgataaacggcataggcgtactgggctggggtgtcggcggaatagaggcagaagctgcattgctcggccagccaataacgatatccctgcctgaggtcatcggcgttcggatcaagggaaagatgcaaccgggcgtaacagctacggatgttgtcttaacagtcaccgagatgctcagaaaggtcaacgttgtggacaagttcgttgagttcttcgggccatccgtgaaatatttatccgtgcctgagagggcaacgatatcaaacatgtgccctgagttcggtgcaacgtgcgcactgttcccgatagacgatcagacgctgcagtatctggagacgactggaaggccaaaggatcacatagatctgataaagaaatatctggaggcgcaggggcttttcggagagggcgcagaaccgaagtacacaagggtgatagaactagacctgtccaccgtcaagcccagtgtggccggcccaaagctccctcagcagaggctggatctcgatcaggttccggcaagcttcctctccacgctcgaacagaacggaggcgaccgcctggttacgctgcgtaaagtcccactcaagatgaagggccaaaacctagaactgtcggatggagatatagttatagcagccataaccagctgcaccaacacaagcaatccatacgtgatgatagctgctgggctgcttgccaagaaggctgtggaagctggcctgaaggtgaatccaaaagtcaagacaagcctggccccaggatcgcgcgtcgttacggattacctgactgaatccggactcctatcataccttgagaagcttggcttctatatagtcggatatggatgcacaacctgcataggaaacagcggtccgctggatcaggatctgggtaacgcaatagtcaacaacaatctcagcgtggtatctgtgctttctgggaaccgcaacttcgaggccagaatacacaaggacgtaaaggcaaactacctaatgtcacctccgcttgtggtcgcatacgcactggccggaaacataaccgttaacctcaacaaggatccgatagcgacggtaggtggaaagaaggtctacctgaaggatatatggcccactaacgaagagatcaatgaggctgtaaacaaatacgtcaggaaggacatgttcgagaagaggtatggaaacataaccaatgagagatgggaaaagatagatgcaccttcatccccaacctatgcctgggatccaaagagcacatacataaggaacccgccgttcttcgagaatttcaggctggatcaggagttcacagatttccgcatcaagggtgcctatccactgctcgtcctcggagattcgattacaacggatcacatatcccctgcaggatccatagcaaaggacagccccgccgccaaatacctgattgagaacggcgtcaagccagaggatttcaactcgtatggatccaggcgcggaaaccatgaggtcatgatgaggggtacgttcgcaaacgtcaggataaaaaacctcatggtgaagagagagggaggatacacattattcgtaccagagaacaaggagatgtccgtttacgatgctgccatgcagtacaagaagatgggcataccggttgtcgtcatagctggcaaggaatacggtaccggaagctccagagactgggcagcgaagggcacataccttctgggagtgaaggccgtcatagcaaagagctacgagaggatacatcgcagcaacctcgttggaatgggtgtgatacccatcgagtacgaaggcttcaatccgcaggatatcgattatacaaagacaatagacgttgacatagggagcatcgatccgggatcgaaggcaaagattacctatacggacaagaagggtgagaaacacaccatcgatgtgaggctcagggtagatacgccagctgaatcggattacataaaaagtggcggtatactgcaatattcgctcaaaaagatactggcctcatga

SEQ ID NO: 66805 - protein, 869 aa, Thermoplasma acidophilum DSM 1728
MNGKKVYYYPLRKIFGEKVNSLPRSLRIILESMVRNLDGRSISDSDINAILNWNAENVADTEIRFKVSRVVMQDFTGVPAVVDLASMRDTVKNLGKDPELINPQVRVDLVIDHSVQVDYYGETFALEKNEELEFDRNMERYRFLKWAQKAFKNFKVIPPGTGIIHQVNLEYLAEVVFEGKKDGKDYAYFDSLVGTDSHTTMINGIGVLGWGVGGIEAEAALLGQPITISLPEVIGVRIKGKMQPGVTATDVVLTVTEMLRKVNVVDKFVEFFGPSVKYLSVPERATISNMCPEFGATCALFPIDDQTLQYLETTGRPKDHIDLIKKYLEAQGLFGEGAEPKYTRVIELDLSTVKPSVAGPKLPQQRLDLDQVPASFLSTLEQNGGDRLVTLRKVPLKMKGQNLELSDGDIVIAAITSCTNTSNPYVMIAAGLLAKKAVEAGLKVNPKVKTSLAPGSRVVTDYLTESGLLSYLEKLGFYIVGYGCTTCIGNSGPLDQDLGNAIVNNNLSVVSVLSGNRNFEARIHKDVKANYLMSPPLVVAYALAGNITVNLNKDPIATVGGKKVYLKDIWPTNEEINEAVNKYVRKDMFEKRYGNITNERWEKIDAPSSPTYAWDPKSTYIRNPPFFENFRLDQEFTDFRIKGAYPLLVLGDSITTDHISPAGSIAKDSPAAKYLIENGVKPEDFNSYGSRRGNHEVMMRGTFANVRIKNLMVKREGGYTLFVPENKEMSVYDAAMQYKKMGIPVVVIAGKEYGTGSSRDWAAKGTYLLGVKAVIAKSYERIHRSNLVGMGVIPIEYEGFNPQDIDYTKTIDVDIGSIDPGSKAKITYTDKKGEKHTIDVRLRVDTPAESDYIKSGGILQYSLKKILAS

SEQ ID NO: 66806 - DNA, 2712 bp, Caulobacter crescentus CB15
  CDS (1)..(2712): transl_table=11
gtggacagagaaggatccttgaaaatggcgtctgtggacagcctcaaagcccgccgcgagctcaaggtcggcaaacagtcttacgtctattacagccttcgcgccgccgaggaagccggtcttgccgacgtttcctcgctgccggtctcgatgaaggtgctcctcgagaacctcctgcgtaacgaggacggcgtctcggtcaatgaagacgacctgaaggcggtcgccgcctggctcaacaacaagggctcggtcgagcacgagatcagcttccgccccgcgcgcgtgctgatgcaggacttcaccggcgttcccgccgtcgtcgacctggccgccatgcgcgacgccatggtcgccctgggcgccgacccggccaagatcaacccgctgaaccccgtcgatctggtgatcgaccactcggtgatggtcgacaacttcggcaacccgaaggcctatgacgacaacgtcaagcgcgagtacgagcgcaacatcgagcgttaccgcttcctgcgctggggctcgtcggccttcaacaacttccgcgttgtgccgcccggcaccggcatctgccaccaggtgaaccttgagtacctggcccagaccgtgtggaccaacacggtcgacggcgctgaagtcgcctatcccgacaccgtcgtcggcaccgacagccacactaccatggtcaacggcctggccgtgctgggctggggcgtgggcggcatcgaggccgaggccgccatgctgggccagccgatcccgatgctgatccccgaggtcatcggcttcaagctgaccggcgccatgccggaaggcgcgaccgccaccgacctggtgctcaccgtgacccagatgctgcgcaagaagggcgtggtcggcaagttcgtcgaattctacggcgacgccctggccaacctgaccctggaagaccaggcgaccatcgccaacatggctccggaatacggcgccacctgcggcttcttcccgatctcggccgccaccatcgcctatctgaagggcaccggccgcgccgccgagcgcgtcgcgctggttgaagcctacgccaaggagcagggcctgtggtgggagcccggcgtcgccgagccgaccttcaccgacaccctggaactcgacctgtcgactgtcctgccgtcgctggccggccccaagcgtccgcaggaccgcgtgctgctgtcggacgccgccgccaagttcgccgagtcgctggccggtgagttcggcaaggccgaaaaccccgagctgcgcgccccggtggaaggcgaggacttcgacgtcggccacggcgacgtggttatcgcggccatcacctcgtgcaccaacaccagcaatccctcggtgctgatcgccgccggcctcctggccaagaacgcggtcgccaagggtctgaaggccaagccgtgggtgaagacctcgctggcccccggctcgcaggtggtcaccgactacctggccaaggccggcctgaccaagcatctcgatgcgctcggctttaacctcgtgggttacggctgcacgacctgcatcggcaactccggcccgctgccggaagccatcagcaagacgatcaacgacaacgatctggtcgcctgctcggtgctgtcgggcaaccgcaacttcgaaggccgcgtgaacccggacgtgcgcgccaactacctggcctcgccgccgctggtggtggcctacgccctggccggtagcctgaagatcgacctggccacccagccgatcggccaggacaagaagggcaacgacgtcttcctgaaggacatctggccttcgaacgaggacatcgccgccctgcagcgcaaggcgatcaacgagaagatgttcgccactcgctacggcgacgtcttcaagggcgacaagaactggcagggcatcaaggtgaccggcggccagacttacgcctgggaagccgactcgacctacgttcagaacccgccgtacttccccaacatgtcgatgacgccggctccggtgaccgacatcgtggaagcccggatcctggccgtgttcggcgactcgatcaccaccgaccacatcagcccggccggttcgatcaaggcctccagcccggcgggtaagttcctgatcgacaacggcgtcgagccggtggacttcaacggctacggcgcgcgtcgcggcaaccaccaggtgatgatgcgcggcacgttcgcgaacatccgcatccgcaaccgcatcaccccggacatcgaaggcggcgtgaccaagcacttcccgaccggcgaagtgatgtcgatctacgacgcggccatgaagtaccaggaagaaggccgcccggcggtcgtcttcggcggcaaggaatacggcaccggttcgtcgcgtgactgggccgccaagggcaccaagctcctgggcgtccgcgcggtgatctgcgaaagcttcgagcgcattcaccgctcgaacctggtcggcatgggcgtgctgccgctgcagttcgtccaggacggctggcagaagctggagctgaccggcgaggagatcgtctcgatccgcggcctgaccgacctggcgccgcgcaagcagctgatcgtcgagctctaccgcccgaccgacggccgcatcgcccgcttcccggtccgctgccgcatcgataccccgaccgagcttgagtacttcaagaacggcggcgtgctgaactacgtgctgcggaacctggccaaggccgactaa

SEQ ID NO: 66807 - protein, 903 aa, Caulobacter crescentus CB15
MDREGSLKMASVDSLKARRELKVGKQSYVYYSLRAAEEAGLADVSSLPVSMKVLLENLLRNEDGVSVNEDDLKAVAAWLNNKGSVEHEISFRPARVLMQDFTGVPAVVDLAAMRDAMVALGADPAKINPLNPVDLVIDHSVMVDNFGNPKAYDDNVKREYERNIERYRFLRWGSSAFNNFRVVPPGTGICHQVNLEYLAQTVWTNTVDGAEVAYPDTVVGTDSHTTMVNGLAVLGWGVGGIEAEAAMLGQPIPMLIPEVIGFKLTGAMPEGATATDLVLTVTQMLRKKGVVGKFVEFYGDALANLTLEDQATIANMAPEYGATCGFFPISAATIAYLKGTGRAAERVALVEAYAKEQGLWWEPGVAEPTFTDTLELDLSTVLPSLAGPKRPQDRVLLSDAAAKFAESLAGEFGKAENPELRAPVEGEDFDVGHGDVVIAAITSCTNTSNPSVLIAAGLLAKNAVAKGLKAKPWVKTSLAPGSQVVTDYLAKAGLTKHLDALGFNLVGYGCTTCIGNSGPLPEAISKTINDNDLVACSVLSGNRNFEGRVNPDVRANYLASPPLVVAYALAGSLKIDLATQPIGQDKKGNDVFLKDIWPSNEDIAALQRKAINEKMFATRYGDVFKGDKNWQGIKVTGGQTYAWEADSTYVQNPPYFPNMSMTPAPVTDIVEARILAVFGDSITTDHISPAGSIKASSPAGKFLIDNGVEPVDFNGYGARRGNHQVMMRGTFANIRIRNRITPDIEGGVTKHFPTGEVMSIYDAAMKYQEEGRPAVVFGGKEYGTGSSRDWAAKGTKLLGVRAVICESFERIHRSNLVGMGVLPLQFVQDGWQKLELTGEEIVSIRGLTDLAPRKQLIVELYRPTDGRIARFPVRCRIDTPTELEYFKNGGVLNYVLRNLAKAD

SEQ ID NO: 66808 - DNA, 2676 bp, Salmonella typhimurium LT2
  CDS (1)..(2676): transl_table=11
atgtcgtcaaccctacgagaagccagtaaggatacattgcaggccaaagataaaacgtatcattactacagtctgccgctggctgccaaatccctgggcgatatcgcccgtttgcccaaatcacttaaagtgttactggaaaacctgttgcgctggcaggacggcgaatctgtgactgatgaagatattcaggcgctggccggttggcttaaaaatgcccatgccgatcgtgaaattgcctggcggcccgcccgtgtcctgatgcaggactttaccggcgtgcctgccgttgtcgacctggcagcgatgcgtgaagccgttaaacgcctcggcggcgatacgtcgaaagtgaacccgttatcgccggttgatctggttattgaccactctgtgacggtcgatcatttcggcgatgatgatgcgtttgaagaaaacgtgcggctggaaatggaacgtaaccatgagcgttatatgttcctgaaatggggaaagcaggcattcagccgtttcagcgtggtgccgcccggcaccggcatttgccatcaggttaacctggaatacctgggtaaagccgtctggagcgaattacaggacggggagtggattgcttacccggactcgctggtggggactgactcccatacgaccatgattaatggtctgggcgtattggggtggggtgtgggtggtattgaagcggaagcggcgatgcttggtcagcccgtgtcgatgcttatcccggatgtcgtcggctttaagttaaccggtaagcttcgggaggggatcaccgccactgacctggtgctcaccgtcacgcaaatgctgcgtaagcatggcgtcgtgggtaaatttgttgaattttatggtgacggtctggattcgctgccgttggcggatcgcgcgactatcgctaatatgtcgccggaatatggcgccacctgtggtttcttccccattgacgccatcaccctggaatatatgcgattaagcggacgtagcgacgatctggtcgagctggttgaaacctacgcgaaggcgcagggaatgtggcgtaatcccggtgacgaaccggtatttaccagtacgctggaactggatatgggcgatgtcgaggccagcctggccgggccgaaacgcccgcaggatcgcgtggcgttaggcgatgtgccgaaagcctttgccgccagcgccgagctggagctgaataccgcgcaaagagatcgccagccggttgactatacgatgaacggacagccatatcagcttccggatggcgctgtcgtcattgccgccatcacctcctgtacgaatacctcgaaccccagcgtgctgatggcggcgggattactggcgaaaaaggcagtaacgctggggttgaagcgtcaaccgtgggtcaaggcttctctggcgccggggtcaaaagtggtatctgactatctggcgcaggccaaacttacgccttatctggatgagctcggttttaacctggtcggttatggctgtacgacctgtatcgggaactccggtccgttgccggagcctattgagaccgcgattaaaaaaggcgatctgacggtaggggccgtgctttccggtaaccgaaattttgaagggcgtatccatccgctggtgaaaacgaactggctggcgtcgccgccgctggtggtcgcgtatgcgctggccggaaacatgaatattaacctcgcgacagacccgctggggtacgatcgtaaaggcgatccggtatacctgaaggatatctggccttcggcgcaggaaattgcccgcgccgttgaactggtatcatcagatatgttccgtaaagagtatgcggaagtgtttgagggcacggaagaatggaaatcgattcaggttgaatcgtccgatacctacggctggcagtcggattcaacctatattcgcctgtcgcctttctttgatgaaatgcaggcccagcctgcgccagtcaaagatatccacggcgcgcgtatcctggcgatgctgggcgattcggtgacgaccgaccatatttccccggccggcagtatcaagccggacagtcccgccggacgctatctgcaaaaccacggcgttgagcggaaggattttaactcctatggatcacggcgcggcaaccatgaagtgatgatgcgcggtacgttcgccaatattcgtattcgcaacgaaatgctgcccggcgtcgaaggtggcatgacgcggcatttaccgggtacggaagcgatgtcgatttatgatgctgcgatgctctaccagcaggaaaaaacgccgctggcggtaattgccgggaaagagtatgggtcgggatcgagccgtgactgggcggcaaaaggtccgcggctgttaggtatccgcgtggtgatcgccgagtcgttcgaacgtatccaccgctcaaacctgattgggatggggatcctgccgctggagtttccacagggcgtaacgcgtaaaacgcttggactgaccggggaagaggtgattgatatcgcggatctgcaaaacctgcgccctggcgcgaccattccggtgacgttaacgagatcggacggcagcaaagaaacggtgccttgccgctgtcgcattgataccgccaccgagctgacttactaccagaatgacggcatcttgcactatgtcattagaaatatgctgaactaa

SEQ ID NO: 66809 - protein, 891 aa, Salmonella typhimurium LT2
MSSTLREASKDTLQAKDKTYHYYSLPLAAKSLGDIARLPKSLKVLLENLLRWQDGESVTDEDIQALAGWLKNAHADREIAWRPARVLMQDFTGVPAVVDLAAMREAVKRLGGDTSKVNPLSPVDLVIDHSVTVDHFGDDDAFEENVRLEMERNHERYMFLKWGKQAFSRFSVVPPGTGICHQVNLEYLGKAVWSELQDGEWIAYPDSLVGTDSHTTMINGLGVLGWGVGGIEAEAAMLGQPVSMLIPDVVGFKLTGKLREGITATDLVLTVTQMLRKHGVVGKFVEFYGDGLDSLPLADRATIANMSPEYGATCGFFPIDAITLEYMRLSGRSDDLVELVETYAKAQGMWRNPGDEPVFTSTLELDMGDVEASLAGPKRPQDRVALGDVPKAFAASAELELNTAQRDRQPVDYTMNGQPYQLPDGAVVIAAITSCTNTSNPSVLMAAGLLAKKAVTLGLKRQPWVKASLAPGSKVVSDYLAQAKLTPYLDELGFNLVGYGCTTCIGNSGPLPEPIETAIKKGDLTVGAVLSGNRNFEGRIHPLVKTNWLASPPLVVAYALAGNMNINLATDPLGYDRKGDPVYLKDIWPSAQEIARAVELVSSDMFRKEYAEVFEGTEEWKSIQVESSDTYGWQSDSTYIRLSPFFDEMQAQPAPVKDIHGARILAMLGDSVTTDHISPAGSIKPDSPAGRYLQNHGVERKDFNSYGSRRGNHEVMMRGTFANIRIRNEMLPGVEGGMTRHLPGTEAMSIYDAAMLYQQEKTPLAVIAGKEYGSGSSRDWAAKGPRLLGIRVVIAESFERIHRSNLIGMGILPLEFPQGVTRKTLGLTGEEVIDIADLQNLRPGATIPVTLTRSDGSKETVPCRCRIDTATELTYYQNDGILHYVIRNMLN

SEQ ID NO: 66810 - DNA, 2703 bp, Listeria monocytogenes EGD-e
  CDS (1)..(2703): transl_table=11
atgactaattggaaagaaaaagcaagagcatcatttcagctgaacgacaaaacgtatcattattacaaacttaaaaccttagaagaggacaagcttacaaacatcgagaaattaccttattctgtacgtgttttacttgaatcagtattaaggcaagcagatggccgagtaattaaggactcacacgtagaagacttagcccattggtctaaagatggcaacgaaggcgaagtaccattcaaaccagcccgtgttattttacaagatttcacaggcgttccagcagtcgttgatttagcttctttacgtaaagcaatggcggaccttggcggcgatccagaaaaaatcaatccggaaatcccagttgacttagtagtcgatcactcggtacaagtggatagctatgcgaatccagaagcacttaaaattaacatggaacttgaattcaaacgtaacatggaacgttaccagtttttaaattgggcgcaaaaagcatttgataactatcgtgctgttccacctgcaacaggtattgttcaccaagttaacttagagtatttagcaaacgtcgtgattgcgaatgaagtagcagacggcgaatttgtagcgttcccagactcgcttgtcggaacagatagccatacaacgatgattaacggtattggcgttttaggttggggcgttggcggtattgaagcagaagctggcatgctcggtcaaccttcttacttcccaattccagaagttatcggtgtgaaattgctaggtgctttaccaaacggcgcaacagcaactgattttgctttaaaagtaacccaagtcttacgggaacaaaaagtagtaggtaaatttgttgaattttatggtccgggtgttgcgacactaccacttgctgaccgcgcaaccgttgcgaatatggctccagaatacggagcaacttgtggatttttcccagtcgataaagaagcgcttaactacctaaaactaactggccgtgacaaagaacaaatcgaattagtagaagcttatttagaagcaaatgatttattcttcactccggaaaaagtagaaccaaactacacgcaaacagtggaaatcgatctttctgcgattgaaccaaacttggcggggccaaaacgtccccaagatttgatccctctttcgaaaatgaaagaaacattccgcgaatcgattactgccaaagcaggcaaccaaggtttcggactagataaatcagccttagacaaagaagtaaccgttacttttggcaatggcgatcaatccactatgaaaactggttcggttgcaatcgcggctattacaagttgtacgaatacttctaacccatacgttatgttaagcgctggtttagttgctaaaaaagcagtcgaaaaaggcttagaagtaccaaaattcgtaaaaacttccttggcgccaggctccaaagttgtaacaggctacttggaaaaagccggcttacttccatatttagaaaaacttgggtttgaccttgttggctatggttgtacgacgtgtatcggtaactctggtccattaaaagaggaaattgaagaagcaatccaagatagcgatttactcgtttctgcagtattaagtggtaaccgtaactttgaaggacgaattcatgcccttgtgaaagcaaacttcttagcttcaccaccactagtcgttgcctatgcgcttgctgggacaacaaatgtcgacatgctaaccgaaccaatcggacgcggtaataatggcgaagaagtcttcttagacgatatttggccaagttcagaagaagtgaaggctcttgtagaagaaactgtaactccagaacttttccgtgaacaatatgcccatgtttttgatgaaaacgaagcttggaatgcaatcgaaacaacggaagacgccctatacaaatgggatgaaaattctacgtatatcgcgaatccgccattctttgacaatttagcaaaagaagctggtaaagtggaagcattatctggactacgtattattggtaaatttggtgattccgttacaaccgaccatatttcaccagccggagcaatcggtaaagatacgccagctggaaaattcctgcaagaacaaggcgtagcgattcgcgattttaactcttatggctctcgtcgtggtcatcacgatgttatgatgcgcggaacatttgcgaatattcgaatcaaaaaccaaatcgcaccaggaactgaaggcggctatacgacttactggccaactggcgaagtgatgtcgatttatgacgcatctagaaaatatatcgaaaataacactggtttagtcattcttgctggtgacgattacgggatgggatcatcacgtgactgggctgccaaaggaacgaacttactaggaattaaaacagttattgcgaaaagctacgagcggattcatcgttctaacctcgttatgatgggtgttttaccgctccaattccaaccaggagaagatgcagaaaccttaggcctaactggctcagaaagcttacaagtagaaattggtgaagatgtagctccaagagaccttgtaaaagtaacagctacccgtgaagacggctcaagtattactttcgatgcgcttgcacgctttgactcagaagtagaaatcgattattaccgtcacggcgggattttaccaatggtcctacgtggcaaattgaaataa

SEQ ID NO: 66811 - protein, 900 aa, Listeria monocytogenes EGD-e
MTNWKEKARASFQLNDKTYHYYKLKTLEEDKLTNIEKLPYSVRVLLESVLRQADGRVIKDSHVEDLAHWSKDGNEGEVPFKPARVILQDFTGVPAVVDLASLRKAMADLGGDPEKINPEIPVDLVVDHSVQVDSYANPEALKINMELEFKRNMERYQFLNWAQKAFDNYRAVPPATGIVHQVNLEYLANVVIANEVADGEFVAFPDSLVGTDSHTTMINGIGVLGWGVGGIEAEAGMLGQPSYFPIPEVIGVKLLGALPNGATATDFALKVTQVLREQKVVGKFVEFYGPGVATLPLADRATVANMAPEYGATCGFFPVDKEALNYLKLTGRDKEQIELVEAYLEANDLFFTPEKVEPNYTQTVEIDLSAIEPNLAGPKRPQDLIPLSKMKETFRESITAKAGNQGFGLDKSALDKEVTVTFGNGDQSTMKTGSVAIAAITSCTNTSNPYVMLSAGLVAKKAVEKGLEVPKFVKTSLAPGSKVVTGYLEKAGLLPYLEKLGFDLVGYGCTTCIGNSGPLKEEIEEAIQDSDLLVSAVLSGNRNFEGRIHALVKANFLASPPLVVAYALAGTTNVDMLTEPIGRGNNGEEVFLDDIWPSSEEVKALVEETVTPELFREQYAHVFDENEAWNAIETTEDALYKWDENSTYIANPPFFDNLAKEAGKVEALSGLRIIGKFGDSVTTDHISPAGAIGKDTPAGKFLQEQGVAIRDFNSYGSRRGHHDVMMRGTFANIRIKNQIAPGTEGGYTTYWPTGEVMSIYDASRKYIENNTGLVILAGDDYGMGSSRDWAAKGTNLLGIKTVIAKSYERIHRSNLVMMGVLPLQFQPGEDAETLGLTGSESLQVEIGEDVAPRDLVKVTATREDGSSITFDALARFDSEVEIDYYRHGGILPMVLRGKLK

SEQ ID NO: 66812 - DNA, 2703 bp, Listeria innocua Clip11262
  CDS (1)..(2703): transl_table=11
atgactaattggaaagaaaaagcaaaagcatcatttaaacttaatgacaaaacgtatcattactacaaaattaaaaccttagaagaggacaaaatcacaaacatcgagaaattaccttattctgtacgtgttttacttgaatccgtattaagacaagctgatggcagagtaattaaggattcacatgtagaagacctagctcattggtcaaaaaatggtaacgaaggagaagttccatttaaaccagcgcgtgttattttacaagatttcaccggtgttccagcagttgttgacttagcttcattacggaaagcaatggctgacctaggcggcgacccagaaaaaatcaatccagaaatcccagttgatttagtagtcgatcactcggtacaagttgatagttatgcgaatccagaagcgctaaaaatcaacatggagctagagttcaaacgcaatatggagcgttatcaatttttaaactgggcgcaaaaagcatttgataattatcgtgctgtgccacctgcaactggtatcgttcaccaagttaacttagagtatttagcaaacgtcgtcatcgcgaatgaagtttctgacggcgaatttgtagcgtttccagattcccttgtcgggacagatagccatacgacaatgattaatggtattggcgttttaggttggggcgttggcggtattgaagctgaagctggaatgctcggacaaccatcttatttcccaattccggaagttatcggtgtgaaattattaggtgctttaccaaacggcgcaactgccaccgattttgctttgaaagtaacacaagttttgcgggaacaaaaagtagtagggaaatttgttgaattttatggtccaggcgttgcaacccttccactagctgaccgcgcgactgttgccaatatggctcctgaatacggcgcaacttgcggatttttcccggtagacaaagaagcacttaactatttaaaactaactggtcgtgacaaagaacaaatcgaattagtagaagcttatttagaagcaaacgatttattctttacaccagaaaaagtagaaccaaattatacacaaacagtggaaatcgatctttctgctattgagccaaatctagctgggccaaaacgtccacaagatttgattccgctttcgaaaatgaaagaaacattccgtgaatccattacagcgaaagcaggcaaccaaggtttcggtcttgataaatcagctttagacaaagaagtaactgttacatttggcaatagtgaccaatcaacaatgaaaactggttccgttgctattgcagcaattacaagctgtacgaatacctctaacccatacgtaatgctaagcgccggtttggtcgctaaaaaagctgttgaaaaaggcttagaagtacccaaattcgtcaaaacttccttagcgccaggttccaaagttgttacaggctacctggaaaaagctggtttacttccatatttagaaaaacttggctttgacctagttggttatggttgtacaacttgtatcggtaactcaggtccattaaaagaagaaattgaagaagcgattcaagagagtgatttactagtttccgcagttctcagtggtaaccgtaactttgaaggacgaattcatgcacttgtgaaagcaaacttcttagcttcaccaccacttgtcgttgcttatgcgcttgctgggacaacgaacgtagatatgttaacagaaccaatcggacgtggtaataatggcgaagatgtcttcttaaacgatatttggccaagttcagaagaagtgaaggcgcttgtagaagaaaccgtaacgccagaacttttccgtgagcaatatgcccatgtatttgatgaaaatgaagcttggaatgcgattgaaactacagaagatgctttatacaaatgggatgaaaattcgacgtatattgccaacccgccattctttgataatttagcaaaagaagctggcaaagtagaagctttatctggtcttcgtattattggtaaatttggtgattctgttacaaccgaccacatttcaccagctggtgcaatcggtaaagatacaccagccggaaaattcctgcaagaagaaggcgtagcgattcgtgatttcaactcgtatggctctcgtcgtggtcatcatgatgttatgatgcgcggtacattcgccaatattcgaatcaaaaaccaaatcgctcctggaacagaaggtggttacacaacatactggccaactggggatgtaatgtccatttatgacgcatctagaaaatatatcgaaaacaacactggcttagtgattcttgctggcgatgattacggaatgggatcttcacgtgactgggctgccaaaggaactaatttacttggaattaaaactgtaattgcaaaaagttatgaacggattcatcgttctaaccttgtaatgatgggtgttttaccacttcaattcctaccaggagaagatgcagatacactaggccttactggttcagaaagtttacaagtggaaatcagtgaaggtgtagcgccaagagatattgtcaaagtaacagctgttcgcgaagacggcactagcttcacctttgatgcacttgcacgatttgactcagaagtagaaattgactattaccgtcatggtgggattttaccaatggtccttcgtggcaaattaaaataa

SEQ ID NO: 66813 - protein, 900 aa, Listeria innocua Clip11262
MTNWKEKAKASFKLNDKTYHYYKIKTLEEDKITNIEKLPYSVRVLLESVLRQADGRVIKDSHVEDLAHWSKNGNEGEVPFKPARVILQDFTGVPAVVDLASLRKAMADLGGDPEKINPEIPVDLVVDHSVQVDSYANPEALKINMELEFKRNMERYQFLNWAQKAFDNYRAVPPATGIVHQVNLEYLANVVIANEVSDGEFVAFPDSLVGTDSHTTMINGIGVLGWGVGGIEAEAGMLGQPSYFPIPEVIGVKLLGALPNGATATDFALKVTQVLREQKVVGKFVEFYGPGVATLPLADRATVANMAPEYGATCGFFPVDKEALNYLKLTGRDKEQIELVEAYLEANDLFFTPEKVEPNYTQTVEIDLSAIEPNLAGPKRPQDLIPLSKMKETFRESITAKAGNQGFGLDKSALDKEVTVTFGNSDQSTMKTGSVAIAAITSCTNTSNPYVMLSAGLVAKKAVEKGLEVPKFVKTSLAPGSKVVTGYLEKAGLLPYLEKLGFDLVGYGCTTCIGNSGPLKEEIEEAIQESDLLVSAVLSGNRNFEGRIHALVKANFLASPPLVVAYALAGTTNVDMLTEPIGRGNNGEDVFLNDIWPSSEEVKALVEETVTPELFREQYAHVFDENEAWNAIETTEDALYKWDENSTYIANPPFFDNLAKEAGKVEALSGLRIIGKFGDSVTTDHISPAGAIGKDTPAGKFLQEEGVAIRDFNSYGSRRGHHDVMMRGTFANIRIKNQIAPGTEGGYTTYWPTGDVMSIYDASRKYIENNTGLVILAGDDYGMGSSRDWAAKGTNLLGIKTVIAKSYERIHRSNLVMMGVLPLQFLPGEDADTLGLTGSESLQVEISEGVAPRDIVKVTAVREDGTSFTFDALARFDSEVEIDYYRHGGILPMVLRGKLK

SEQ ID NO: 66814 - DNA, 2706 bp, Ralstonia solanacearum GMI1000
  CDS (1)..(2706): transl_table=11
atgccccacaacctgaaaaagacactcaaaacattcaagatcaacggcggccagaccggcaagttccattccctgccgcagttgggcaaggaactgggcgtggcgatcgagcgcctgccggtttcgatccgtatcgtgctggaatccgtgctgcgcaactgcgacggcaagaaggtgaccgaagagcacgtcgcgcagttggccaactggaagccgaacgctgaccgcgtggacgaaatcccgttcgtggtcgcccgcgtggtgctgcaggacttcaccggcgtgccgctgctggccgacctggccgccatgcgcaacgtggccgagcgcatgggcaagaaccccaagaagatcgagccgctggtgccggtcgacctggtggtggaccactcggtgcaggtcgatcacttccgcgagaagaaggcgctggacctgaacatgcagctggaattctcgcgcaacaacgagcgctaccagttcatgaagtggggcatgcaggcgttcgacacgttcggcgtggtgcagccgggcttcggcatcgtccaccaggtcaacctggaatacctggcacgcggtgtccataagaaggacggcgtgttctacccggatacgctggtcggcaccgacagccacaccaccatgatcaacggcatcggcgtggtgggctggggcgtgggcggcatcgaggcggaagccggcatgctgggccagccggtgtacttcctgacgccggacgtggtgggcgtggaactgaagggccgcctgcgcgaaggctgcacggccaccgacctggtgctcaccatcaccgaactgctgcgccgcgaaaaggtggtcggcaagttcgtcgagttcttcggcgaaggcaccgccagcctgtcgctgccggaccgcgccaccatcggcaacatggccccggaatacggcgcgaccatgggcttcttcccggttgacgacaagaccatcgactacttcaagggcacgggccgcacgaaggaagaaatcgctgcgttcgaaggctacttccgcgcgcagaagctgttcggcgtgcccaaggccggcgagatcgactacaccaagacgctgacgctcgacctgagcacggttgcaccgtcgctggccggcccgaagcgcccgcaagaccgcatcgagatcggcaacgtgaagtcgacgttctcgtcgctgttcgccaagccggtggccgagaacggcttcaacaagaagtcggaagacctcgacaagaccttcacgaccaccaacggcgtggacgtgaagagcggcgacgtgctgatcgccgccatcacctcgtgcacgaacacgtccaacccgagcgtgctgctggctgccggcctgctggccaagaaagccgtggaagccggcctgacggtcgctccgcacatcaagacctcgctcgccccgggaagccgcgtggtgacgaagtacctggaagccgccggcctgctgccgtacctggaaaagctgggcttcggcgtgacggcctacggctgcacgacctgcatcggcaacgccggcgacctgacgccggaactgaacgaggccatcgtgaagaacgacatcgtggccgccgccgtgctgtcgggcaaccgcaactttgaagcgcgcatccacccgaacatccgcgccaacttcctggcctcgccgccgctggtcgtcgcctacgcgatcgccggcaacgtgacgcgcgacctgatgaccgagccggtcggcaagggcaagaagggccgcgacatttacctgggcgacatctggccgacctcggacgagatcgccaagctgatgaagttcgcgatgaacgccgacacgttccgcacgaactacgagcaggtcaagaagccgtccaagctgtgggccaacgtcaagggcacgaagggccaggtctacgactggccgaagtcgacctacatcgccgagccgccgttcttcgaaggcttcggcatgacgccggccgctgcctcggcatcggtcaagggcgcccgcgcgctgggcgtgttcggcgattccgtgacgaccgaccacatctcgccggccggctcgatcaaggaaacctcgcccgccggcaagtacctgctggccaacggcgtgctcaaggccgacttcaacagctacggctcgcgccgcggcaaccatgaggtgatgatgcgcggcacgttcgccaacgtgcgcatcaagaacctgatgatcccggccaaggctgacggctcccgcgtggaaggcggcgagacgctgttccagccgagcggcgaacagatgtcgatctacgacgccgccatgaagtacatcgccgcagacacgccgacggtggtgttcggtggcgaagagtacggcacgggcagctcgcgcgactgggccgccaagggcacgcagctgctgggcgtgaaggccgtgatcgcgcgcagcttcgagcgcatccaccgctcgaacctggtcggcatgggcgtgctgccgctgcagttcaagggcaatgactcggcgcaatcgctgggcatcacgggcgacgaaaccttcgacatcgaaggcctggaaggcgaaatcaagccgcaacaggacgtcaccctggtgatcaagcgtgccaacggcgaaaccaagcgcgcgaaggtgctgctgcgcatcgacacgccgatcgaagtcgactactacaagcacggcggcatcctgccgttcgtgctgcgtcagctgctggccgcgtaa

SEQ ID NO: 66815 - protein, 901 aa, Ralstonia solanacearum GMI1000
MPHNLKKTLKTFKINGGQTGKFHSLPQLGKELGVAIERLPVSIRIVLESVLRNCDGKKVTEEHVAQLANWKPNADRVDEIPFVVARVVLQDFTGVPLLADLAAMRNVAERMGKNPKKIEPLVPVDLVVDHSVQVDHFREKKALDLNMQLEFSRNNERYQFMKWGMQAFDTFGVVQPGFGIVHQVNLEYLARGVHKKDGVFYPDTLVGTDSHTTMINGIGVVGWGVGGIEAEAGMLGQPVYFLTPDVVGVELKGRLREGCTATDLVLTITELLRREKVVGKFVEFFGEGTASLSLPDRATIGNMAPEYGATMGFFPVDDKTIDYFKGTGRTKEEIAAFEGYFRAQKLFGVPKAGEIDYTKTLTLDLSTVAPSLAGPKRPQDRIEIGNVKSTFSSLFAKPVAENGFNKKSEDLDKTFTTTNGVDVKSGDVLIAAITSCTNTSNPSVLLAAGLLAKKAVEAGLTVAPHIKTSLAPGSRVVTKYLEAAGLLPYLEKLGFGVTAYGCTTCIGNAGDLTPELNEAIVKNDIVAAAVLSGNRNFEARIHPNIRANFLASPPLVVAYAIAGNVTRDLMTEPVGKGKKGRDIYLGDIWPTSDEIAKLMKFAMNADTFRTNYEQVKKPSKLWANVKGTKGQVYDWPKSTYIAEPPFFEGFGMTPAAASASVKGARALGVFGDSVTTDHISPAGSIKETSPAGKYLLANGVLKADFNSYGSRRGNHEVMMRGTFANVRIKNLMIPAKADGSRVEGGETLFQPSGEQMSIYDAAMKYIAADTPTVVFGGEEYGTGSSRDWAAKGTQLLGVKAVIARSFERIHRSNLVGMGVLPLQFKGNDSAQSLGITGDETFDIEGLEGEIKPQQDVTLVIKRANGETKRAKVLLRIDTPIEVDYYKHGGILPFVLRQLLAA

SEQ ID NO: 66816 - DNA, 2598 bp, Ralstonia solanacearum GMI1000
  CDS (1)..(2598): transl_table=11
atgaacaccgcctaccgcaaacccctgcccggcacatcgctggattacttcgatgcccgcgcggccgtcgaggccatcgccccgggcgcctatgacaccctgccctacacttcgcgcgtcctggccgagaacctggtgcgccgctgcgacccggccacgctcgccgattcgctgcggcagctgatcgagcgcaagcgcgagctggacttcccgtggttccccgcacgtgtggtgtgccacgacatcctgggccagaccgcgctggtggacctggccggcctgcgcgatgcgatcgccgagcagggcggcgaccccgcgcaggtcaacccggtggtgccggtgcaactgatcgtcgaccactcgctggccgtggaatgcggcggcgacgaccccgacgccttcgccaagaaccgcgccatcgaagaccgccgcaacgaagaccgcttccacttcatcgagtggaccaagctggccttcaagaacgtcgacgtgatcccggcgggcaacggcatcatgcaccagatcaacctggagaagatgtcgccggtgatccacgccaaggacggcgtggcctttcccgacacgctggtcggtaccgacagccacacgccgcacgtcgatgcgctgggcgtgatcgccatcggcgtgggcggcctggaggccgagaacgtgatgctgggccgcgcctcgtggatgcgcctgccggacatcgtcggcgtggagctgaccggcgagcgccagcccggcatcaccgccaccgacatcgtgctggcgctcaccgaattcctgcgccagcagaaggtggtgggcgcctacctggagttccacggcgagggcgccgcgcgtctcacgctgggcgaccgcgccaccatctccaacatggcgcccgagtatggcgccacggcggcgatgttctcgatcgacccgcagaccctcgactacctgcgcctgaccggccgcgccgacgagcaggtcaggctggtggagacctatgccaaggccgcgggcctgtggtccgatacgctgaagcacgcggcatacgaacgcgtgctgcgcttcgatgtatcgagcgtcgtgcgcaacatggccggcccgtcgaacccgcatgcgcgcgtggcgaccaccgacctggcggccaagggcatcgccggccagtgggatgacgtgccggggcagatgccggacggcgcggtcatcatcgcggccatcaccagctgcaccaacaccagcaacccgcgcaacgtgatcgccgccggcctgctggcgcgcaatgccaaccggctcggcctcacgcgcaagccgtgggtgaagagctcgctggcgcccggctccaaggcggtggcgctgtatctggaagccgccggcctgaagacggagctggaggcactcggcttcggcatcgtcgcgtttgcctgcaccacgtgcaacggcatgagcggcgcgctggacccgacgatccagcaggagatcatcaaccgcgacctgtacgccacggccgtgctgtcgggcaaccgcaatttcgacgggcgcatccacccgtatgccaagcaggccttcctggcctcgccgccgctggtggtggcctacgccattgcgggcacggtgcgcttcgacatcgagcgcgacagcttcggcaccggccccgacggccagccgatcacgctgaaagacctgtggcccagcgatgcggaaatcgatgccatcgtgcgcgccgcggtcaagcccgagcagttccgccaggtgtacatcccgatgttcgaccagcgcagcgaggccaccgccagcgtcagcccgctgtacgactggcgagcgcagagcacctacatccgccgcccgccgtactgggaaggcgccctggccggcgagcgcacgctccgtggcctgcgcccgctggcggtgctgggcgacaacatcaccaccgaccacctgtcgccgtccaacgccatcctggccgacagcgcggccggcgagtacctggcgaagatgggcctgccggaagaagacttcaactcgtacgccacccatcgcggcgaccacctcaccgcgcagcgcgccaccttcgccaacccgacgctcaggaacgagatggcggtggtggacggcgaggtcaagaaaggctcgctggcccgcatcgagccggagggcaaggtcacgcgcatgtgggaagcgatcgaggcctacatggcgcgcaagcagccgctcatcgtcatcgccggcgccgactacggccagggcagctcgcgcgactgggccgccaagggcgtgcgcctggccggcgtggaagccatcgtcgccgagggcttcgagcgcatccaccgcaccaacctgatcggcatgggcgtgctgccgctggagttcaagcccggcaccacacgcatcacgctgggcatcgacggcaccgagaccttcgacgtgatcggcgcgcgcacgccacgcgccgacctcacgctggtcatccaccgcaagaacggcgagcgcgtggacgtgcccgtgacgtgccgcctcgacaccgccgaagaggtctcgatctacgaggccggcggcgtgctgcagcgcttcgcgcaggacttcctcgaatcagccaaggaggcggcatga

SEQ ID NO: 66817 - protein, 865 aa, Ralstonia solanacearum GMI1000
MNTAYRKPLPGTSLDYFDARAAVEAIAPGAYDTLPYTSRVLAENLVRRCDPATLADSLRQLIERKRELDFPWFPARVVCHDILGQTALVDLAGLRDAIAEQGGDPAQVNPVVPVQLIVDHSLAVECGGDDPDAFAKNRAIEDRRNEDRFHFIEWTKLAFKNVDVIPAGNGIMHQINLEKMSPVIHAKDGVAFPDTLVGTDSHTPHVDALGVIAIGVGGLEAENVMLGRASWMRLPDIVGVELTGERQPGITATDIVLALTEFLRQQKVVGAYLEFHGEGAARLTLGDRATISNMAPEYGATAAMFSIDPQTLDYLRLTGRADEQVRLVETYAKAAGLWSDTLKHAAYERVLRFDVSSVVRNMAGPSNPHARVATTDLAAKGIAGQWDDVPGQMPDGAVIIAAITSCTNTSNPRNVIAAGLLARNANRLGLTRKPWVKSSLAPGSKAVALYLEAAGLKTELEALGFGIVAFACTTCNGMSGALDPTIQQEIINRDLYATAVLSGNRNFDGRIHPYAKQAFLASPPLVVAYAIAGTVRFDIERDSFGTGPDGQPITLKDLWPSDAEIDAIVRAAVKPEQFRQVYIPMFDQRSEATASVSPLYDWRAQSTYIRRPPYWEGALAGERTLRGLRPLAVLGDNITTDHLSPSNAILADSAAGEYLAKMGLPEEDFNSYATHRGDHLTAQRATFANPTLRNEMAVVDGEVKKGSLARIEPEGKVTRMWEAIEAYMARKQPLIVIAGADYGQGSSRDWAAKGVRLAGVEAIVAEGFERIHRTNLIGMGVLPLEFKPGTTRITLGIDGTETFDVIGARTPRADLTLVIHRKNGERVDVPVTCRLDTAEEVSIYEAGGVLQRFAQDFLESAKEAA

SEQ ID NO: 66818 - DNA, 2634 bp, Ralstonia solanacearum GMI1000
  CDS (1)..(2634): transl_table=11
atggaaaacacctgcaccccacctgaagcgtcgatcggcgtgtcagacgccacttatcgctacgtcgatctgcccgccatgttcgacagcgcgctcacgcggttgccggtcgtgctgcggctgttgctggagaacgtcatccggaacacgcaaggcgaagaacgccagcgtgcggtgaacggcgtgctgcgctggctggacaccggcaccagcgaggaagagatcgccttccagccgaatcgcgtgctgatgcacgacacgacgagcacacccgcgctggtggacatcgccgcgatgcgcgacgcgctggccgaagccggcgccgatccggccgcgctcaacccggtgttgccggtggatgtgtcggttgaccactcgctggcggtcgaggcttacgcgcagcccgacgccgccgcgcgcaacctgcggatcgagatgcgtcgcaacgccgagcgctaccgcttcctgcgctgggcgtcgaacacgctgcgcggcgtgcgcatccacccgccgggcaccgggatcatgcataccatcaacctggagcaactggcgacggtggccaccgtgcagaccatcgatggtgctcggtggctggtgcccgataccctgatcggcaccgacagccacacgccgatgatcaacggcatcggtgtgctgggctggggcgtgggcgggctggaggcgcagacggtgatgttcggcatgccggtcatgcagcgcattccggatgtgattggcgtacggctggacggtgcgctgccggccggttcgtcggccaccgatctggccttgacggtgaccaaggcgctgcgcgacatcggcgtgtcgggcgagtttgtggagtttttcggccccggtgttgccacgctcacggcgggcgagcgttccgtcgtcgccaacatggcgcccgagtatggcgcgaccacgggcttcttccccgtggatgcgcagacgctggcgtacctgcgcgcaaccggccgtacggaacacgccattgcacaggtggaggcgctgcaccgccgtgccggcctgtggttcgaccccgacaacacgccgcgctatacccgcgtcattgagatcgacttgagcaccgtgcacctgcacgtggcggggccgcgtcggccgcaggatctgctgccctatacggagacggggcgtgcgttgtccgctgtcgctgcgcgtgcgcagcccggcaagacgctacccacgcatcccgtcgccattgctgcgatcacgagctgcaccaatacgtcggacccggcacagctcgtcgcggccgggctggtcgcgcgccgcgcgcgtgaacgcggtttgcgtgtgccggcgtgggtgaagacgtcgctggcgccgggctcgcctgcggctgccgagtatttgaaacgagccggtttgatcgatgacctggcggcggtgggtttcgacatcgtcggctttggctgtaccacgtgtatcggcaaccccggcccgctcacggcgccgatccagcaggccattgcgcatggcgagacggcgccggttgctgtgctctcaggcaatcgcaatttcccggggcgcgtgcacccggacctgagtctcggcttcatcatgtcgccgccgctggtgattgcgttcgcgctcgcgggtgatgccgcgctcgatttgagccgccagccgctgcaaaccaccgcagacggcacgcccgtctacctgcgcgatctgtggccgacgcgcgaggagatcgacgcgctggtccagcttggcacatcgcccacggattaccgccgcgcgttcgccaccgccaccgccaacccgatgtgggccgcgatcgatgcgcccacgaccgcgcgctacccgtgggatgcgcactccaccgcgctgcgccggccgccctttgcatcgctggacgccggcagccagctcggcgagttcgacgcctacccgctgctcgtgctgggcgatgacatcacgaccgatcacatctcaccggccagtgcgatcccgaaagacagcttcgtcgccgatttccttgccgcgcgcggtgatgaccgcaacgacctgaacgtctttgcgtcgcgtcgcggcaactgggaggtcatggtgcgcgccgcgttctataacaagacgctggtgaacctgctggcgcccgatgcacccgtcgcccatacggtgcacgcaccgagcggtgaagtcatgccgatccacgaggcggcgcggcgctatcacgacgaaggcgcctgcgtcgtgttgctggcgggtgcgcgctacggcaccggctcgtcgcgtgactgggcggccaaggggcagcggctgctcggtatccgggcggtcattgcggtaagcttcgagcgcattcaccgttccaatttgattggcatgggcatcctgccgctgcggttttcggcgggcgtgaatccgcaggcgctggcgatccggccgggcgacacggttcatctttcggcgctgccggagcggatcgaaccgcgttgcactgtcccggtccgcatccagcgcgcggatggtcgcgtggagatgttcgaggccaccgccgccgtggagacgcagcttgaaactgcgctgctccgtcgcggcggcgtgatcccctcgatcctgggcgacacgttagcgccgccacattcgagggcttcggtctga

SEQ ID NO: 66819 - protein, 877 aa, Ralstonia solanacearum GMI1000
MENTCTPPEASIGVSDATYRYVDLPAMFDSALTRLPVVLRLLLENVIRNTQGEERQRAVNGVLRWLDTGTSEEEIAFQPNRVLMHDTTSTPALVDIAAMRDALAEAGADPAALNPVLPVDVSVDHSLAVEAYAQPDAAARNLRIEMRRNAERYRFLRWASNTLRGVRIHPPGTGIMHTINLEQLATVATVQTIDGARWLVPDTLIGTDSHTPMINGIGVLGWGVGGLEAQTVMFGMPVMQRIPDVIGVRLDGALPAGSSATDLALTVTKALRDIGVSGEFVEFFGPGVATLTAGERSVVANMAPEYGATTGFFPVDAQTLAYLRATGRTEHAIAQVEALHRRAGLWFDPDNTPRYTRVIEIDLSTVHLHVAGPRRPQDLLPYTETGRALSAVAARAQPGKTLPTHPVAIAAITSCTNTSDPAQLVAAGLVARRARERGLRVPAWVKTSLAPGSPAAAEYLKRAGLIDDLAAVGFDIVGFGCTTCIGNPGPLTAPIQQAIAHGETAPVAVLSGNRNFPGRVHPDLSLGFIMSPPLVIAFALAGDAALDLSRQPLQTTADGTPVYLRDLWPTREEIDALVQLGTSPTDYRRAFATATANPMWAAIDAPTTARYPWDAHSTALRRPPFASLDAGSQLGEFDAYPLLVLGDDITTDHISPASAIPKDSFVADFLAARGDDRNDLNVFASRRGNWEVMVRAAFYNKTLVNLLAPDAPVAHTVHAPSGEVMPIHEAARRYHDEGACVVLLAGARYGTGSSRDWAAKGQRLLGIRAVIAVSFERIHRSNLIGMGILPLRFSAGVNPQALAIRPGDTVHLSALPERIEPRCTVPVRIQRADGRVEMFEATAAVETQLETALLRRGGVIPSILGDTLAPPHSRASV

SEQ ID NO: 66820 - DNA, 2364 bp, Drosophila melanogaster
  CDS (1)..(2364)
atggctgcgagattgatgaacgcccaggcacaggtgtgtcgactgggcaagcatgttgcgtccgaagccacagtggtgcgtcagttccacgcctcctgctacaccgcctccaaagtggctctgtccaagttcgactcggacgtctacctgccgtacgagaagctgaacaagcgcctggaagtggtgcgcggtcgcttgaaccgcccactgactctctccgagaaggtgctgtactcgcatctggacgatcccgcaaaccaggacatcgtgcgcggtacttcgtacctgcgtcttcgccccgatcgtgtggctatgcaggatgccactgcacagatggctctgcttcagtttatctcctccggactgaaaaaggtggctgtgccctccactgttcactgtgatcatttaatcgaggcccagattggtggacccaaggatttagcccgtgccaaggacctgaacaaggaagtgtacgatttcttggccagcacctgtgcaaagtacggattgggcttctggaagccaggcagcggaatcatccatcagatcattctggagaactacgctttccccggcctgctgatgattggtactgactcacacacccccaacggtggtggcttgggtggcctgtgcattggcgttggtggtgctgatgccgtcgatgtgatggccgacatcccctgggagctgaagtgccccaaggtgattggtgtcaatttgactggcaagatcagcggctggacctcgcccaaggatgttatcctgaaggttgccgatatcctgaccgtcaagggaggcaccggtgccatcattgagtatcacggcaagggtgttgactctatctcttgtacaggcatggccaccatctgcaacatgggtgctgagatcggagctaccacctctctgttccccttcaaccagcgcatggctgattacctgaaatcgacaggccgtgctggcattgcctccgaagcccagaagtaccaggccaagattctgtccgctgacaagaactgcgagtacgatgagctgattgaaatcaacctagacaccctggagccccatgttaacggaccattcactcccgatttgggccatcccatcagcaagctaggcgagaactcgaagaagaacgggtaccctatggacatccgtgtaggtcttattggctcttgcaccaactcttcgtatgaggacatgggtcgctgcgccagcatcgccaaggatgccatgagccatggcctcaagtcgaagattcctttcaatgtgactcccggatcagagcagatccgtgccaccatcgagcgcgacggcatctctgaggtgttcgacaagttcggcggtaccgttctggccaacgcttgcggtccctgcattggacagtgggatcgtaaggacgttaagaagggcgacaagaacaccattgtcacctcctacaaccgaaactttactggcaggaacgacgctaacccggccacccattgctttgtcactagtcccgagttggtcaccgctctgtccatcgccggtcgtctggacttcaacccgctgaccgacgagcttactggtgctgatggcaagaagttcaagctcaaggctcccttcggcgacgagctgcccgccaagggtttcgatcccggccaggacacctacactgctcccccacccagcggcgaaaatgtcaaggtggctgtcgaccccaagtcgacgcgtctgcagctgctggagccttttgacaagtggaacggccaggatctgaccgatctgactgtgctgatcaaggttaagggaaagtgcaccactgaccacatctccgctgccggaccctggctgaagtaccgtggccatttggacaacatctccaacaacatgtttatcggagccaccaactacgaaaacaacgagatgaacaacatcaagaaccaacgcaacggtagctggggaggagttcccgacgtagcccgcgactacaaggccaacggcatcaagtgggtggccgtcggcgatgagaactacggcgagggttcgtcccgcgagcatgccgctttggagccccgtcaccttggtggtcgtgccattatcgtcaagtccttcgcccgtatccacgagaccaacctgaagaaacagggtcttctgcctctcaccttcgccaatcccgctgattacgataagatccagcccacgagcaaaatctccctgctcaacctgaaatcccttgcgcctggaaagcccgtagatgccgaaatcaagaatggcgacaaggtcgagaggatcaagcttaaccacaccctgaacgacctacagatcggctggttcaaggccggcagcgctctcaaccgcatgaaggagctggcccagtaa

SEQ ID NO: 66821 - protein, 787 aa, Drosophila melanogaster
MAARLMNAQAQVCRLGKHVASEATVVRQFHASCYTASKVALSKFDSDVYLPYEKLNKRLEVVRGRLNRPLTLSEKVLYSHLDDPANQDIVRGTSYLRLRPDRVAMQDATAQMALLQFISSGLKKVAVPSTVHCDHLIEAQIGGPKDLARAKDLNKEVYDFLASTCAKYGLGFWKPGSGIIHQIILENYAFPGLLMIGTDSHTPNGGGLGGLCIGVGGADAVDVMADIPWELKCPKVIGVNLTGKISGWTSPKDVILKVADILTVKGGTGAIIEYHGKGVDSISCTGMATICNMGAEIGATTSLFPFNQRMADYLKSTGRAGIASEAQKYQAKILSADKNCEYDELIEINLDTLEPHVNGPFTPDLGHPISKLGENSKKNGYPMDIRVGLIGSCTNSSYEDMGRCASIAKDAMSHGLKSKIPFNVTPGSEQIRATIERDGISEVFDKFGGTVLANACGPCIGQWDRKDVKKGDKNTIVTSYNRNFTGRNDANPATHCFVTSPELVTALSIAGRLDFNPLTDELTGADGKKFKLKAPFGDELPAKGFDPGQDTYTAPPPSGENVKVAVDPKSTRLQLLEPFDKWNGQDLTDLTVLIKVKGKCTTDHISAAGPWLKYRGHLDNISNNMFIGATNYENNEMNNIKNQRNGSWGGVPDVARDYKANGIKWVAVGDENYGEGSSREHAALEPRHLGGRAIIVKSFARIHETNLKKQGLLPLTFANPADYDKIQPTSKISLLNLKSLAPGKPVDAEIKNGDKVERIKLNHTLNDLQIGWFKAGSALNRMKELAQ

SEQ ID NO: 66822 - DNA, 2694 bp, Agrobacterium tumefaciens str. C58
  CDS (1)..(2694): transl_table=11
atgcccaagtcactcgacagttttcaatgtcgttccgtccttaccgttgatggtaaggactatgtctattttagccttcccaaggctgaagccaatggcctgaagggcgtttccaagctgccctattccatgaaggttcttctggaaaacctgctgcgtttcgaggatggccagtctgtcaccaaggcgcacatcattgcggtttccgaatggttgaataacaagggcctgaccgaaaccgaaattgcctaccgccccgcccgcgttctcatgcaggactttaccggcgttcccgccgtggtcgaccttgccgccatgcgtgatggcctcaaggctctcggcggcgatccggaaaagatcaatccgctcgttccggtcgacctcgtcatcgaccactctgttatcgttgatgaattcggcacgccgaacgcctttgcccgcaacgtggaactcgaatatgagcgcaacggcgagcgttaccgcttcctgaagtggggccagcaggcgttcaagaacttccgcgtcgttccgcccggcaccggcatatgtcaccaggtcaacctcgaatatctcggccagaccgtgtggacgaaagaagaggaaggcgaaacgatcgcttatccggacacctgcgtcggcaccgacagccacacgaccatgatcaacggtctcggtgttctcggctggggtgttggtggtatcgaggctgaggcggccatgctcggccagccggtttccatgcttctgcccgaggtcatcggcttcaagctgaccggcaaggtgaaggaaggcgtcaccgcgaccgacctcgtgctgaccgtcgtgcagatgctgcgcaagaagggcgtggtttccaagttcgtcgaattcttcggtcccggccttgattcgatgtctctcgccgaccgtgcgaccatcggtaacatgggcccggaatatggtgcgacctgcggcttcttcccggttgatggcgaaaccatcaattacctgacgatgtccggccgtgccaaggaccgtatcgccctcgtcgaagcctattcgaaggcacaggacatgtggcgcaccggcgatggttccgacctcgtcttcaccgatacgctggaactcgatcttggtgacgtcgtgccctccatggctggccccaagcgtccggaaggccgcctgccgcttgaaaccatcgcgcccaacttcgcgacggcacttgaaaacgactacaagaagcccggccagctcaacagccgctatgcggttgaaggcgaagctttcgatctcggccatggcgatgtggcgattgccgccatcacctcctgcaccaacacctccaacccctcggttcttatcgctgccggccttctcgcccgcaatgcggtcgccaaggggctgaagtccaagccatgggtgaagacctcgctggcaccgggaagccaagtcgttgccgaatatctcgacaagtcaggtctgcagaaggatctcgatgcgatcggtttcaacctcgtcggtttcggctgcaccacctgcatcggcaattccggtccactgccgcctgcgatctccaagacgatcaacgacaagggcctgatcacatcaggcgttctctcgggcaaccgcaacttcgaaggccgtatttcgcctgacgttcaggcgaactatctggcatcgccgccgctcgtcgtggcctatgcccttgccggcacggtccagaaagatctgacgaaggagccgatcggcgacgaccagaacggcaatcctgtttatctcaaggatatctggccgacctcgaaggaaatccaggaattcatcctgaaatacgtcacccgcgagctttatgaaacgaagtatgccgacgtgttcaagggtgatgcgaactggcaggccgttcaggttccgccgggccagacctatgcctgggatgaccagtcgacctatgttcagaacccgccttatttcgtcggcatgggcaaaaagggcaccggtctcaagaacatcaagggcgcgcgcgtcctcggtctcttcggcgacaagatcaccaccgaccatatttctccggccggttcgatcaaggctgcatcgcctgccggcgcttatctgacggagcatggcgttgccgtggccgacttcaaccagtacggcacgcggcgtggcaaccatgaagtgatgatgcgcggcaccttcgccaatatccgcatccgcaaccacatgcttggtccgaacggcaaggaaggtggctacaccatccactatccgtccaaggaagagatgtcgatctacgacgctgccatgaaatacaaggcggaaggcgtcccgctcgtcatctttgccggcgtcgaatatggtaacggctcatcccgcgactgggcggcgaagggtacaaacctgctcggcgtgaaggctgtgattgcgcagtcgttcgagcgtatccaccgctccaacctcgtcggcatgggcgtcgttcccttcgtcttcgaagagggaacgacctgggcgagtctcgatctcaagggagacgaagtcgttgagatcgatggtctcgaaggcgaaatcaagccgcgtgagaagaagatcgccaagatcacctatagcgacggttcggtgaaggaagttccgcttctttgccgcatcgatacgctggacgaggtaatctacatgaacaatggcggcattctgcagaccgttcttcgcgatctggctgcctaa

SEQ ID NO: 66823 - protein, 897 aa, Agrobacterium tumefaciens str. C58
MPKSLDSFQCRSVLTVDGKDYVYFSLPKAEANGLKGVSKLPYSMKVLLENLLRFEDGQSVTKAHIIAVSEWLNNKGLTETEIAYRPARVLMQDFTGVPAVVDLAAMRDGLKALGGDPEKINPLVPVDLVIDHSVIVDEFGTPNAFARNVELEYERNGERYRFLKWGQQAFKNFRVVPPGTGICHQVNLEYLGQTVWTKEEEGETIAYPDTCVGTDSHTTMINGLGVLGWGVGGIEAEAAMLGQPVSMLLPEVIGFKLTGKVKEGVTATDLVLTVVQMLRKKGVVSKFVEFFGPGLDSMSLADRATIGNMGPEYGATCGFFPVDGETINYLTMSGRAKDRIALVEAYSKAQDMWRTGDGSDLVFTDTLELDLGDVVPSMAGPKRPEGRLPLETIAPNFATALENDYKKPGQLNSRYAVEGEAFDLGHGDVAIAAITSCTNTSNPSVLIAAGLLARNAVAKGLKSKPWVKTSLAPGSQVVAEYLDKSGLQKDLDAIGFNLVGFGCTTCIGNSGPLPPAISKTINDKGLITSGVLSGNRNFEGRISPDVQANYLASPPLVVAYALAGTVQKDLTKEPIGDDQNGNPVYLKDIWPTSKEIQEFILKYVTRELYETKYADVFKGDANWQAVQVPPGQTYAWDDQSTYVQNPPYFVGMGKKGTGLKNIKGARVLGLFGDKITTDHISPAGSIKAASPAGAYLTEHGVAVADFNQYGTRRGNHEVMMRGTFANIRIRNHMLGPNGKEGGYTIHYPSKEEMSIYDAAMKYKAEGVPLVIFAGVEYGNGSSRDWAAKGTNLLGVKAVIAQSFERIHRSNLVGMGVVPFVFEEGTTWASLDLKGDEVVEIDGLEGEIKPREKKIAKITYSDGSVKEVPLLCRIDTLDEVIYMNNGGILQTVLRDLAA

SEQ ID NO: 66824 - DNA, 2688 bp, Brucella melitensis 16M
  CDS (1)..(2688): transl_table=11
gtgtcgcaaatcgacagctttaaatgccgcaaaaccctttccgtggggggcaaggaatatgtctattacagcctgacggaagccgaaaagaacggcctggcaggcatttccagtcttcctttctccatgaaggttctgcttgagaacctgctccgcttcgaggacgaccgctccgtcaagaagtcggacatcgaaaatgtcgccaagtggcttgccgaccgcggcaaggctggcgctgaaatcgcctatcgcccggcgcgcgtgctgatgcaggacttcaccggcgttcccgccgtggtggatctggctgcgatgcgcgacggcatcaaggcgctcggcggcgacccggaaaagatcaatccgctcgttcccgttgatctcgtcatcgaccattcggtcatcgtggacgatttcggcaacccgctggctttccagcacaatgtcgatctggaatatcagcgcaatggcgaacgctaccgcttcctcaagtggggccagcaggcattcaagaatttccgcgtcgttccgcccggcaccggcatctgccatcaggtgaatctggaatatctggcccaagccgtctggaccaaggaagaagacggcgtcaccctcgcctatcccgacacctgcgtgggcaccgattcccacaccaccatggtcaatggccttggcgttctgggctggggcgtcggcggtatcgaagctgaagcggccatgcttggccagccggtttccatgcttctgccggaagtcatcggtttccgcctcaccggcaagctcaaggaaggcgtcaccgcgaccgacctcgtgctcactgtcacgcagatgctgcgcaagaagggcgtcgtcggcaagttcgtcgaattcttcggcgcgggcctcgacaacatgtcgctcgcagaccgtgcgaccatcggcaatatggggccggaatatggtgcaacctgcggcttcttcccggttgaccaggaaacgctgaaatatatgaacatgaccggccgcgacgaacatcgtctcgaactggtcgaagcctattgccgcgcacagggcatgtggcgcgattccagctccgcagatccggtcttcaccgacgttctcgagctcgacatgggcgatgtcgtgccgtcgatggccggcccgaagcgcccggaaggccgcatcccactggaaaacatcggctccggcttcgcgacctcgcttgaaaccgaatacaagaagaccacgggccagaccacccgctatcccgtcgagggtgaaaacttcgatcttggccatggcgatgtggttattgccgccatcacgtcgtgcaccaacacctcgaacccgagcgtgctgatcgccgctggccttcttgcccgcaacgctgtcgccaagggcctcaagacgaagccatgggtcaagacctcgcttgctcccggctcgcaggtcgtcgccgcctatctcgaagacgccggcctccagaaggatctcgacgcgctcggcttcaaccttgtcggcttcggctgcacgacctgcatcggcaattccggtccgttgccggccccgatctccaagacgatcaatgaaaagggcctcatcgcggctgcagtgctttcgggcaatcgtaactttgaaggccgcgtttcgccggatgtgcaggccaattaccttgcctcgccgccgctcgtcgtcgcccatgccctggcaggcacggtgacgaaggacctgaccaaggaaccgcttggcgaagacaaggacggcaatccggtctatctgcgcgatatctggccttccacgcaggaaatccaggacttcatcgccaagaacgtcacccgcaagcttttctcggaaaaatatgcggatgtgttcaagggcgacgccaactggcaggccgttcaggttcccgccggtcagacctatgcatgggacgacaattcgacctatgtgcagaacccgccttatttcgtcggcatgggcaagactgccggcatgatcggcgacgtcaagggcgcccgcattctgggtctgttcggtgacaagatcacgaccgaccatatctcgcctgccggttccatcaaggcgcagtcgcctgcgggcaaatatctgctcgaccatggcgtggccgtcgccgacttcaaccagtacggcacacgtcgcggcaaccatgaagtgatgatgcgcggcactttcgcaaatatccgtatccgcaaccacatgctgggcgaaaacggacgtgaaggcggctacaccatccactatccgtcgaagaaagagatgtcgatctatgacgcggccatggaatacaaggccgagggtgtgccgctcgtcgtcttcgcaggcgtcgaatatggcaacggttcgtcgcgcgactgggctgccaagggcaccaacctgctcggcgtgaaggccgtgatcgcgcagtcctttgagcgtatccaccgctccaacctcgtcggcatgggtatcgtgcccttcgtcttcgaggaaggcacaagctggcagtcgctgggcctcaagggcgacgagatcgtcaccatcgaaggcctggctgatgtgcgcccgcgccagcgggtcgaagcttccatcacctatgccgatggcaccgtgaagaaagttccactcatctgccgcatcgatacgctggacgagcttgattacatgaagaacggcggcatcctgcagaccgttctgcgtgacctcgtcgcttaa

SEQ ID NO: 66825 - protein, 895 aa, Brucella melitensis 16M
MSQIDSFKCRKTLSVGGKEYVYYSLTEAEKNGLAGISSLPFSMKVLLENLLRFEDDRSVKKSDIENVAKWLADRGKAGAEIAYRPARVLMQDFTGVPAVVDLAAMRDGIKALGGDPEKINPLVPVDLVIDHSVIVDDFGNPLAFQHNVDLEYQRNGERYRFLKWGQQAFKNFRVVPPGTGICHQVNLEYLAQAVWTKEEDGVTLAYPDTCVGTDSHTTMVNGLGVLGWGVGGIEAEAAMLGQPVSMLLPEVIGFRLTGKLKEGVTATDLVLTVTQMLRKKGVVGKFVEFFGAGLDNMSLADRATIGNMGPEYGATCGFFPVDQETLKYMNMTGRDEHRLELVEAYCRAQGMWRDSSSADPVFTDVLELDMGDVVPSMAGPKRPEGRIPLENIGSGFATSLETEYKKTTGQTTRYPVEGENFDLGHGDVVIAAITSCTNTSNPSVLIAAGLLARNAVAKGLKTKPWVKTSLAPGSQVVAAYLEDAGLQKDLDALGFNLVGFGCTTCIGNSGPLPAPISKTINEKGLIAAAVLSGNRNFEGRVSPDVQANYLASPPLVVAHALAGTVTKDLTKEPLGEDKDGNPVYLRDIWPSTQEIQDFIAKNVTRKLFSEKYADVFKGDANWQAVQVPAGQTYAWDDNSTYVQNPPYFVGMGKTAGMIGDVKGARILGLFGDKITTDHISPAGSIKAQSPAGKYLLDHGVAVADFNQYGTRRGNHEVMMRGTFANIRIRNHMLGENGREGGYTIHYPSKKEMSIYDAAMEYKAEGVPLVVFAGVEYGNGSSRDWAAKGTNLLGVKAVIAQSFERIHRSNLVGMGIVPFVFEEGTSWQSLGLKGDEIVTIEGLADVRPRQRVEASITYADGTVKKVPLICRIDTLDELDYMKNGGILQTVLRDLVA

SEQ ID NO: 66826 - DNA, 2496 bp, Pyrococcus furiosus DSM 3638
  CDS (1)..(2496): transl_table=11
atgtatttagaagagaaggatggaataaaattttacagcttaaataagttggaaaaggaagggtttgatgttcattcccttccctattctctcagaattcttgctgaaaatattctcagacatctcaacaatggagtggtaagttatgaacatatagaaaacatctttgagagaaagggggatattcccttctaccccgcccgcataataatgcaggactatacaggagtgccagcaatagttgatctggccgcaatgagagattacatcaaagaaaaggggaaagatccaagtagagtaaacccaaaaattcctgtagaacttgttgtggatcactccctaatagtcctctatcacggaaccaagtactccctctatgaaaacatgaaggaggaactaaaagcaaatagggagagatattcccttctaaagtgggcatctaaagcttttgaaaatctaaagatcatccctcctggaaagggaattatccaccagataaatgttgaacacctcgctagaatagtgtttttagaagagggaattgcatatccagacacagtcctaggaacggacagtcacacaccaatggttaatggaattggagttctgggatggggtgttggagggatagaggccgaggccgctctcttagggttaccgtattttatgaaagtcccagaggtcgttggagtcgttcttgaaggagaaccaagtcctgagataacacctacggatatcgttctcacgataactgaaaagcttagaaaagtgggagtggttgggaaattccttgagtatactggaaatgtcgaggcattatcagcattcgacagaactgttatagctaatatgacaccagaaaatggagccacagtgggatacttcccaattgacgaagaaacaataaaattcataagattgactagaggggagagcaaagcaaagcttgttgagaagtatgcaaaactcaacatgctctatagagaagaaactcccgaatttgacaaaactgttaagattgacctctcaaaggtcgagccttctgtggcaggcccatttcatccagaagacaggataagactcaaagatcttaaaaactcatttaaagttgagaaaaaaacaaaaattagaataaatggtggagaagtagagattgaagacggaataattgggttggctgcaattgcaagttgtacaaacacctcaaacccctataacatcttagctgcggcattagttgccaaaaaagccgttgaactcgggctgagaaccaaaccatgggttaagaccacatttaccccaggaagtagagtagttgttaagtacttggaaaagcttgggttgctaagctacctcgaagccctcggatttcatgtcaatggatatgcatgtgcaagctgtatagggaacagtggtccactaaaaagggaagtagaggaagttatagataaaggaataaaagtagctgcggtaatcagtgggaacagaaactttaggaggagagtaaactcaaaaatcgactacacctatctcgctagcccacctttggtcgttgtatttgccatagcgggtaaaataacaattgatccaagcgagcccttagcctatgaccccaatggcaagcctgtatatcttacggacattctcccaaccaaagaagaagtcaaaaagcttgaagaagttataggagaagaactctacaaagaggcctattcaagcttattcgaggactctatatggaaagacatagagaccgaagagagcccactgtttaagtgggatgaaaaatccacatatgttagaaaaccacccttctttgatttaacccccataactgatgatattaaaggagcaagagccttaatagtcctgggagatagaattagcacagatgacataagtcctgcaggaaaaatagacccagagagtcctgctggcaggtatctcctctccctaggggtgaaaccagaagagcttcacacatatggagccagaagaggaaaccatgaagtcatgatgaggggcacatttgccagatttaagatgatctattggcccacaggagaagaaatgagtgtatatgaagctgccatgagatataaagagagaggcatccccctcataataatagctggaaagcagtatggggtgggaagcagtcgagattgggccgccaaaggaccagctcttttaggcgttaaggccgtaattgcagagagtttcgaaagaatacacagaagcaatttagttggaatgggaattgtgccacttcaattcaaagatccagaggttaggaagaggctaactggggaggaggtatacgatataattgggctgaaagacttgtacccaggaaaaacaatcaaggttatagcgaggaagccgaatggagaagttatagagtttgagacaattgctagagtggagacaccaatagaggtggaatacataaggcatggaggaatacttaagtatgcgttagaactgttgggctaa

SEQ ID NO: 66827 - protein, 831 aa, Pyrococcus furiosus DSM 3638
MYLEEKDGIKFYSLNKLEKEGFDVHSLPYSLRILAENILRHLNNGVVSYEHIENIFERKGDIPFYPARIIMQDYTGVPAIVDLAAMRDYIKEKGKDPSRVNPKIPVELVVDHSLIVLYHGTKYSLYENMKEELKANRERYSLLKWASKAFENLKIIPPGKGIIHQINVEHLARIVFLEEGIAYPDTVLGTDSHTPMVNGIGVLGWGVGGIEAEAALLGLPYFMKVPEVVGVVLEGEPSPEITPTDIVLTITEKLRKVGVVGKFLEYTGNVEALSAFDRTVIANMTPENGATVGYFPIDEETIKFIRLTRGESKAKLVEKYAKLNMLYREETPEFDKTVKIDLSKVEPSVAGPFHPEDRIRLKDLKNSFKVEKKTKIRINGGEVEIEDGIIGLAAIASCTNTSNPYNILAAALVAKKAVELGLRTKPWVKTTFTPGSRVVVKYLEKLGLLSYLEALGFHVNGYACASCIGNSGPLKREVEEVIDKGIKVAAVISGNRNFRRRVNSKIDYTYLASPPLVVVFAIAGKITIDPSEPLAYDPNGKPVYLTDILPTKEEVKKLEEVIGEELYKEAYSSLFEDSIWKDIETEESPLFKWDEKSTYVRKPPFFDLTPITDDIKGARALIVLGDRISTDDISPAGKIDPESPAGRYLLSLGVKPEELHTYGARRGNHEVMMRGTFARFKMIYWPTGEEMSVYEAAMRYKERGIPLIIIAGKQYGVGSSRDWAAKGPALLGVKAVIAESFERIHRSNLVGMGIVPLQFKDPEVRKRLTGEEVYDIIGLKDLYPGKTIKVIARKPNGEVIEFETIARVETPIEVEYIRHGGILKYALELLG

SEQ ID NO: 66828 - DNA, 2718 bp, Schizosaccharomyces pombe 972h-
  CDS (1)..(2718)
atgaagctttgcctttcgggctcttcgcaggcaattccatccaaaggaattagtttggttgcagctcgattccaaagcactgcttcgagggcttcctatgtgacaccgccatatgagaagttgatggggaaactccaacaagttcgcaagtttcttcctggtcaaaagctcactttggcggaaaaggtcctttattctcatttggttaaccctgaagagagcttcagtggtgtctctccttcagacattcgtggctccttgtacctcaaactgaatcccgatcgtgtagccatgcaggatgcctctgctcaaatggccttgcttcagtttatgacgtgtggtcttgaaaaaactatgattcccgctagcattcattgtgaccacttgattgttggtcatcgtggtgccaacagtgatatccccgatagcatcgccaataacaaggagatttttgattttttgcaaagtgccgctaaaaagtacggcatacagttttggggcccaggaagtggcattattcaccaaatcgtgctagaaaactatgccgctcctggtggaatgatgcttggaacagattctcatactcccaacgctggtggtttgggtatgattgccattggcgttggtggtgccgatgccgtcgatgctatgaccaatacaccatgggagttaaaagctcccaaaatcatcggtgtcaaccttacgggcgctatgtctggctggactactccaaaagaccttatacttcatttggctggtaagcttaccgttcgtggtggtaccggtcatattattgaatactttggccctggtgttgcgtccctctcttgcactggtatggctactgtttgtaatatgggcgctgaagtcggtgcaaccacctcaatctttccttataccgattctatgcgtcgctatctaattgccacacaccgtgcagaggtcgccgatgctgcgtcggaggttcatagtgaatacaactaccttgctgctgatactggggctaaatatgatcaaataattgacatcaacctttcggaacttaccccttccctcaatggtcccttcactcctgatttgagcactcctgtttcaaaatttggtgaagccattgagaaaaacaaatggcctaaaaagttgtcggctggccttatcggttcatgtaccaattcttcttaccaagatatgacttgtgttgtcgatgttgttgaacaagctatatctgctggacttaaaccaaaggttccatttttggttacaccgggtagtgagcaaattcgcgcaaccattgaacgtgatggcattactgaacgcttggaagaagctggcgctactgtgctggcaaacgcatgtggtccatgcattggtatgtggaagcgtaccgatgacattgcttcaggcgagccaaatgctattcttacaagtttcaatcgtaatttccgctctcgtaatgacggaaatccatcgactatgaacttcttgaccagtcccgtaattgtggctgccaagattttttcctctgatcttgcatttgatcccacgcatgatacattgcaaacacccgatggtaaagccttcaagtttagaccccctcagggcgtcgagcttccttcggctggattcatcgctggtgactcttcctacattcctgagcctaatcctcagcctgttccggaaaccgaagttacaatcgatcccaaatctgatcgtttggaggcccttgaaccctttgagccttaccaaggaggagaaatggaaaaccttaaggttgcagtgaaggtcaaggggaagtgtactaccgatcatatttctgccgctggtaaatggttaaaatacaaaggccatcttagcaacatttgtaacaacacacttattggtgcaatgaatgctgctactggagaagtcaatcgtgcctatgacaatggcaaaggcatgacaattcctgagctgatgtggaagtggaagaaggatggacaaccttggttggtagtagctgaacataactatggtgagggttctgctcgtgagcatgcagctttgcaaccccgtgccatgaatggtcgtattattttgaccaaatcatttgcccgtattcatgagactaatttgaagaagcaaggcgttttgcctttaaccttcgtcaatgaagccgactatgaaaagatagatgcagaggataaggtttccactcgtggtattgaacaacttttagaaggtgttttggaccagcctattacccttgtcgtcactaagaaagacggttcagttgtagagattccttgcaaacacacaatgagtaaagaccagatagaatttttcaaggccggttcagctcttaatttgattcgcgaaaaggcccattctggcgtggtaaatcaaaaggttatagattcaataaaacaacaacctgaccactatgctgatgcgtatatatttaatcgtcattttgttatagccaaaggagatcaactaggattgccttttcacttgaaaggtgtccaggttggtgatacgatacgacttgataaaatcgcttccttcggctcaagagattttactctctttggtaacccgtatgtagacccttcattgtttacgattgaagcggttgtattatcattccctaaaagcgcattaagtgttcgagtaaaacacaagcgtcgtcatcgtcatgatcgtgtaatgaaacataaacaaacgtatactattttaaggtaa

SEQ ID NO: 66829 - protein, 905 aa, Schizosaccharomyces pombe 972h-
MKLCLSGSSQAIPSKGISLVAARFQSTASRASYVTPPYEKLMGKLQQVRKFLPGQKLTLAEKVLYSHLVNPEESFSGVSPSDIRGSLYLKLNPDRVAMQDASAQMALLQFMTCGLEKTMIPASIHCDHLIVGHRGANSDIPDSIANNKEIFDFLQSAAKKYGIQFWGPGSGIIHQIVLENYAAPGGMMLGTDSHTPNAGGLGMIAIGVGGADAVDAMTNTPWELKAPKIIGVNLTGAMSGWTTPKDLILHLAGKLTVRGGTGHIIEYFGPGVASLSCTGMATVCNMGAEVGATTSIFPYTDSMRRYLIATHRAEVADAASEVHSEYNYLAADTGAKYDQIIDINLSELTPSLNGPFTPDLSTPVSKFGEAIEKNKWPKKLSAGLIGSCTNSSYQDMTCVVDVVEQAISAGLKPKVPFLVTPGSEQIRATIERDGITERLEEAGATVLANACGPCIGMWKRTDDIASGEPNAILTSFNRNFRSRNDGNPSTMNFLTSPVIVAAKIFSSDLAFDPTHDTLQTPDGKAFKFRPPQGVELPSAGFIAGDSSYIPEPNPQPVPETEVTIDPKSDRLEALEPFEPYQGGEMENLKVAVKVKGKCTTDHISAAGKWLKYKGHLSNICNNTLIGAMNAATGEVNRAYDNGKGMTIPELMWKWKKDGQPWLVVAEHNYGEGSAREHAALQPRAMNGRIILTKSFARIHETNLKKQGVLPLTFVNEADYEKIDAEDKVSTRGIEQLLEGVLDQPITLVVTKKDGSVVEIPCKHTMSKDQIEFFKAGSALNLIREKAHSGVVNQKVIDSIKQQPDHYADAYIFNRHFVIAKGDQLGLPFHLKGVQVGDTIRLDKIASFGSRDFTLFGNPYVDPSLFTIEAVVLSFPKSALSVRVKHKRRHRHDRVMKHKQTYTILR

SEQ ID NO: 66830 - DNA, 2832 bp, Corynebacterium glutamicum ATCC 13032
  CDS (1)..(2832): transl_table=11
ttggagctcactgtgactgaaagcaagaactccttcaatgctaagagcacccttgaagttggcgacaagtcctatgactacttcgccctctctgcagtgcctggcatggagaagctgccgtactccctcaaggttctcggagagaaccttcttcgtaccgaagacggcgcaaacatcaccaacgagcacattgaggctatcgccaactgggatgcatcttccgatccaagcatcgaaatccagttcaccccagcccgtgttctcatgcaggacttcaccggtgtcccttgtgtagttgacctcgcaaccatgcgtgaggcagttgctgcactcggtggcgaccctaacgacgtcaacccactgaacccagccgagatggtcattgaccactccgtcatcgtggaggctttcggccgcccagatgcactggctaagaacgttgagatcgagtacgagcgcaacgaggagcgttaccagttcctgcgttggggttccgagtccttctccaacttccgcgttgttcctccaggaaccggtatcgtccaccaggtcaacattgagtacttggctcgcgtcgtcttcgacaacgagggccttgcatacccagatacctgcatcggtaccgactcccacaccaccatggaaaacggcctgggcatcctgggctggggcgttggtggcattgaggctgaagcagcaatgctcggccagccagtgtccatgctgatccctcgcgttgttggcttcaagttgaccggcgagatcccagtaggcgttaccgcaactgacgttgtgctgaccatcaccgaaatgctgcgcgaccacggcgtcgtccagaagttcgttgagttctacggctccggtgttaaggctgttccactggctaaccgtgcaaccatcggcaacatgtccccagagttcggctccacctgtgcgatgttcccaatcgacgaggagaccaccaagtacctgcgcctcaccggccgcccagaagagcaggttgcactggtcgaggcttacgccaaggcgcagggcatgtggctcgacgaggacaccgttgaagctgagtactccgagtacctcgagctggacctgtccaccgttgttccttccatcgctggccctaagcgcccacaggaccgcatccttctctccgaggcaaaggagcagttccgtaaggatctgccaacctacaccgacgacgctgtttccgtagacacctccatccctgcaacccgcatggttaacgaaggtggcggacagcctgaaggcggcgtcgaagctgacaactacaacgcttcctgggctggctccggcgagtccttggctactggcgcagaaggacgtccttccaagccagtcaccgttgcatccccacagggtggcgagtacaccatcgaccacggcatggttgcaattgcatccatcacctcttgcaccaacacctctaacccatccgtgatgatcggcgctggcctgatcgcacgtaaggcagcagaaaagggcctcaagtccaagccttgggttaagaccatctgtgcaccaggttcccaggttgtcgacggctactaccagcgcgcagacctctggaaggaccttgaggccatgggcttctacctctccggcttcggctgcaccacctgtattggtaactccggcccactgccagaggaaatctccgctgcgatcaacgagcacgacctgaccgcaaccgcagttttgtccggtaaccgtaacttcgagggacgtatctcccctgacgttaagatgaactacctggcatccccaatcatggtcattgcttacgcaatcgctggcaccatggacttcgacttcgagaacgaagctcttggacaggaccaggacggcaacgacgtcttcctgaaggacatctggccttccaccgaggaaatcgaagacaccatccagcaggcaatctcccgtgagctttacgaagctgactacgcagatgtcttcaagggtgacaagcagtggcaggaactcgatgttcctaccggtgacaccttcgagtgggacgagaactccacctacatccgcaaggcaccttacttcgacggcatgcctgtcgagccagtggcagtcaccgacatccagggcgcacgcgttctggctaagctcggcgactctgtcaccaccgaccacatctcccctgcttcctccattaagccaggtacccctgcagctcagtacttggatgagcacggtgtggaacgccacgactacaactccctgggttccaggcgtggtaaccacgaggtcatgatgcgcggcaccttcgccaacatccgcctccagaaccagctggttgacatcgcaggtggctacacccgcgacttcacccaggagggtgctccacaggcgttcatctacgacgcttccgtcaactacaaggctgctggcattccgctggtcgtcttgggcggcaaggagtacggcaccggttcttcccgtgactgggcagctaagggcactaacctgctcggaattcgcgcagttatcaccgagtccttcgagcgtattcaccgctccaacctcatcggtatgggcgttgtcccactgcagttccctgcaggcgaatcccacgagtccctgggccttgacggcaccgagaccttcgacatcaccggactgaccgcactcaacgagggcgagactcctaagactgtcaaggtcaccgcaaccaaggagaacggcgacgtcgtcgagttcgacgcagttgtccgcatcgacaccccaggtgaggctgactactaccgccacggcggcatcctgcagtacgtgctgcgtcagatggctgcttcttctaagtaa

SEQ ID NO: 66831 - protein, 943 aa, Corynebacterium glutamicum ATCC 13032
MELTVTESKNSFNAKSTLEVGDKSYDYFALSAVPGMEKLPYSLKVLGENLLRTEDGANITNEHIEAIANWDASSDPSIEIQFTPARVLMQDFTGVPCVVDLATMREAVAALGGDPNDVNPLNPAEMVIDHSVIVEAFGRPDALAKNVEIEYERNEERYQFLRWGSESFSNFRVVPPGTGIVHQVNIEYLARVVFDNEGLAYPDTCIGTDSHTTMENGLGILGWGVGGIEAEAAMLGQPVSMLIPRVVGFKLTGEIPVGVTATDVVLTITEMLRDHGVVQKFVEFYGSGVKAVPLANRATIGNMSPEFGSTCAMFPIDEETTKYLRLTGRPEEQVALVEAYAKAQGMWLDEDTVEAEYSEYLELDLSTVVPSIAGPKRPQDRILLSEAKEQFRKDLPTYTDDAVSVDTSIPATRMVNEGGGQPEGGVEADNYNASWAGSGESLATGAEGRPSKPVTVASPQGGEYTIDHGMVAIASITSCTNTSNPSVMIGAGLIARKAAEKGLKSKPWVKTICAPGSQVVDGYYQRADLWKDLEAMGFYLSGFGCTTCIGNSGPLPEEISAAINEHDLTATAVLSGNRNFEGRISPDVKMNYLASPIMVIAYAIAGTMDFDFENEALGQDQDGNDVFLKDIWPSTEEIEDTIQQAISRELYEADYADVFKGDKQWQELDVPTGDTFEWDENSTYIRKAPYFDGMPVEPVAVTDIQGARVLAKLGDSVTTDHISPASSIKPGTPAAQYLDEHGVERHDYNSLGSRRGNHEVMMRGTFANIRLQNQLVDIAGGYTRDFTQEGAPQAFIYDASVNYKAAGIPLVVLGGKEYGTGSSRDWAAKGTNLLGIRAVITESFERIHRSNLIGMGVVPLQFPAGESHESLGLDGTETFDITGLTALNEGETPKTVKVTATKENGDVVEFDAVVRIDTPGEADYYRHGGILQYVLRQMAASSK

SEQ ID NO: 66832 - DNA, 2823 bp, Methanosarcina acetivorans C2A
  CDS (1)..(2823): transl_table=11
ttgctggaggtaaaaagtacaatgagagaaggtctggacccctttggggtaagagatagcatcgaaacaactgccggaaaagctacgatttacagactgagcaaattggaagaaaagggctttgaagggatttccctgctcccctactctataaggatccttctggaatccctgctccggcatgcagatacggaaaagcacctgatagctgcagaggatgtggaagcccttgcccgctggagccctggaaacagaattgagagggacattccgtttattccttcaagggtaatcatgcaggacttcacaggtgtgcctgcggtagtcgacctcgccgccctccgttcggcaatggagcgccttgaaggggaccccgccaaaatcaaccctgtaatccctgccgacctggtcattgaccactcggttcaggtcgattcctacgggacagcatatgcccttgaggaaaatgagaaaaaggagtttgaacgcaacagggagcgttatattgtccttcgctgggcacagaaagcctttgacaatttcagggtcgtgccccccggaagagggatcattcatcaggtgaaccttgaatacctgaccccactcgtgcacctgaaagagaaggaaggtgagttatttgcatttcctgacacccttgttggaactgactcccataccacaatgatcaacgggataggagtgctcggctggggagtaggcggcatagaagccgaagccgtaatgctcgggcagccttactatatgcccgttcccgaggttgtgggcttcaaactctacgggaaactggaacccggagttactgccacggatcttgtccttacgatcaccaaaatgttaagaaaacaaggggtagtcggcaagtttgtcgagttctacgggcccggcctgaattccttaagccttccggacagggcgacgatttcgaatatggctcccgaatacggggcaacccttgggattttcccgcctgacacggagaccctaaactaccttaagagaacaggcaggagcgacgagcaggttgaccttgttaagaagtacctggaagcccaagacctgctttattcgatccacaaacccgaacctcttttcagcagcaatctcgaacttgatatggaaaccgtaaagccctgtctcgcaggcccgaaacgccctcaagaccagcttttcctgaacgaggtttcggagaacttccgtgaaacaatgaggcagacctttataagaaaaaaggaaggaggcgctgaacttgcaggagatccggcttatcagcgctggctgggggaaggaggagccccggtagaagaaaccggaatagaagaggtaaaaaaagttgaaccccatgagaaaggcttcagggtcacgcatgggtccgtggtaatcgcggccatcacttcctgtaccaatacctccaacccctcggtcctgataggagccgggctgctcgcaaaaaaggcggttgaaaggggcctgagggttaagccttttgtgaagacaagcctttctccgggctcaagagtggctaccgagtaccttggagccgcaggccttctgccctatctggaagcccttggtttccaccaggtagggtacggctgtacgacctgtatagggaacagcggccccctgcccgaacatattgcaaaggaaattgaagaaaaggatcttacggttgcagccgtgctcagcgggaacaggaacttcgagggcaggatcaatccccatgtaaaagcaaactatcttgcctccccgccacttgtcgttgcatatgcgatcgcaggtacggtgaacataaacctcgaaaccgatcctcttgcttatgacccgaacgggctccctgtgtacataagggacatctggcccggaaatgaagagataagggaagctgaaaagaacagcattaagcctgaaatgttcaaaaaagaatactcaggagttctggaaggttcaaaactctggaaagagctggatgtgcctgaaggtaccctctatgcctggagcccgacctccacctacattcaggagccgccttattttgtggatttcccacttactttgcccctgcccggagatatacaaaatgccagagttcttgcccttttcggggacagcatcaccacagaccacatctcccccgccggagatatcccggcagacggtcctgcaggcagatacctgatatcctggggtgtagaccagaaggacttcaattcctacggttcacgccggggcaaccatgaggtaatgatgcgagggacttttgcaaacatccggctcaggaacaggcttgtaagcagggaaggaggctggacggtctcccacctcaaaggagaagacttcccaccggaggcctgtggagaagggattccgatctatgatgcagctctgctctatgcggaaaacgatgttcccctgattgtactcgcaggaaaagagtacgggacaggtagttcccgcgactgggcagcaaaaggcacattcctcctcggagtaaaggcggttattgccgagtcctttgaacgcatccacaggagcaacctcgtgggcatgggagttctgcccctgcagtttaatgtaggagaaaacgcagataccctcgggcttacaggaaaagaaagctacgatatccttggcattgagcagatggaaccccacggagagcttaccgtaagggcaaaggacgataacggaggagaaacagagttcagggtaacattgaggctggactctgccgtggagatagagtactacaggaacggcggaattttgcataagttcctgcgggattcggtgaagaaaaaataa

SEQ ID NO: 66833 - protein, 940 aa, Methanosarcina acetivorans C2A
MLEVKSTMREGLDPFGVRDSIETTAGKATIYRLSKLEEKGFEGISLLPYSIRILLESLLRHADTEKHLIAAEDVEALARWSPGNRIERDIPFIPSRVIMQDFTGVPAVVDLAALRSAMERLEGDPAKINPVIPADLVIDHSVQVDSYGTAYALEENEKKEFERNRERYIVLRWAQKAFDNFRVVPPGRGIIHQVNLEYLTPLVHLKEKEGELFAFPDTLVGTDSHTTMINGIGVLGWGVGGIEAEAVMLGQPYYMPVPEVVGFKLYGKLEPGVTATDLVLTITKMLRKQGVVGKFVEFYGPGLNSLSLPDRATISNMAPEYGATLGIFPPDTETLNYLKRTGRSDEQVDLVKKYLEAQDLLYSIHKPEPLFSSNLELDMETVKPCLAGPKRPQDQLFLNEVSENFRETMRQTFIRKKEGGAELAGDPAYQRWLGEGGAPVEETGIEEVKKVEPHEKGFRVTHGSVVIAAITSCTNTSNPSVLIGAGLLAKKAVERGLRVKPFVKTSLSPGSRVATEYLGAAGLLPYLEALGFHQVGYGCTTCIGNSGPLPEHIAKEIEEKDLTVAAVLSGNRNFEGRINPHVKANYLASPPLVVAYAIAGTVNINLETDPLAYDPNGLPVYIRDIWPGNEEIREAEKNSIKPEMFKKEYSGVLEGSKLWKELDVPEGTLYAWSPTSTYIQEPPYFVDFPLTLPLPGDIQNARVLALFGDSITTDHISPAGDIPADGPAGRYLISWGVDQKDFNSYGSRRGNHEVMMRGTFANIRLRNRLVSREGGWTVSHLKGEDFPPEACGEGIPIYDAALLYAENDVPLIVLAGKEYGTGSSRDWAAKGTFLLGVKAVIAESFERIHRSNLVGMGVLPLQFNVGENADTLGLTGKESYDILGIEQMEPHGELTVRAKDDNGGETEFRVTLRLDSAVEIEYYRNGGILHKFLRDSVKKK

SEQ ID NO: 66834 - DNA, 1926 bp, Thermoanaerobacter tengcongensis MB4
  CDS (1)..(1926): transl_table=11
atgaatttgacgcagaaaatacttctggcgcaccttgtggaagggaaaatggcaaaaggagaagaaatagcgataaaaatagaccagactcttacacaggactctactggaacaatggcttatcttcagctggaggctttgggaatagatagagtaaagacagagctttctgtctcttacgttgaccacaatactttgcagcagggaccggaaaatgctgacgaccacaaatacctacagacagtcgctgcaaggtacggaatatacttttcaaggccgggaaatggaatatgtcaccaggtccaccttgaaagatttggagtgccagggaaaacccttttgggttcagacagccatacgcccactgctggtgggttggggatgttggcgataggagcaggaggactcgatgtggctttggcaatggcaggagagccttatagaattataatgcctgctattgtaaatgtgaggcttaaaggtgaattgaatccatgggtttcggcgaaagatgtgatactagagcttttaagaagacttactgtaaaaggaggcataggtaaaatcttcgaatattcgggggatggagtaaagactctgtcagtgccagaaaggactacaatagcgaatatgggtgcggaattgggggcgactacctccatttttccttctgatgaaaggacttacgaatttttaaaagctcagggtagagaagatgtatttgtgcctttgagtgcggatgaagatgcggaatatgatgaagtcatagagatagacctttctgaattggagcccatggtggcacttcctcacagcccggacaatgtggttaaagtgaaagatgctggaaggcccagggtagatcaggtggcgatagggtcctgcaccaattcttcttatatggatttgatgaaagtcgcttctattttaaaagggaaaactataccggagcatgtgagccttgtaattgcaccaggttctaggcaggttttgactatgcttgcgaaaaacggtgctttagcagaccttatagcggctggagcgagaatacttgaaagtgcttgtgggccctgcataggaatggggcaagctcctgctacaggcgccgtttctgtgagaacttttaatagaaatttctatgggagaagtgggacaaaatctgcatatgtgtatttggtaagtccggaagtagcggcggcagccgcgcttacagggtatcttattgaccctagagaactgggagaaccacctcaagtgccacttgttgagagatttgaagtaaatgacaatatgattgtaaagccgccagaggatgggaaaaacgtagaagtgataaaggggccaaatataaagccatttccattgaatacgcccctttccgatatagaaaagaaggtgttgataaaggtaggagatgacattacaacagaccacataatgccttcaaatgctagacttcttcctttgaggtctaatataccagagctttcgaaacattgctttgaaataatagacgaaaatttctcaaaaagagcggttgaatggggtggagggataattgtaggaggacataactatggtcagggttcaagccgcgaacatgcagctttggtgcctctttacttgggggttaaggcggttatagctaaatcttttgcaagaatacacaaggcaaacctcataaacagcggaattcttcctcttacttttgtaaaagaagaggactatgaagatattgatatgggagatgtgctaaagatagagaatacagtggagcaggtgagaagtggaaaaaacattattgtaaagaatttgactaaaggaaaaagctttgaggtaagactggaagtttctgatagaaatcgggaaatcctcattgcaggtggaatgataaattatgtaaaaagtaaaaataaaacaaattga

SEQ ID NO: 66835 - protein, 641 aa, Thermoanaerobacter tengcongensis MB4
MNLTQKILLAHLVEGKMAKGEEIAIKIDQTLTQDSTGTMAYLQLEALGIDRVKTELSVSYVDHNTLQQGPENADDHKYLQTVAARYGIYFSRPGNGICHQVHLERFGVPGKTLLGSDSHTPTAGGLGMLAIGAGGLDVALAMAGEPYRIIMPAIVNVRLKGELNPWVSAKDVILELLRRLTVKGGIGKIFEYSGDGVKTLSVPERTTIANMGAELGATTSIFPSDERTYEFLKAQGREDVFVPLSADEDAEYDEVIEIDLSELEPMVALPHSPDNVVKVKDAGRPRVDQVAIGSCTNSSYMDLMKVASILKGKTIPEHVSLVIAPGSRQVLTMLAKNGALADLIAAGARILESACGPCIGMGQAPATGAVSVRTFNRNFYGRSGTKSAYVYLVSPEVAAAAALTGYLIDPRELGEPPQVPLVERFEVNDNMIVKPPEDGKNVEVIKGPNIKPFPLNTPLSDIEKKVLIKVGDDITTDHIMPSNARLLPLRSNIPELSKHCFEIIDENFSKRAVEWGGGIIVGGHNYGQGSSREHAALVPLYLGVKAVIAKSFARIHKANLINSGILPLTFVKEEDYEDIDMGDVLKIENTVEQVRSGKNIIVKNLTKGKSFEVRLEVSDRNREILIAGGMINYVKSKNKTN

SEQ ID NO: 66836 - DNA, 2715 bp, Streptomyces coelicolor A3(2)
  CDS (1)..(2715): transl_table=11
gtgtcggcgaacagcttcgacgcccgcagcacactgcaggtgggcgacgagtcgtacgagatcttccggctggacaaggtcgagggctccgcgcgccttccctacagcctgaaggtgctgctggagaacctgctccgcaccgaggacggcgcgaacatcaccgccgaccacatccgcgccctcggcgggtgggactcgcaggcccagccgtcgcaggagatccagttcacgccggcccgcgtgatcatgcaggacttcaccggcgtgccctgtgtcgtcgacctcgccaccatgcgcgaggccgtcaaggagctgggcggcgacccgaacaagatcaacccgctgtccccggccgagatggtcatcgaccactccgtcatcgcggacaagttcggcaccaacgacgccttccagcagaacgtcgacctggagtacggccgcaacaaggagcgctaccagttcctgcgctggggccagaccgccttcgacgacttcaaggtcgtccccccgggcaccggcatcgtccaccaggtgaacatcgagcacctggcccgcgtcgtcatgacccgtgacggcaaggcctaccccgacaccctggtcggcaccgactcgcacaccaccatggtcaacggcctcggcgtcctcggctggggcgtcggcggcatcgaggccgaggccgcgatgctcggccagccggtctccatgctgatcccgcgcgtcgtcggcttcaagctcaccggcgagctgacccccggcaccaccgccaccgacctggtgctcacgatcaccgagatgctgcgcaagcacggcgtcgtcggcaagttcgtcgagttctacggcgagggcgtggccgccacgtcgctggccaaccgcgccaccatcggcaacatgtcgccggagttcggctccaccgccgcgatcttcccggtcgacgacgagacgctgaactacatgcgcctgaccggccgctccgcgcatcaggtcgcgctcgtcgaggcgtacgccaaggagcagggcctctggctggacccgaaggccgagccggacttctccgagaagctggagctggacctctccacggtcgtcccctccatcgccggcccgaagcgcccgcaggaccgcatcgtcctcgccaacgccgccgagcagttcaagcaggacgtgcgcaactacgtcgacagcgtggacgaggcgggccaggagtccttcccggcctccgacgcccccgccgtcaccaacggcgtaccgtccaacccggtcccggtcaccgcccccgacggcaccacctacgagctggaccacggcgcggtgacggtcgcggccatcacctcctgcaccaacacctccaacccgtacgtcatggtcgccgccgccctggtggccaagaaggcggtcgagaagggcctgacccgcaagccgtgggtcaagaccaccctcgccccgggctccaaggtcgtcaccgactacttcgagaaggcgggcctgaccccctacctcgacaaggtcggcttcaacctggtcggctacggctgcaccacctgcatcggcaactccggcccgctgccggacgaggtctccaaggccgtcaacgaccacgacctcgccgtcacctcggtgctctccggcaaccgcaacttcgagggccggatcaaccccgacgtcaagatgaactacctggcgtccccgccgctggtcgtcgcctacgcgctcgcgggctccatgaaggtggacgtcaccaaggacgccctgggcgtcgaccaggacggcaacccggtcttcctcaaggacatctggccctccgaggccgaggtcaacgacgtcgtcgccaacgccatcggcgaggacatgttctccaagtcctacagcgacgtcttcgcgggcgacgcccagtggcaggcgctgtccatcccgaccggcgacaccttcgagtgggacggcgagtccacctacgtgcgcaagcccccgtacttcgagggcatgggcatggagccggccccggtcgaggacatctccggcgcccgggtgctcgccaagctcggcgactcggtgaccacggaccacatctcgcccgccggcgccatcaaggccgacaccccggccggcaagtacctgacggagcacggcgtcgagcgccgcgacttcaacagctacggctcgcgccgcggcaaccacgagatcatgatccgcggcaccttcgccaacatccgcctgcgcaaccagatcgcgccgggcaccgagggcggctacacccgcgacttcacccaggacggcggtccggtgtcgttcatctacgacgcctcccgcaactacatcgagcagggcaccccgctcgtcgtcctggccggcaaggagtacggctccggctcgtcccgcgactgggccgccaagggcaccgcgctcctcggcgtcaaggcggtcgtcgccgagtcctacgagcgcatccaccgctcgaacctcatcggcatgggcgtcctgccgctccagttcccggagggccacaccgccgagtccctcggcctgaccggtgaggagaccttctccgtctccggcgtgaccgagctgaacgagggcaccaccccgcgcacggtgaaggtcaccaccgacaccggcgtcgagttcgacgcggtcgtgcgcatcgacacccccggcgaggcggactactaccgcaacggcggcatcctgcagtacgtgctgcgcagcctgatccgcaagtag

SEQ ID NO: 66837 - protein, 904 aa, Streptomyces coelicolor A3(2)
MSANSFDARSTLQVGDESYEIFRLDKVEGSARLPYSLKVLLENLLRTEDGANITADHIRALGGWDSQAQPSQEIQFTPARVIMQDFTGVPCVVDLATMREAVKELGGDPNKINPLSPAEMVIDHSVIADKFGTNDAFQQNVDLEYGRNKERYQFLRWGQTAFDDFKVVPPGTGIVHQVNIEHLARVVMTRDGKAYPDTLVGTDSHTTMVNGLGVLGWGVGGIEAEAAMLGQPVSMLIPRVVGFKLTGELTPGTTATDLVLTITEMLRKHGVVGKFVEFYGEGVAATSLANRATIGNMSPEFGSTAAIFPVDDETLNYMRLTGRSAHQVALVEAYAKEQGLWLDPKAEPDFSEKLELDLSTVVPSIAGPKRPQDRIVLANAAEQFKQDVRNYVDSVDEAGQESFPASDAPAVTNGVPSNPVPVTAPDGTTYELDHGAVTVAAITSCTNTSNPYVMVAAALVAKKAVEKGLTRKPWVKTTLAPGSKVVTDYFEKAGLTPYLDKVGFNLVGYGCTTCIGNSGPLPDEVSKAVNDHDLAVTSVLSGNRNFEGRINPDVKMNYLASPPLVVAYALAGSMKVDVTKDALGVDQDGNPVFLKDIWPSEAEVNDVVANAIGEDMFSKSYSDVFAGDAQWQALSIPTGDTFEWDGESTYVRKPPYFEGMGMEPAPVEDISGARVLAKLGDSVTTDHISPAGAIKADTPAGKYLTEHGVERRDFNSYGSRRGNHEIMIRGTFANIRLRNQIAPGTEGGYTRDFTQDGGPVSFIYDASRNYIEQGTPLVVLAGKEYGSGSSRDWAAKGTALLGVKAVVAESYERIHRSNLIGMGVLPLQFPEGHTAESLGLTGEETFSVSGVTELNEGTTPRTVKVTTDTGVEFDAVVRIDTPGEADYYRNGGILQYVLRSLIRK

SEQ ID NO: 66838 - DNA, 2829 bp, Methanosarcina mazei Go1
  CDS (1)..(2829): transl_table=11
ttgctggaggtaaaaagtaaaatgagagaaggtccggacccctttggggtaagagacagcatcgaaacaactgccggaaaagctacgatttacagactgggtaaactggaagaaaagggctttgaagggatttccctgctcccctactctataaggatcctgcttgaatccctgctccggcatgcggatactcaaaagaagacaataactgtagaagacgttgaagcccttgcccgctggagtcccgaaaatataagtgaaaaggacatcccgtttattccttcaagggtaatcatgcaggactttacgggcgttccagcagtagttgaccttgcagccctccgctcggcaatggagcgccttggaggggaccctgctaaaatcaaccctgtaatccctgctgacctggtcattgaccactcggttcaggttgactcttacggcacggcatattcccttggggaaaacgagaaaaaggagtttgaacgcaacagagagcgttatacagtcctccgctgggcacagaaagcctttgacaacttcagggtcgtgcctccgggaagagggattatccatcaggtaaaccttgaatacctgactcccctcgtccacctgagtgaaaaggaaggagaactatttgcttttcctgatacccttgtcggaaccgattcccataccacgatgatcaacgggataggagtcctcggctggggagtaggcggaatagaagccgaagccgttatgctcgggcagccttactatatgcctgttcctgaggttgtcggtttcaagctttacggaaagctggaacccggagttaccgccacagaccttgttctcacgatcacaaagatgttaaggaagcacggggttgtcggcaaatttgtcgaattctacgggcccggtttaaactctctcagccttccggacagagcaacaatatcaaacatggctccggaatacggggcaactctcgggattttcccgcctgaccaggaaactctggactacatgaagaggacaggcaggagcgatgaacaggttgaccttgtgaaaaagtacctggaagcacaggaccttctttattcggcaaacaaacccgaacctgtcttcagcagcaacctcgaacttgatatgggcacggtaaagccatgccttgcaggtcccagacgcccgcaggaccagctcttcctgaatgaggtctctgagaatttctgtgaaacaatgaggcagacctttataagaaagaaagaagggggcacggatcttgcaagagaccctgcttatcttcgctggattggggaaggaggagctcctgtagaagaaaccgaagcacaggtagcgagagagacggaaaaggtcggtcctgttgagaaagacttcagggtcacacacggttccgttgtgatagcatccattacttcctgtacaaatacctccaacccttcagtccttataggagccgggctgcttgcaaaaaaagctattgaaagaggtcttaaggtaaagccttttgtaaaaacaagcctgtctccaggttcaagagtggctaccgaataccttggagccgcaggactcctgccctatcttgaagctctgggcttccaccaggtgggatacggttgtacgacctgtataggcaacagcgggcctctgccagaacacgtttcaaaggaaattgaagaaaaagaccttacagttgcagccgtactcagcgggaacaggaactttgaaggcaggattaatcccctcgtaaaagcaaactacctcgcctccccgccacttgttgtcgcatacgcaattgcaggcactgtgaacataaacttcgaaaccgatccccttgcatatgaccctaacgggattcccgtgtacctgagagatatctggcccatgcaggatgagataaaacaggtcgaaaaggaaagtgtcaggcctgagatgttcaaaaaagaatactcaggcgttcttgaaggagcaaaactctggaaagagctggaagtccccgagggcactctttatgagtggatcccgacctccacctatattcaggagcccccttattttgtggattttccgcttacttcgcctcttctcggggatatacggaatgccagagtccttgccctcttcggagacagcattactactgaccacatctccccggcaggcgatattccggcagagagtccggcaggcaggtacctgatgtcctggggtgtggaccagaaagatttcaattcttacggctcccgcaggggcaaccatgaagtaatgatgcgcggaacctttgcaaatatccggctcagaaacaggcttgtaagtaaggaaggaggctggactgtttaccaccttaaaggagaagacttcccgccggaagcctgtggagaaggaatgcctatttatgatgcatctttactttatgcggaaaacaatgtccccctgattgttatcgcaggaaaagagtacgggacaggcagttcccgcgactgggcagcaaaagggacattcctgcttggagtaaaagcagttattgccgaatcctttgagcgcattcacagaagcaaccttgtgggcatgggagttcttcccctgcagtttaaagcaggagaaaatgcagattctctagggcttacagggaaggagagctatgacatccttgggattgaaaaaatggagcctcatggagagcttaccgtactggcaagagatgacagcggaaaagagacggagtttaaagcaacactgaggcttgattctgctgtagaaatagagtactacaggaatggcgggattttgcataagttcctgcgggattctgtgaagaaataa

SEQ ID NO: 66839 - protein, 942 aa, Methanosarcina mazei Go1
MLEVKSKMREGPDPFGVRDSIETTAGKATIYRLGKLEEKGFEGISLLPYSIRILLESLLRHADTQKKTITVEDVEALARWSPENISEKDIPFIPSRVIMQDFTGVPAVVDLAALRSAMERLGGDPAKINPVIPADLVIDHSVQVDSYGTAYSLGENEKKEFERNRERYTVLRWAQKAFDNFRVVPPGRGIIHQVNLEYLTPLVHLSEKEGELFAFPDTLVGTDSHTTMINGIGVLGWGVGGIEAEAVMLGQPYYMPVPEVVGFKLYGKLEPGVTATDLVLTITKMLRKHGVVGKFVEFYGPGLNSLSLPDRATISNMAPEYGATLGIFPPDQETLDYMKRTGRSDEQVDLVKKYLEAQDLLYSANKPEPVFSSNLELDMGTVKPCLAGPRRPQDQLFLNEVSENFCETMRQTFIRKKEGGTDLARDPAYLRWIGEGGAPVEETEAQVARETEKVGPVEKDFRVTHGSVVIASITSCTNTSNPSVLIGAGLLAKKAIERGLKVKPFVKTSLSPGSRVATEYLGAAGLLPYLEALGFHQVGYGCTTCIGNSGPLPEHVSKEIEEKDLTVAAVLSGNRNFEGRINPLVKANYLASPPLVVAYAIAGTVNINFETDPLAYDPNGIPVYLRDIWPMQDEIKQVEKESVRPEMFKKEYSGVLEGAKLWKELEVPEGTLYEWIPTSTYIQEPPYFVDFPLTSPLLGDIRNARVLALFGDSITTDHISPAGDIPAESPAGRYLMSWGVDQKDFNSYGSRRGNHEVMMRGTFANIRLRNRLVSKEGGWTVYHLKGEDFPPEACGEGMPIYDASLLYAENNVPLIVIAGKEYGTGSSRDWAAKGTFLLGVKAVIAESFERIHRSNLVGMGVLPLQFKAGENADSLGLTGKESYDILGIEKMEPHGELTVLARDDSGKETEFKATLRLDSAVEIEYYRNGGILHKFLRDSVKK

SEQ ID NO: 66840 - DNA, 2352 bp, Drosophila melanogaster
  CDS (1)..(2352)
atggctcaacgaacacatagatatatatgtttggcgggttccatggtgcgaaactttcacacggcgcgttttccacgatgtgataaagtggcaatgtcaaattttgataccggaattcccttgccctataagaagttgagggaaaacctggattgcatcaagggtcgactgggtggaccgctaaccttgtcggagaaggtgttatattcccatttggatcaaccggattcacaggaaatcgaacgaggcaagtcctatttgcgattgcgaccagatcgcgttgccctgcaggatgcgactgcccagatgacgctactgcagttcatttcgtcgggcctgaagaaggtagcagttccatccaccgtccactgtgatcacttaattgaggcccagatcagtggcgataaggacttggccagggctaaggatctgaacaaggaggtgtacgattttctgtcctcggcgtgtgccaagtataacttgggtttctggaagcctggcagcggcataattcatcagatcattttagagaactatgcatttcccggactactgatgatcggaactgattcccatactccgaatggcggcggattgggttgcctatgcgttggagttggtggtgctgatgccgtcgatgtgatggcgaatataccgtgggaactcaagtgcccgaccgtgattggatgccatctcacgggtaagatcagtgggtggacttcgcccaaggatgtcatccttaaagtggccgagattctgaccgttaaaggaggtacgggtgccattgtggagtaccatggtcctggcgtcgaatctatttcctgcacaggcatggctactattaccaacatgggtgctgaaatcggtgccacaacttcaatatttccattcaacgaacgcatggtcacatatttgcgtgcaaccggtagaggtgccatcgctgatgaggccacaaagaataaagatcttttggttccggatgagggttgcaaatacgataaggtgatcgagatcaatttggacaccttggaaccgctggtgaatggccccttcactcccgatttggcccatcccattagtaaactgggtcagaactccgagaagaatggctatccgatggaaatcaaagtgagtctaattggttcctgcacgaactcctcctacgaggacatgggacgatgtgccagcatagccaatgacgcactgggtcatggcctaaaatcgtgcgttccatttaatgttaccccgggatcggagcaagttcgagctacaatcgcacgggacggcattatagatgtgcttgagaagtttggaggcaccgtgctggcgaatgcctgtggtccctgcattggacagtgggatcgcaaggatgtaaagatgggagagaagaacaccattgtcacgtcgtataatcgcaacttcaccggtcgaaatgatgccaatccagcaacacattgttttgttacgagtccagaaatggcaactgcattggctatcgccggacgtttggatttcaatccgatgacggatgagcttacgggtaccgatggcaaaacgttcaagctcaaggaaccgcacggcgaagagctgccatccaagggttttgatcccggagaggatacctatcaggctcccccagcgaaagcagatgatatcaaggtcaatgtcgatcccaagtcggatcgcctgcaactgctcgaaccttttgagaaatgggacggcaaggactacattgatttgatggtgcttatcaaaatcaaaggcaaatgcaccaccgatcacatcagtgccgctggaccctggcttaagtatcgcggtcatttggataatatatcaaataacatgttcattggggcaacaaatgccgaaaacaatgaaatgaacaaggtcaaaaaccagaagacaggcagttttgacgccgtaccagcggtggcacgcgattacaaggccaacaagatcaagtggtgtgctgtgggtgaggagaactacggcgagggatcatccagggagcacgctgccctggaacctcgacacttgggcggagtggccattatcgtcaagtcgttcgcccgcatccacgagacgaacctaaagaaacagggtatgctcgccctgacattcgccaatcccggtgactacgacaaagttcagccgtcgagcaagatttcgatactgaacctcaaggacttggcacctggcaagcctgtggatgctgagatcaagaataatggtagctccgacaaaatccagttgaaccacacccttaatgagctgcagatccagtggttccaggctggaagtgccttgaatctaatgaaggagcttgccgccaagggtggcgataagaaatag

SEQ ID NO: 66841 - protein, 783 aa, Drosophila melanogaster
MAQRTHRYICLAGSMVRNFHTARFPRCDKVAMSNFDTGIPLPYKKLRENLDCIKGRLGGPLTLSEKVLYSHLDQPDSQEIERGKSYLRLRPDRVALQDATAQMTLLQFISSGLKKVAVPSTVHCDHLIEAQISGDKDLARAKDLNKEVYDFLSSACAKYNLGFWKPGSGIIHQIILENYAFPGLLMIGTDSHTPNGGGLGCLCVGVGGADAVDVMANIPWELKCPTVIGCHLTGKISGWTSPKDVILKVAEILTVKGGTGAIVEYHGPGVESISCTGMATITNMGAEIGATTSIFPFNERMVTYLRATGRGAIADEATKNKDLLVPDEGCKYDKVIEINLDTLEPLVNGPFTPDLAHPISKLGQNSEKNGYPMEIKVSLIGSCTNSSYEDMGRCASIANDALGHGLKSCVPFNVTPGSEQVRATIARDGIIDVLEKFGGTVLANACGPCIGQWDRKDVKMGEKNTIVTSYNRNFTGRNDANPATHCFVTSPEMATALAIAGRLDFNPMTDELTGTDGKTFKLKEPHGEELPSKGFDPGEDTYQAPPAKADDIKVNVDPKSDRLQLLEPFEKWDGKDYIDLMVLIKIKGKCTTDHISAAGPWLKYRGHLDNISNNMFIGATNAENNEMNKVKNQKTGSFDAVPAVARDYKANKIKWCAVGEENYGEGSSREHAALEPRHLGGVAIIVKSFARIHETNLKKQGMLALTFANPGDYDKVQPSSKISILNLKDLAPGKPVDAEIKNNGSSDKIQLNHTLNELQIQWFQAGSALNLMKELAAKGGDKK

SEQ ID NO: 66842 - DNA, 2712 bp, Oceanobacillus iheyensis HTE831
  CDS (1)..(2712): transl_table=11
atgactgacaacaatgcgtttaacgcaaagaagcagttcgaattaaacggtaaaaagtataactattatcgtttaagaaacttagaagaggctggtaagggcaagttagatcgtttaccattttctgttcgtgttcttttagaatcattgcttcgtcaacatgatgggcatcaaattaaggacgaacacgtagagtctttagcgaactggggaacaaaaaaggcaaacggggcagatgttccttttaaaccctcacgtgtaatattgcaagatttcacaggtgttccagcagtggtagaccttgcttctttacgtaaagcaatggtagatcttggtggtgagccaaacaaaatcaatccggaagttccagtagatctagttattgaccactcggtgcaagtagaccaatacggaactcaaaatgcattaaaagcaaatatggatcttgagtttgagcgtaatgcagagcgttatgaatttcttaactgggcacaaaaagcatttaataactaccgtgcagttccacctgcaacaggtattgtccaccaggttaacttagagtatatcgctaacgttgtgcatgctttagaaacggaagatggtacgtatgatgcatttccagatactttagttggtaccgattcgcacacaacaatgatcaatggtcttggtattcttggttggggtgtaggtggtatcgaagcggaagctggcatgctagggcaaccttcttacttcccagcaccagaggttattggtgttaaatttacagggacattccctaacggtacaactgctacagaccttgctttaaaagtaactcaagtattacgtgagcaaaatgtagttggtaaatttgtggaatacttcggacctgggttaaaggatatgccacttgcagatcgtgcgactatttctaacatggctccagaatatggtgcaacttgtggtttcttcccaatcgaccaagaatcattagattatttgaagcttactggccgtgacgatgagctaatcgcacttgtcgaaaagtattgtaaagaaaatgatttatggtatgatgcagatcaaaaagaccctgagtatacaaaagtcattgaaattgacctttctgatcttgaaccaaatctttctggaccaaaacgtccacaagatttgattgcattatctgatatgaaaaaagaatttaataaagcgattactgctccagaaggtaatcaaggcttcggcatggaaaaatctgagttcgacaaagaagttactgtaaatcatccaaatggtaaagaatctgtaatgaaaacaggagcacttgctattgctgcgattacttcttgtacaaatacttctaatccttatgtaatgttaggtgcgggattagttgcgaaaaaagccgtagaaaaaggtctagaagtgccggaatatgtaaaaacttcgttggcgcctggttcgaaagtcgttacgcgctatcttgaagatgctggattacaaaactacctagaccaactaggatttaacttagtaggttacggttgtacaacttgtatcggtaattctggtccattacgagaagaaattgagcaagctattatggatagtgatttaattgcttcttctgtactatctggtaaccgtaactttgaggggcgtattcacccacttgtaaaagcaaactatttagcatcaccaccattagtggttgcatatgctcttgctggaacagtggatatcgatttatcgaaagaacctcttgcaaaagacaaagatggtaatgatgtctacatgaatgatatctggccaacgttaactgaaattaaagaagaggtccaaaaagtagttacgccagaaattttccgtaaagaatatgaagatgtattcacttctaacgataagtggaatgagattgatacaacggatgaaccattattcgaatgggatgatgattctacgtatattcaaaatcctccattctttgaaggattatctgcggaagctggtaaagtggaggctttaaataatttacgtgctgttggattatttggagattctgtaacaactgaccatatttctcctgctggtgcaattgcaaaagatatgcctgcaggtaagttcttgcaagataaaggtgtatctccaagaaactttaactcctatggttctcgtcgtggtaaccatgagattatgatgagaggtacatttgcaaatatccgtattcgtaaccttttagctcctggtacagaaggtggttatactacttactggccaactggagagattatgccaatttatgatgctgcgatgaagtatcaagaagatggtacaggacttgtagtaattggtggaaaagactacggtatgggatcatctcgtgactgggcagcaaaaggtacaaatctattaggtattaaaacggttatagcggaaagtttcgaacgtattcaccgttcaaatctagtaatgatgggcgtactaccattacaatttgataaaggtgatagtgcgaagaaattaggtctaactggtaaagaatcatttgatgtacaaatcgatgagtccgtaaaaccaggtgatcttgtggaagtaactgcgacagatgaagatggaaaagtaacgaaatttaacgcagttgctcgtttcgatagtgacgtagaaattgattactaccgtcacggtggtatcttaagaatggtacttcgtgataaagttcaagtataa

SEQ ID NO: 66843 - protein, 903 aa, Oceanobacillus iheyensis HTE831
MTDNNAFNAKKQFELNGKKYNYYRLRNLEEAGKGKLDRLPFSVRVLLESLLRQHDGHQIKDEHVESLANWGTKKANGADVPFKPSRVILQDFTGVPAVVDLASLRKAMVDLGGEPNKINPEVPVDLVIDHSVQVDQYGTQNALKANMDLEFERNAERYEFLNWAQKAFNNYRAVPPATGIVHQVNLEYIANVVHALETEDGTYDAFPDTLVGTDSHTTMINGLGILGWGVGGIEAEAGMLGQPSYFPAPEVIGVKFTGTFPNGTTATDLALKVTQVLREQNVVGKFVEYFGPGLKDMPLADRATISNMAPEYGATCGFFPIDQESLDYLKLTGRDDELIALVEKYCKENDLWYDADQKDPEYTKVIEIDLSDLEPNLSGPKRPQDLIALSDMKKEFNKAITAPEGNQGFGMEKSEFDKEVTVNHPNGKESVMKTGALAIAAITSCTNTSNPYVMLGAGLVAKKAVEKGLEVPEYVKTSLAPGSKVVTRYLEDAGLQNYLDQLGFNLVGYGCTTCIGNSGPLREEIEQAIMDSDLIASSVLSGNRNFEGRIHPLVKANYLASPPLVVAYALAGTVDIDLSKEPLAKDKDGNDVYMNDIWPTLTEIKEEVQKVVTPEIFRKEYEDVFTSNDKWNEIDTTDEPLFEWDDDSTYIQNPPFFEGLSAEAGKVEALNNLRAVGLFGDSVTTDHISPAGAIAKDMPAGKFLQDKGVSPRNFNSYGSRRGNHEIMMRGTFANIRIRNLLAPGTEGGYTTYWPTGEIMPIYDAAMKYQEDGTGLVVIGGKDYGMGSSRDWAAKGTNLLGIKTVIAESFERIHRSNLVMMGVLPLQFDKGDSAKKLGLTGKESFDVQIDESVKPGDLVEVTATDEDGKVTKFNAVARFDSDVEIDYYRHGGILRMVLRDKVQV

SEQ ID NO: 66844 - DNA, 2700 bp, Bifidobacterium longum NCC2705
  CDS (1)..(2700): transl_table=11
atgtccttacgcgacgaccagctggctaccctcaaggcagccggcaaggacttcgattactacaacatcgccaatctcgacggcatcgatcatctgccgtactcgctgaaggtactggtcgagaatctggtgcgcaacatcgacggtgccaacatcaccgacgagcacgtcaagaccctgctcgactgggatccgaacgccgaacccagccacgaaatccagttcacgccgtcccgcgtgatcatgcaggacttcaccggcgtgccctgcatcgtggacctcgccaccatgcgtgacgcggtcaaggacctcggcggcgacccggaggtcatcaacccgcaggtccagtccgatatggtcatcgaccattccgtgcagatcgacaagtacggcatcgccgacgcggtccagcaaaacatggacatcgaataccagcgcaacggtgaacgctaccagttcctgcgctggggtcagcaggcattcaagaacttccgcgtggtgccgccgggaaccggcattatccaccaggtcaacatcgaatacttggccaaggtggtcatgagcaaggccgaggccaacggcaacgcgctcgcctacctcgactcctgcgtgggcaccgactcgcacaccaccaccgaaaacggtctgggcgtgctcggctggggcgtcggcggcattgaagccgaggccgccatgctcggccagccgatctccatgctcgtgccgcgcgtggtcggcttcaagctcaccggctccatcccggagggcgttaccgccaccgatgtggtcctgaccatcaccgacatgctccgcaagcacggcgtggtcggtaagttcgtggaattctacggcgaaggcatcgcctccgtgccgctggccaaccgcgccaccatcggcaacatgggccccgagttcggctccacctgcggcatcttcccgattgacaatgtcacgctcgactacctgcgcctgaccggccgctccgaagagcaggtcgcgttggtcgaagcctacgccaaggccaacaagctgtggggcgacgcttccgacccggattacgtggaaccgcagtactccgaatacgaggaactcgacctcggtaccgtggtgccgtccatcgctggcccgaagcgcccgcaggaccgcattctgctgtccgaagccaagagcatgttcgagaagaccgcccccgcctacgagaccgagaagaccgtcaaggatccggtggccgtgtccaccgacttccgtggcgatttcgacatcgaaaacggcgacgtggccatcgcctcgatcacctcatgcaccaacacctccaacccgtccgtgatgatcgccgccggcctgatcgcccgcaacgcacatgccaggggccttaagcccaagccctgggtcaagacctcgctggctcccggctcgcaggtcgtggccgactacctcaaggccgcggggctgcaggacgacctcgatgcactcggctaccagctcgtcggcttcggctgcgccacctgcatcggcaactccggcccgctgctgcccgagatttccgaggcgatcaacgccaacgacctgaccgtcaccgccgtgctttccggcaaccgcaacttcgaaggccgcatcagcccggacgtcaagatgaactacctggcctccccgccgctggtcatcgcctacgcgctcgccggcacgatggacttcgacttcgagacccagccgctcggcaccgacgcggacggcaacgacgtgtacttgaaggacatctggcccaccaatgccgaggtcgccgccgtggtcgacggcagcgtgagccgcgagatgttcctcaaggactacgcctccgtgtttgacggcgaccaccgctggaagggcctcgacgtgccggaaggcgagctgttcgcgtggaacgacaagtccacctatgtgcgcaagcaaaccttcttcgacggcatgaaggccacgccggacccggtcgccgatatccacggcgcccgtgtgctggccctcctgggcgactcggtcaccaccgaccacatctccccggcaggcgcgttcaaggcctccagcccggccggcaagtacctgaccgagcgcggcgtggagccgaagaacttcaactcttacggttctcgccgaggcaaccacgagatcatggtgcgcggcacgttcggcaacatccgtctgcgcaaccagctgctcgcctccgtgggcgaggaggtgacgcctggcggcttcacctacgacttcctcgccaagaagccgaccacgatcttcgaagcctcccgcgactacatcgacaacaaggtgccgctcgtggtgctcgccggcaaggaatacggcaccggctcctcgcgcgactgggccgccaagggcacggtgatgctcggcgtcaaggccgtgatcaccgaaagcttcgagcgcatccaccgctccaacctgatcggcatgggcgtgctgccgctgcagttcccggcaggcgaatcctatgagtccctgggcctcaacggcaccgagacctacgatatcgccggcgtcgagaagctcaacgagggcgtgacccccaagacggtccacgtcaccgccacccacgaggacggctccaagaccgagttcgacgcggtggtccgcatcgacacgcccggtgaggccgactactaccgtaatggcggcatcctccagtacgtgctgcgcaacctcatgaagtaa

SEQ ID NO: 66845 - protein, 899 aa, Bifidobacterium longum NCC2705
MSLRDDQLATLKAAGKDFDYYNIANLDGIDHLPYSLKVLVENLVRNIDGANITDEHVKTLLDWDPNAEPSHEIQFTPSRVIMQDFTGVPCIVDLATMRDAVKDLGGDPEVINPQVQSDMVIDHSVQIDKYGIADAVQQNMDIEYQRNGERYQFLRWGQQAFKNFRVVPPGTGIIHQVNIEYLAKVVMSKAEANGNALAYLDSCVGTDSHTTTENGLGVLGWGVGGIEAEAAMLGQPISMLVPRVVGFKLTGSIPEGVTATDVVLTITDMLRKHGVVGKFVEFYGEGIASVPLANRATIGNMGPEFGSTCGIFPIDNVTLDYLRLTGRSEEQVALVEAYAKANKLWGDASDPDYVEPQYSEYEELDLGTVVPSIAGPKRPQDRILLSEAKSMFEKTAPAYETEKTVKDPVAVSTDFRGDFDIENGDVAIASITSCTNTSNPSVMIAAGLIARNAHARGLKPKPWVKTSLAPGSQVVADYLKAAGLQDDLDALGYQLVGFGCATCIGNSGPLLPEISEAINANDLTVTAVLSGNRNFEGRISPDVKMNYLASPPLVIAYALAGTMDFDFETQPLGTDADGNDVYLKDIWPTNAEVAAVVDGSVSREMFLKDYASVFDGDHRWKGLDVPEGELFAWNDKSTYVRKQTFFDGMKATPDPVADIHGARVLALLGDSVTTDHISPAGAFKASSPAGKYLTERGVEPKNFNSYGSRRGNHEIMVRGTFGNIRLRNQLLASVGEEVTPGGFTYDFLAKKPTTIFEASRDYIDNKVPLVVLAGKEYGTGSSRDWAAKGTVMLGVKAVITESFERIHRSNLIGMGVLPLQFPAGESYESLGLNGTETYDIAGVEKLNEGVTPKTVHVTATHEDGSKTEFDAVVRIDTPGEADYYRNGGILQYVLRNLMK

SEQ ID NO: 66846 - DNA, 2688 bp, Brucella suis 1330
  CDS (1)..(2688): transl_table=11
gtgtcgcaaatcgacagctttaaatgccgcaaaaccctttccgtggggggcaaggaatatgtctattacagcctgacggaagccgaaaagaacggcctggcaggcatttccagtcttcctttctccatgaaggttctgcttgagaacctgctccgcttcgaggacgaccgctccgtcaagaagtcggacatcgaaaatgtcgccaagtggcttgccgaccgcggcaaggctggcgctgaaatcgcctatcgcccgacgcgcgtgctgatgcaggacttcaccggcgttcccgccgtggtggatctggctgcgatgcgcgacggcatcaaggcgctcggcggcgacccggaaaagatcaatccgctcgttcccgttgatctcgtcatcgaccattcggtcatcgtggacgatttcggcaacccgctggctttccagcacaatgtcgatctggaatatcagcgcaatggcgaacgctaccgcttcctcaagtggggccagcaggcattcaagaatttccgcgtcgttccgcccggcaccggcatctgccatcaggtgaatctggaatatctggcccaggccgtctggaccaaggaagaagacggcgtcaccctcgcctatcccgacacctgcgtgggcaccgattcccacaccaccatggtcaatggccttggcgttctgggctggggcgtcggcggtatcgaagctgaagcggccatgcttggccagccggtttccatgcttctgccggaagtcatcggtttccgccttaccggcaagctcaaggaaggcgtcaccgcgaccgacctcgtgctcactgtcacgcagatgctgcgcaagaagggcgtcgtcggcaagttcgtcgaattcttcggcgcgggcctcgacaacatgtcgctcgcagaccgtgcgaccatcggcaatatggggccggaatatggtgcaacctgcggcttcttcccggttgaccaggaaacgctgaaatatatgaacatgaccggccgcgacgaacatcgtctcgaactggtcgaagcctattgccgcgcacagggcatgtggcgcgattccagctccgcagatccggtcttcaccgacgttctcgagctcgacatgggcgatgtcgtgccgtcgatggccggcccgaagcgcccggaaggccgcatcccactggaaaacatcggctccggcttcgcgacctcgcttgaaaccgaatacaagaagaccacgggccagagcacccgctatcccgtcgagggtgaaaacttcgatcttggccatggcgatgtggttattgccgccatcacgtcgtgcaccaacacctcgaacccgagcgtgctgatcgccgctggccttcttgcccgcaacgctgtcgccaagggcctcaagacgaagccatgggtcaagacctcgcttgctcccggctcgcaggtcgtcgtcgcctatctcgaagacgccggcctccagaaggatctcgacgcgctcggcttcaacctcgtcggcttcggctgcacgacctgcatcggcaattccggtccgttgccggccccgatctccaagacgatcaatgaaaagggcctcatcgcggctgcagtgctttcgggcaatcgtaactttgaaggccgcgtttcgccggatgtgcaggccaattaccttgcctcgccgccgctcgtcgtcgcccatgccctggcaggcacggtgacgaaggacctgaccaaggaaccgcttggcgaagacaaggacggcaatccggtctatctgcgcgatatctggccttccacgcaggaaatccaggacttcatcgccaagaacgtcacccgcaagcttttctcggaaaaatatgcggatgtgttcaagggcgacgccaactggcagaccgttcaggttcccgccggtcagacctatgcatgggacgacaattcgacctatgtgcagaacccgccttatttcgtcggcatgggcaagactgccggcatgatcggcgacgtcaagggcgcccgcattctgggtctgttcggtgacaagatcacgaccgaccatatctcgcctgccggttccatcaaggcgcagtcgcctgcgggcaaatatctgctcgaccatggcgtggccgtcgccgacttcaaccagtacggcacacgtcgcggcaaccatgaagtgatgatgcgcggcactttcgcaaatatccgtatccgcaaccacatgctgggcgaaaacggacgtgaaggcggctacaccatccactatccgtcgaagaaagagatgtcgatctatgacgcggccatggaatacaaggccgagggtgtgccgctcgtcgtcttcgcaggcgtcgaatatggcaacggttcgtcgcgcgactgggctgccaagggcaccaacctgctcggcgtgaaggccgtgatcgcgcagtcctttgagcgtatccaccgctccaacctcgtcggcatgggtatcgtgcccttcgtcttcgaggaaggcacaagctggcagtcgctgggcctcaagggcgacgagatcgtcaccatcgaaggcctggctgatgtgcgcccgcgccagcgggtcgaagcttccatcacctatgccgatggcaccgtgaagaaagttccactcatctgccgcatcgatacgctggacgagcttgattacatgaagaacggcggcatcctgcagaccgttctgcgtgacctcgtcgcttaa

SEQ ID NO: 66847 - protein, 895 aa, Brucella suis 1330
MSQIDSFKCRKTLSVGGKEYVYYSLTEAEKNGLAGISSLPFSMKVLLENLLRFEDDRSVKKSDIENVAKWLADRGKAGAEIAYRPTRVLMQDFTGVPAVVDLAAMRDGIKALGGDPEKINPLVPVDLVIDHSVIVDDFGNPLAFQHNVDLEYQRNGERYRFLKWGQQAFKNFRVVPPGTGICHQVNLEYLAQAVWTKEEDGVTLAYPDTCVGTDSHTTMVNGLGVLGWGVGGIEAEAAMLGQPVSMLLPEVIGFRLTGKLKEGVTATDLVLTVTQMLRKKGVVGKFVEFFGAGLDNMSLADRATIGNMGPEYGATCGFFPVDQETLKYMNMTGRDEHRLELVEAYCRAQGMWRDSSSADPVFTDVLELDMGDVVPSMAGPKRPEGRIPLENIGSGFATSLETEYKKTTGQSTRYPVEGENFDLGHGDVVIAAITSCTNTSNPSVLIAAGLLARNAVAKGLKTKPWVKTSLAPGSQVVVAYLEDAGLQKDLDALGFNLVGFGCTTCIGNSGPLPAPISKTINEKGLIAAAVLSGNRNFEGRVSPDVQANYLASPPLVVAHALAGTVTKDLTKEPLGEDKDGNPVYLRDIWPSTQEIQDFIAKNVTRKLFSEKYADVFKGDANWQTVQVPAGQTYAWDDNSTYVQNPPYFVGMGKTAGMIGDVKGARILGLFGDKITTDHISPAGSIKAQSPAGKYLLDHGVAVADFNQYGTRRGNHEVMMRGTFANIRIRNHMLGENGREGGYTIHYPSKKEMSIYDAAMEYKAEGVPLVVFAGVEYGNGSSRDWAAKGTNLLGVKAVIAQSFERIHRSNLVGMGIVPFVFEEGTSWQSLGLKGDEIVTIEGLADVRPRQRVEASITYADGTVKKVPLICRIDTLDELDYMKNGGILQTVLRDLVA

SEQ ID NO: 66848 - DNA, 2274 bp, Leptospira interrogans serovar Lai str. 56601
  CDS (1)..(2274): transl_table=11
atggcattcgatatagaaatgattcgcgcccgatacgataagatcggggttcttgttacaaaagcaagaaacgtcgttggaagacctcttactcttaccgaaaaaattctttattcccatctctgggaaggcgaaccgaagacggcttacgaaaaaggaaagtcttatgtggattttgcgccggacagagttgcgatgcaggacgctacggctcagatggctcttttgcagtttatgtctgcgggtagaagtaaggtagcagttccgtccaccgttcactgtgatcacctaatccaagcgaaagacggtgcggcagaagacttaaaaacggcaaacacagtaaacaaggaagtttatgattttctttcctccgtttctaataaatacggaatcggcttttggaagccgggtgctggaattattcatcaagtagttttagaaaattacgccttccctggtggaatgatgatcggaaccgattctcacactgtaaacgcgggtggtttaggtatgatcgcaatcggagtcggtggggccgatgctgtagacgttatggctggcatggcttgggaattaaaatttccaaaactcatcggcgtaaaactcacaggtaagctttccggttgggcttctgcaaaagatattattttaaaagttgctgggattcttaccgtaaaaggtgggaccggtgcgatcgtggaatattttggagaaggagcagatagtctttcttgtactggcaaaggaacgatctgtaatatgggcgcggaaataggagccactacttctgtgttcggttatgatcggaacatgagagaataccttttaaaaacaaatcgtaaagaagtcgctgatctagcagataaaatcgcagagcatttgactggagataaggaggtatatgccaatccttctcaatattttgatcaggttatagagatcaatttgtcggaacttgaaccttatattaacggaccttttactcctgaccttgcgactcctctttctaagtttaaggaagcggttcaacaaaacggttggcctaccaacttggaagtaggtttgatcggttcttgcacgaattcttcttatgaagatattactcgtgccgcttctgtagcaaaacaagcggcggataaaaatttagaagtaaaagcggaatacactgtgactcccggttcagagatgatacgttatacgatcgaaagagatggtctgataaaaacattctctgatataggaggagtggttcttgcaaacgcttgtggtccttgtatcggtcagtggagtcgtcatacaaaagatccggaaagaaaaaattcgatcattacttcgtttaacagaaattttgcgaaacgtaacgacggtcttgcggggactcacgcgtttgttgcgtcacccgaaatcgtgaccgcttttgcaattgctggtaaattggattttaatccgattacagattccttaaaaaccaaggatggaaaagaagtaaaactagatccaccaactggtcttgatttccctccgaacggttttgacgtaaaagacgctggttttatcgcacctgctgcggacggttctaaagtgaccgttgcggtagatcctaaatcggatcgtcttcaacttctttctccgtttattccttgggaaaaaacggacttaaaaggtttgaaacttctcattaaggccaaaggcaaatgtactacggatcatatttctatggcgggtccttggttaaaatatagagggcatttagataatatttctaataaccttttgattggagcggtgaattcgtttaacgataagaccaacgaagttaaaaatcaactttcaggagcttacgaaccagttcctcaaacagcaagggcttacaaagccaaaggaatcgggtctatcgtagtcggagacgagaattatggagaaggttcttctagagagcacgcggcgatggaacctaggcatcttggagtaagggcggtgattgtaaaatcgtttgctagaattcatgaaacaaatttgaaaaaacaaggaatgctcgctcttacatttgcggataagtcagactatgataaaattcaagaagaggattctattgatattttgggtctgacttcttttcaagagggagttcctttgactctcgtattacaccacaaagacggttcttctcaagaaattaaggccaaccatactttcaactcacaacagattgcttggttcaaagcgggtagtgcgctcaatttaatcagcgaagaacaaaataaaaaaggataa

SEQ ID NO: 66849 - protein, 757 aa, Leptospira interrogans serovar Lai str. 56601
MAFDIEMIRARYDKIGVLVTKARNVVGRPLTLTEKILYSHLWEGEPKTAYEKGKSYVDFAPDRVAMQDATAQMALLQFMSAGRSKVAVPSTVHCDHLIQAKDGAAEDLKTANTVNKEVYDFLSSVSNKYGIGFWKPGAGIIHQVVLENYAFPGGMMIGTDSHTVNAGGLGMIAIGVGGADAVDVMAGMAWELKFPKLIGVKLTGKLSGWASAKDIILKVAGILTVKGGTGAIVEYFGEGADSLSCTGKGTICNMGAEIGATTSVFGYDRNMREYLLKTNRKEVADLADKIAEHLTGDKEVYANPSQYFDQVIEINLSELEPYINGPFTPDLATPLSKFKEAVQQNGWPTNLEVGLIGSCTNSSYEDITRAASVAKQAADKNLEVKAEYTVTPGSEMIRYTIERDGLIKTFSDIGGVVLANACGPCIGQWSRHTKDPERKNSIITSFNRNFAKRNDGLAGTHAFVASPEIVTAFAIAGKLDFNPITDSLKTKDGKEVKLDPPTGLDFPPNGFDVKDAGFIAPAADGSKVTVAVDPKSDRLQLLSPFIPWEKTDLKGLKLLIKAKGKCTTDHISMAGPWLKYRGHLDNISNNLLIGAVNSFNDKTNEVKNQLSGAYEPVPQTARAYKAKGIGSIVVGDENYGEGSSREHAAMEPRHLGVRAVIVKSFARIHETNLKKQGMLALTFADKSDYDKIQEEDSIDILGLTSFQEGVPLTLVLHHKDGSSQEIKANHTFNSQQIAWFKAGSALNLISEEQNKKG

SEQ ID NO: 66850 - DNA, 2604 bp, Shewanella oneidensis MR-1
  CDS (1)..(2604): transl_table=11
atgagcactgttatgaacacccaatatcgcaagcctttacccggcacagcactcgactatttcgacacccgcgaagccattgaagccattgcccccggcgcctacgcgaaattgccttacacctcgcgcgtgttagcggaaaatttagtgcgtcgctgcgaaccagaaatgctcaccgcctcactaaaacaaattattgaatcaaagcaagaactggatttcccatggttccctgcccgagtcgtgtgccacgatattttaggccaaaccgcactggtagatcttgcaggtttacgtgatgcgattgctgctaagggtggcgatccagcgcaggttaacccagttgttccgactcaactgattgttgaccactcattagcagtggaatacggtggtttcgataaagatgccttcgccaaaaaccgcgccatcgaagacagacgcaacgaagacagatttcactttatcaactggacccaaaaagcctttaaaaacatcgatgtgatcccgcagggtaacggcatcatgcaccaaattaacctggagcgtatgtcacccgtgatccatgctcgcaacggtgtggccttccccgatactctagtcggcaccgacagccatactccccatgtggatgcgctgggtgttatcgccattggtgtgggtggtcttgaagccgaaagtgtaatgttaggccgcgcctcatacatgcgtctacccgacattatcggcgtggagctaacaggtaaacctcagccgggcatcactgcaaccgatatcgtgctggctttgaccgaatttttacgcgcccaaaaagtggtttcttcatatttagagttcttcggcgaaggcgctgaggccttaacccttggggatcgcgcaaccatctcgaacatgacgccagaatttggtgccacggccgccatgttctacatcgaccaacaaacgctagactacctaaccctcacgggccgcgaagccgagcaggttaagctggttgaaacctatgcgaaaacggctggtttgtggagcgatgatctcaagcaggctgtctacccacgcacactgcactttgacctgtcgtcggttgtgcgcaccatagctgggccttctaacccccatgcacgcgtaccaacctcagagttggccgcacgcggtatcagtggcgaggttgaaaacgagccagggttaatgccagatggcgcagtgattattgcggccatcaccagctgcactaacaccagtaacccacgtaacgtgattgcggcgggcctgcttgcacgcaacgccaatgccaaaggtttaacccgtaaaccttgggtgaagacctcactcgcccctggttctaaagcggtacaactgtatttagaagaagccaatttactgcctgaacttgagtccttaggctttggtattgtcggttttgcctgtaccacctgtaacggtatgagcggcgccctcgaccccgttatccagcaggaagtgatcgaccgcgatctgtacgctaccgctgtattatccggtaaccgtaacttcgacggccgaattcacccttatgctaagcaagccttcctcgcatcgccaccgttagtggtggcctatgcgattgcgggcaccattcgtttcgatatcgagaaggatgtcttaggcctcgataaagacggcaagccagtgcgcttaatcaatatttggccgtcggatgctgaaatcgatgctgtgatcgccgcaagcgttaagcctgagcagttccgcaaggtttacgaacccatgtttgatttgagcgtcgactacggcgataaggtcagcccgctgtacgactggcgtccacaatcaacctatatccgccgcccaccttactgggaaggcgcattagcgggcgagcggactctcaagggcatgcgcccactggcagtattaggtgacaacatcaccaccgaccatttatcgccatcaaacgcgattatgatggacagtgcggcgggtgaatacctgcacaaaatgggcttgcctgaggaagactttaactcctatgcgacccacaggggcgaccatttaaccgcccagcgcgccaccttcgccaaccctaaactcaaaaacgagatggcaattgtcgatggcaaggtgaagcaaggctcactggcacgtatcgagccagaaggcatagtcacccgcatgtgggaagccattgaaacctatatggatcgcaagcagccgctgattattatcgccggcgcagactatggccaaggctcatcccgtgactgggcggcaaaaggtgtgcgcttagcgggagttgaggccattgttgccgaaggctttgagcgtattcaccgcacaaacttagtcggtatgggtgtgttaccgcttgaatttaaggcgggcgagaatcgcgcgacctacggcatcgatggcactgaggtatttgatgttattggttcaatcgcgccaagagcagatttgaccgttatcatcacccgtaaaaacggtgagcgcgttgaagtgcctgtgacttgccgtttagataccgccgaagaagtatcaatctatgaagctggcggcgtactgcaacggtttgcgcaggactttttagagtcgaacctgaagtaa

SEQ ID NO: 66851 - protein, 867 aa, Shewanella oneidensis MR-1
MSTVMNTQYRKPLPGTALDYFDTREAIEAIAPGAYAKLPYTSRVLAENLVRRCEPEMLTASLKQIIESKQELDFPWFPARVVCHDILGQTALVDLAGLRDAIAAKGGDPAQVNPVVPTQLIVDHSLAVEYGGFDKDAFAKNRAIEDRRNEDRFHFINWTQKAFKNIDVIPQGNGIMHQINLERMSPVIHARNGVAFPDTLVGTDSHTPHVDALGVIAIGVGGLEAESVMLGRASYMRLPDIIGVELTGKPQPGITATDIVLALTEFLRAQKVVSSYLEFFGEGAEALTLGDRATISNMTPEFGATAAMFYIDQQTLDYLTLTGREAEQVKLVETYAKTAGLWSDDLKQAVYPRTLHFDLSSVVRTIAGPSNPHARVPTSELAARGISGEVENEPGLMPDGAVIIAAITSCTNTSNPRNVIAAGLLARNANAKGLTRKPWVKTSLAPGSKAVQLYLEEANLLPELESLGFGIVGFACTTCNGMSGALDPVIQQEVIDRDLYATAVLSGNRNFDGRIHPYAKQAFLASPPLVVAYAIAGTIRFDIEKDVLGLDKDGKPVRLINIWPSDAEIDAVIAASVKPEQFRKVYEPMFDLSVDYGDKVSPLYDWRPQSTYIRRPPYWEGALAGERTLKGMRPLAVLGDNITTDHLSPSNAIMMDSAAGEYLHKMGLPEEDFNSYATHRGDHLTAQRATFANPKLKNEMAIVDGKVKQGSLARIEPEGIVTRMWEAIETYMDRKQPLIIIAGADYGQGSSRDWAAKGVRLAGVEAIVAEGFERIHRTNLVGMGVLPLEFKAGENRATYGIDGTEVFDVIGSIAPRADLTVIITRKNGERVEVPVTCRLDTAEEVSIYEAGGVLQRFAQDFLESNLK

SEQ ID NO: 66852 - DNA, 2826 bp, Corynebacterium efficiens YS-314
  CDS (1)..(2826): transl_table=11
ttggagctcactgtgactgaaagcaagaactccttcaatgctaagagcaccctgcaggtcggcgagaagtcctatgactactacgccctctccgcagtgcctggcatggagaagctgccctactccctgaaggttctcggcgagaacctcctgcgcaccgaggacggcgcaaacatcaccgaggagcacatcgaggccatcgccaactgggatgcatctgctgatccaagcattgagatccagttcaccccggcccgcgtgctgatgcaggacttcaccggcgtcccctgtgttgtcgacctggcaaccatgcgtgaggccgtcaagaccctcggtggcgacccggataaggtcaacccactgaacccagctgagatggtcattgaccactccgtcatcgtcgaggccttcggtcgcccggacgccctcgagaagaatgttgagatcgagtacgagcgcaacgaggagcgttaccagttcctgcgttggggctccgaggcattctccaacttccgcgttgttcctccaggaaccggtatcgtccaccaggtcaacatcgagtacctggcccgcgttgtcttcgacaacgatggcctggcatacccggatacctgcatcggcaccgactcccacaccaccatggaaaacggcctcggcatcctgggctggggcgtcggcggcatcgaggctgaggctgccatgctcggccagcctgtctccatgctgatcccgcgcgtcgtcggcttcaagctcaccggtgagatcccggtcggcgtcaccgccaccgatgtcgttctgaccatcaccgagatgctccgcgaccacggtgttgtccagaagttcgtcgagttctacggcaacggcgtcaagtccgtcccgctggcgaaccgcgccaccatcggcaacatgtccccagagttcggctccacctgtgcgatgttccccatcgacgaggagaccatcaagtacctgcgtcttaccggccgtccggaagagcagatcgccctggtcgaggcctacgccaaggcccagggcatgtggctcgagcaggacgcacccgaagccgagtactccgagtacctcgagctcgacctgtccaccgttgttccttccatcgctggcccgaagcgcccacaggaccgcatcctgctgtccgaggcgaaggagcagttccgtgaggacctgaaggcctacaccaacgacccggtccaggttgaccagtccatcccggccaagcgcatggccaacgagggtggattccagccgggttccacttccgacctggacaactacaacgcatcctggccaggcgagggcgagtccgccgccgccaacgctgagggtcgtccgtccaacccggtcaccgttgtctccccacagggtggcgagtacaccatcgaccacggcatggtggccatcgcctccatcacctcctgcaccaacacctccaacccctccgtcatgatcggcgccggcctgatcgcccgtaaggcggcggagaagggcctgaagtccaagccatgggtcaagaccatctgtgctccgggttcccaggttgttgacggttactaccagcgtgcagacctctggaaggaccttgaggccctcggcttctacctctccggtttcggttgcaccacctgcatcggtaactccggcccgctgccggaggagatctccgaggccatcaacgagcatgacctggctgccaccgcagtcctgtccggtaaccgtaacttcgagggtcgtatctcccccgatgtgaagatgaactacctggcatccccgatcatggtcatcgcctacgccatcgccggcaccatggacttcgacttcgagaacgaagccctggggcaggaccaggacggcaatgatgtcttcctgaaggacatctggccttccaccgaggagatcgaggagaccatccaggccgccatctcccgtgagctctacgaggctgactacgctgacgtcttcaagggcgacaagcagtggcaggaactcgacatcccctccggcaagaccttcgagtgggacgagaactccacctacatccgcaaggctccgtacttcgatggcatgaccgctgagccacagccggtcaccgacatcgagaacgcccgcgttctggccaagctcggcgattcggtcaccaccgaccacatctcccctgcttcctccatcaagccaggcaccccggccgcacagtacctcgatgcccacggtgtggagcgtcaggactacaactccctgggttccaggcgtggtaaccacgaggtcatgatgcgcggcaccttcgccaacatccgcctccagaaccagctggttgacatcgcaggtggctacacccgcgacttcacccaagagggtggcccacaggcattcatctacgatgcctgcgtcaactacaaggaagccggcatcccgctggtcgtcctcgccggtaaggaatacggcaccggttcctcccgtgactgggctgcaaagggcaccaacctgctcggtgtgcgcgcagtcatcaccgagtccttcgagcgcatccaccgttcgaacctcatcggtatgggcgttgtcccgctgcagttcccggagggcgagtcccacgagtccctgggcctcgacggcaccgagaccttcgacatcaccggtctgaccgctctcaacgagggcaccaccccgaagaccgtcaaggtcaccgccaccaaggaaaacggcgagaaggtcgaattcgacgctgtcgtccgcatcgatacccccggtgaggctgactacttccgccacggtggcatcctgcagtacgtgctgcgccagatggctgcttcctaa

SEQ ID NO: 66853 - protein, 941 aa, Corynebacterium efficiens YS-314
MELTVTESKNSFNAKSTLQVGEKSYDYYALSAVPGMEKLPYSLKVLGENLLRTEDGANITEEHIEAIANWDASADPSIEIQFTPARVLMQDFTGVPCVVDLATMREAVKTLGGDPDKVNPLNPAEMVIDHSVIVEAFGRPDALEKNVEIEYERNEERYQFLRWGSEAFSNFRVVPPGTGIVHQVNIEYLARVVFDNDGLAYPDTCIGTDSHTTMENGLGILGWGVGGIEAEAAMLGQPVSMLIPRVVGFKLTGEIPVGVTATDVVLTITEMLRDHGVVQKFVEFYGNGVKSVPLANRATIGNMSPEFGSTCAMFPIDEETIKYLRLTGRPEEQIALVEAYAKAQGMWLEQDAPEAEYSEYLELDLSTVVPSIAGPKRPQDRILLSEAKEQFREDLKAYTNDPVQVDQSIPAKRMANEGGFQPGSTSDLDNYNASWPGEGESAAANAEGRPSNPVTVVSPQGGEYTIDHGMVAIASITSCTNTSNPSVMIGAGLIARKAAEKGLKSKPWVKTICAPGSQVVDGYYQRADLWKDLEALGFYLSGFGCTTCIGNSGPLPEEISEAINEHDLAATAVLSGNRNFEGRISPDVKMNYLASPIMVIAYAIAGTMDFDFENEALGQDQDGNDVFLKDIWPSTEEIEETIQAAISRELYEADYADVFKGDKQWQELDIPSGKTFEWDENSTYIRKAPYFDGMTAEPQPVTDIENARVLAKLGDSVTTDHISPASSIKPGTPAAQYLDAHGVERQDYNSLGSRRGNHEVMMRGTFANIRLQNQLVDIAGGYTRDFTQEGGPQAFIYDACVNYKEAGIPLVVLAGKEYGTGSSRDWAAKGTNLLGVRAVITESFERIHRSNLIGMGVVPLQFPEGESHESLGLDGTETFDITGLTALNEGTTPKTVKVTATKENGEKVEFDAVVRIDTPGEADYFRHGGILQYVLRQMAAS

SEQ ID NO: 66854 - DNA, 2742 bp, Pseudomonas putida KT2440
  CDS (1)..(2742): transl_table=11
atgccctcgctcgatagcctgaacaccctcaagcccctcaaggtcggcgacaagacctaccactacttcagcctcaccgaggccgcccgccagctgggtgacctgcagcgcctgcccatgtcgctgaaagtgctgctggaaaatctgctgcgctgggaggatggcgcgaccgtcaccggcgacgacttgcgcgccattgcccaatggcttggcgaacggcgctccgaccgcgagatccagtaccgcccggcgcgggtgttgatgcaggacttcaccggcgtgcccgccgtggtcgacctggcggccatgcgcgccgccatggccaaggctggcggcgacccgcaacggatcaacccgctgtcaccggtcgacctggtgatcgatcactcggtaatggtcgaccgctacggcacgccgcaagcctttgccgaaaacgtcgacatcgaaatgcagcgcaatggcgagcgctatgcctttctgcgttggggccagagcgccttcgacaacttccgcgtggtccccccgggcaccggcatttgccaccaggtcaacctggaatacctgggccgcacggtgtggacccgtgaggccgacggccgcacctatgccttccccgataccttggtgggcacagactcgcacaccaccatgatcaacggcctgggcgtactcggctggggtgtcggcggcatcgaagcggaagcggccatgctcggccagccggtatcgatgctgatccccgaagtgatcggcttcaagctgaccggcaagctgcgggagggcatcactgccactgacctggtgctgaccgtgacacagatgctgcgcaagaaaggcgtggtgggcaagttcgtcgagttctacggggacggcctggccgagttgcccctggccgaccgcgcaaccatcgccaacatggcaccggaatacggcgccacctgtggtttcttcccggtcgaccaagtcactctggactatctgcgcctctcgggccgccccgaagcgaccgtgcaactggtcgagcagtactgcaaggcacagggcatgtggcgcctgcccggccaggagccgtcattcagcgacacgctggccctggacatggacgacgtcgaagccagcctggccgggcccaaacggccgcaggaccgcgtagcgctgggccaggtcagccaagccttcgaccacttcatcgaactgcagcccaaaccgctggccaaagaagttggccgcctggaaagcgaaggtggcggcggtgtggcagtgggcaacgccgaccagaccggcgcagtcgactacagccatcagggccagacccacaccctgcgcgatggggccgtggtgattgccgcgatcacctcatgcaccaacacgtccaaccccagtgtgatgatggctgccgggctggtggcgaaaaaagcactggaaaagggcctgcaacgcaaaccttgggtcaagagttcgctggcgccgggctccaaagtcgtcactgactacttcaaggcagccgggctcacgccttacctcgaccaactgggttttgatctggtcggctatggctgcaccacctgcatcggcaactccggcccgctggacgaggcgatcgaaaaagccattggcagcgccgacctcaccgtggcctcggtgctatcgggcaaccgcaacttcgagggccgcgtgcacccactggtcaagaccaactggctggcctcgcccccgctggtggtggcctacgccctggccggcagcgtgcgcctggacttgacgcgcgacccgctggggtcaggcaaggacggccaaccggtctacctgcgggatatctggccgagccagcaggaaattgccgaggccgtggccaaggtcgatacggcgatgttccacaaggagtacgccgaagtgtttgccggtgatgcgcaatggcaggccatcgaggtgccacaggccgccacttacgtgtggcaggctgactccacctacatccagcacccaccgttcttcgacggcatcggcgggccgccgccacaaattgccaatattcacggcgcacgggtgctggcgctgctgggcgattcagtgaccaccgaccacatttcccccgccggcaacatcaagaccgacagcccggccgggcgctacctgcgggaacaaggtgtggagccacgcgacttcaactcctacggttcgcggcgtggcaaccacgaagtgatgatgcgcggcaccttcgccaacatccgtattcgcaacgagatgctggcaggtgaagaaggcggcaacaccttgcatgtgcccactggcgagaagctgtcgatctacgacgcggccatgcgttaccagcaggaaggcaccccgctgctggtgattgccggccaggagtacggcaccggttcgagccgcgactgggctgccaagggtaccaacctgctgggggtcaaggccgtgctggcagaaagcttcgagcgtattcaccgctccaacctggtgggcatgggcgtattaccgctgcaattcaaggctgggcacaaccgcaaacagctggggctgaccggcaaggagcagatcgatgtactggggctggacggcgcgcatatccaccctggcatgagcctgcccttgcgcattacccgcgaagatggccaacaggaacagatcgaggtgctatgccggattgataccctgaacgaggtggaatacttcaaggcgggggggattctgcattatgtgttgcgccagatgatcgccagttga

SEQ ID NO: 66855 - protein, 913 aa, Pseudomonas putida KT2440
MPSLDSLNTLKPLKVGDKTYHYFSLTEAARQLGDLQRLPMSLKVLLENLLRWEDGATVTGDDLRAIAQWLGERRSDREIQYRPARVLMQDFTGVPAVVDLAAMRAAMAKAGGDPQRINPLSPVDLVIDHSVMVDRYGTPQAFAENVDIEMQRNGERYAFLRWGQSAFDNFRVVPPGTGICHQVNLEYLGRTVWTREADGRTYAFPDTLVGTDSHTTMINGLGVLGWGVGGIEAEAAMLGQPVSMLIPEVIGFKLTGKLREGITATDLVLTVTQMLRKKGVVGKFVEFYGDGLAELPLADRATIANMAPEYGATCGFFPVDQVTLDYLRLSGRPEATVQLVEQYCKAQGMWRLPGQEPSFSDTLALDMDDVEASLAGPKRPQDRVALGQVSQAFDHFIELQPKPLAKEVGRLESEGGGGVAVGNADQTGAVDYSHQGQTHTLRDGAVVIAAITSCTNTSNPSVMMAAGLVAKKALEKGLQRKPWVKSSLAPGSKVVTDYFKAAGLTPYLDQLGFDLVGYGCTTCIGNSGPLDEAIEKAIGSADLTVASVLSGNRNFEGRVHPLVKTNWLASPPLVVAYALAGSVRLDLTRDPLGSGKDGQPVYLRDIWPSQQEIAEAVAKVDTAMFHKEYAEVFAGDAQWQAIEVPQAATYVWQADSTYIQHPPFFDGIGGPPPQIANIHGARVLALLGDSVTTDHISPAGNIKTDSPAGRYLREQGVEPRDFNSYGSRRGNHEVMMRGTFANIRIRNEMLAGEEGGNTLHVPTGEKLSIYDAAMRYQQEGTPLLVIAGQEYGTGSSRDWAAKGTNLLGVKAVLAESFERIHRSNLVGMGVLPLQFKAGHNRKQLGLTGKEQIDVLGLDGAHIHPGMSLPLRITREDGQQEQIEVLCRIDTLNEVEYFKAGGILHYVLRQMIAS

SEQ ID NO: 66856 - DNA, 2676 bp, Escherichia coli CFT073
  CDS (1)..(2676): transl_table=11
atgtcgtcaaccctacgagaagccagtaaagacacgttgcaggccaaagataaaacttaccactactacagcctgccgcttgctgccaaatcactgggcgatatcacccgtctacccaagtcactcaaagttttgctcgaaaacctgctgcgttggcaggatggtaaatcggttaccgaagaggatatccacgcgctggcgggatggctgaaaaatgcccatgctgaccgtgaaattgcctaccgcccggcaagagtgctgatgcaggactttaccggcgtacctgccgttgttgatctggcggcaatgcgcgaagcggttaaacgcctcggcggcgatactgcaaaggttaacccactctcaccggtcgacctggtcattgaccactcggtgaccgtcgatcgttttggtgatgatgaggcatttgaagaaaacgtacgcctggaaatggagcgcaaccacgaacgttatgtgttcctgaaatggggaaagcaggcgttcagtcggtttagcgtcgtgccgccaggcacaggcatttgccatcaggttaacctcgaatatctcggcaaagcagtgtggagcgaattgcaggacggtgaatggattgcttatccggatacactcgttggtactgactcgcacaccaccatgatcaacggccttggcgtgctggggtggggcgttggtggcatcgaagcagaagccgcaatgttaggccagccggtttccatgcttatcccggacgtagtgggctttaaacttaccggaaaattacgtgaaggtattaccgccacagacctggttctcactgttacccaaatgttgcgcaaacatggcgtggtggggaaattcgtcgaattttatggtgatgggctggattcactaccgctggcggatcgcgccaccattgccaatatgtcgccagaatatggtgccacctgtggcttcttcccaatcgatgctgtcaccctcgattacatgcgtttaagcgggcgcagtgaagatcaggtcgagttggtcgaaaaatatgccaaagcgcagggcatgtggcgtaatccgggcgatgaaccaatttttaccagtgtgttagaactggatatgaatgacgttgaagcgagcctggcagggccaaaacgcccacaggatcgcgttgcactgcccgatgtaccaaaagcatttgctgccagtagcgaactggaagtgaatgccacgcataaagatcgcctgccggtcgattatgttatgaacggacatcagtatcagttacctgatggcgctgtggtcattgctgcgataacgtcgtgcaccaacacctctaacccaagtgtgttgatggccgcaggcttgctggcgaaaaaagccgtaacgctgggcctcaagcggcaaccgtgggtcaaagcgtcgctggcaccgggttcgaaagtcgtttctgattatctggcaaaagcgaaactgacaccgtatctcgatgaactgggatttaaccttgtgggatacggttgtaccacctgtattggtaactctggaccgttgcccgatcctatcgaaacggcaatcaaaaaaggcgatttaaccgtcggtgcagtgctgtccggcaaccgtaactttgaaggccgtatccatccgctggttaaaaccaactggctggcctcgccgccgctggtggttgcctatgcgctggcgggaaatatgaatatcaacctggcttctgagcctatcggccatgatcgcaaaggcgagccggtatatctgaaagatatctggccatcggcacaagaaattgcccgtgcggtagaccaagtctccacagaaatgttccgcaaagagtacgcagaagtttttgaaggcacatctgagtggaaggaaattaacgtcacacgatccgatacctacggttggcaggaggattcaacctatattcgcttatcgcctttctttgatgaaatgcaggcaacaccagcacctgtggaagatattcacggtgcgcggatcctcgcaatgctgggggattcagtcaccactgaccatatctctccggcgggcagtattaagcccgacagcccggcgggtcgatatctacaaggtcggggtgttgagcggaaagactttaactcctatggttcgcggcgtggtaaccatgaagtgatgatgcgcggcaccttcgccaatattcgcatccgtaatgaaatggtgcctggcgttgaaggggggatgacgcgccatttacctgacagcgatgtcgtctctatttatgatgccgcaatgcgctataagcaggagcaaacgccgctggcggtgattgccgggaaagagtatggatcaggctccagccgtgactgggcggcaaaaggtccgcgtctgcttggtattcgtgttgtgattgccgaatcgtttgaacgaattcaccgttcgaatttaattggcatgggcatcctgccgctggaatttccacaaggtgtgacgcgtaaaacgttagagcttaccggggaagagaagattgatattggtgatctgcaaaatctacaacccggcgcgacggttccggtgacgcttacgcgcgcggatggtagccaggaagtcgtaccctgccgttgtcgtatcgacaccgcgacggagttgacctactaccagaacgacggcattttgcattatgtcattcgtaatatgttgaagtaa

SEQ ID NO: 66857 - protein, 891 aa, Escherichia coli CFT073
MSSTLREASKDTLQAKDKTYHYYSLPLAAKSLGDITRLPKSLKVLLENLLRWQDGKSVTEEDIHALAGWLKNAHADREIAYRPARVLMQDFTGVPAVVDLAAMREAVKRLGGDTAKVNPLSPVDLVIDHSVTVDRFGDDEAFEENVRLEMERNHERYVFLKWGKQAFSRFSVVPPGTGICHQVNLEYLGKAVWSELQDGEWIAYPDTLVGTDSHTTMINGLGVLGWGVGGIEAEAAMLGQPVSMLIPDVVGFKLTGKLREGITATDLVLTVTQMLRKHGVVGKFVEFYGDGLDSLPLADRATIANMSPEYGATCGFFPIDAVTLDYMRLSGRSEDQVELVEKYAKAQGMWRNPGDEPIFTSVLELDMNDVEASLAGPKRPQDRVALPDVPKAFAASSELEVNATHKDRLPVDYVMNGHQYQLPDGAVVIAAITSCTNTSNPSVLMAAGLLAKKAVTLGLKRQPWVKASLAPGSKVVSDYLAKAKLTPYLDELGFNLVGYGCTTCIGNSGPLPDPIETAIKKGDLTVGAVLSGNRNFEGRIHPLVKTNWLASPPLVVAYALAGNMNINLASEPIGHDRKGEPVYLKDIWPSAQEIARAVDQVSTEMFRKEYAEVFEGTSEWKEINVTRSDTYGWQEDSTYIRLSPFFDEMQATPAPVEDIHGARILAMLGDSVTTDHISPAGSIKPDSPAGRYLQGRGVERKDFNSYGSRRGNHEVMMRGTFANIRIRNEMVPGVEGGMTRHLPDSDVVSIYDAAMRYKQEQTPLAVIAGKEYGSGSSRDWAAKGPRLLGIRVVIAESFERIHRSNLIGMGILPLEFPQGVTRKTLELTGEEKIDIGDLQNLQPGATVPVTLTRADGSQEVVPCRCRIDTATELTYYQNDGILHYVIRNMLK

SEQ ID NO: 66858 - DNA, 2616 bp, Vibrio vulnificus CMCP6
  CDS (1)..(2616): transl_table=11
atgggaagcaagtccatgagcaataaaaacaataccttatatcgcaaacctctaccgggcagttcgctggattactttgatgcgcgtgaagcggtcgaggcgatatctccaggcgcgtacgcgcgtttgccatacacttcgcgcgtattggcagaacaactggtgcgccgctgtgaacctagcacgctcaccgacagcctgaaacagttgattgaacgacgtcgcgatcttgattttccttggtatccagcacgcgtggtttgccacgatattttgggccaaaccgcattagtcgacctcgccggtctgcgtgacgcgatcgccgagcaaggtggtaatccagcgaacgtcaatcctgtggtggaaacccaactgattgtcgatcactcgttggcggtggaatatggcggttttgacccagaggcatttgagaaaaatcgcgccatcgaggagcgtcgcaacgaagaccgattccacttcatcgagtggtgtaaaaccgcgtttgaaaacgtcagtgtgattccggcgggtaacggcatcatgcaccaaatcaatttggaaaaaatgtcgccagtggtgcaggtaaaagagggcatcgcctttcctgatacctgtgttggtaccgacagccatacgccacatgtcgatgcccttggcgtgattgccattggcgtcggtggcttagaagcggaaaccgtgatgctcggccgcccatcaatgatgcgtttgcccgatatcgtcggtgtgaagctggttggtcagcgtcaaccgggcattaccgccaccgatattgtgttagccattactgaatttctgcgtcaacaacgggtggtttccgcttatcttgaattttttggcgaaggggcgaaagcactaacgattggcgatcgcgcgaccatctctaacatgacgccggaatatggtgcgaccgcgggcatgttctacatcgacgagcagacaatcaactacctacgcttaacagggcgcgagccagagcaagtggctttggtggaaaactacgccaaacacaccggattgtgggccgacgatttgcatcaggtcgactatgagcgtgtgttggagtttgatttgtctcaggtcacgcgtaatcttgctgggccgtctaaccctcatcgccgtttgcccacttcggagttggccagccgtggcattgccgggcaataccaagaaaaagaaggccaactgccagatggcgcagtgatcatcgccgccattacctcgtgcaccaacaccagtaaccctcgcaatgttgtcgcggcaggtttgttggcgaagaaagccaaccagttgggtctcatccgtaaaccttgggtgaaatcctcctttgcacccggctcaaaagtggccaagctttatcttgaagaagcggggttattgcccgagcttgaaaagctcggatttggcatcgtcgcgtatgcttgtaccacctgtaatggcatgagtggcgcactcgaccctaagattcagcaagagatcatcgagcgcgatctctacgcgaccgcggtgttgtcgggtaaccgcaactttgacggccgtattcacccttatgccaaacaagcgtttctcgcctctccgcctttggtggtggcgtatgcgattgctggcacgatgcgttttgatattgagcgcgatgtgctggggatggatagcagcggcaaagcgatttatctgcgcgatatttggccaagcgatgaagagatcgacgcggtcgtgggcagctcagtgaagcctgaacagttccgccaagtctacattcaaatgttcaaactggatgaaagtgaacgtagtgaatcgccgctttacgattggcgtccgatgagcacttatattcgccggccaccttattgggagggcgcactcgctggtgagcgtacgctttcaggcatgcggcctttggccattttgggggacaacatcaccaccgatcacctttcaccatcgaatgcgattttggccagctctgcggcgggcgaatacttggcaaaaatgggcgtgccagaggaggactttaactcctacgccacccatcgcggcgatcacttaaccgcgcagcgtgcaacgttcgctaacccgaaactgtttaatgaaatggtgaaagaaaagggccaagtggtgcaaggatcgctcgctcgagtggagcctgaggggaaagtcactcgcatgtgggaagcgattgaaacctacatgcagcgcaagcagccattgatcattgtcgcaggggcggattacggacaaggctcctctcgcgattgggcggcaaaaggggttcgacttgctggggtagaagcgatcgttgcggaaggctttgagcgcattcaccgtaccaatctcgtcggtatgggcgtgttgccgctgcaatttaaagcgggtgtgaatcgcaacagcctgcaactggatggcaccgagctctatgacgtgatgggggaaatcaaacccggagccgacctcgcactggtcatcactcgtaccaatggggaaaaacttgatgtcgcggtgacgtgtcgtcttgacaccgaagatgaagtgcatgtctatcaagctggcggcgtgttgcagcgattcgcgcaagattttctctccgagcaaggagtgtaa

SEQ ID NO: 66859 - protein, 871 aa, Vibrio vulnificus CMCP6
MGSKSMSNKNNTLYRKPLPGSSLDYFDAREAVEAISPGAYARLPYTSRVLAEQLVRRCEPSTLTDSLKQLIERRRDLDFPWYPARVVCHDILGQTALVDLAGLRDAIAEQGGNPANVNPVVETQLIVDHSLAVEYGGFDPEAFEKNRAIEERRNEDRFHFIEWCKTAFENVSVIPAGNGIMHQINLEKMSPVVQVKEGIAFPDTCVGTDSHTPHVDALGVIAIGVGGLEAETVMLGRPSMMRLPDIVGVKLVGQRQPGITATDIVLAITEFLRQQRVVSAYLEFFGEGAKALTIGDRATISNMTPEYGATAGMFYIDEQTINYLRLTGREPEQVALVENYAKHTGLWADDLHQVDYERVLEFDLSQVTRNLAGPSNPHRRLPTSELASRGIAGQYQEKEGQLPDGAVIIAAITSCTNTSNPRNVVAAGLLAKKANQLGLIRKPWVKSSFAPGSKVAKLYLEEAGLLPELEKLGFGIVAYACTTCNGMSGALDPKIQQEIIERDLYATAVLSGNRNFDGRIHPYAKQAFLASPPLVVAYAIAGTMRFDIERDVLGMDSSGKAIYLRDIWPSDEEIDAVVGSSVKPEQFRQVYIQMFKLDESERSESPLYDWRPMSTYIRRPPYWEGALAGERTLSGMRPLAILGDNITTDHLSPSNAILASSAAGEYLAKMGVPEEDFNSYATHRGDHLTAQRATFANPKLFNEMVKEKGQVVQGSLARVEPEGKVTRMWEAIETYMQRKQPLIIVAGADYGQGSSRDWAAKGVRLAGVEAIVAEGFERIHRTNLVGMGVLPLQFKAGVNRNSLQLDGTELYDVMGEIKPGADLALVITRTNGEKLDVAVTCRLDTEDEVHVYQAGGVLQRFAQDFLSEQGV

SEQ ID NO: 66860 - DNA, 2244 bp, Bacteroides thetaiotaomicron VPI-5482
  CDS (1)..(2244): transl_table=11
atggtgtatgatttgactatgttagaggctttttattctgcttataaaggaaaagtggaacacgtgcgggctgttttgaaacgcccattgacgttagccgagaagattctgtatgcccatctgttcaatgagggcgatctgaaaaactacaagcggggtgaagactacgtaaatttccgtcccgaccgcgtcgctatgcaggacgcgactgcccagatggcattgcttcaattcatgaatgcaggaaaagaaaaagtggctgttccctccaccgtgcactgtgaccacttgatacaagcgtacaaaggagcaaaggaggacattgctacggcaaccaaaacaaacgaagaagtttacgactttttgcgcgatgtatcctctcgttacggcatcggcttctggaagccgggcgccggaatcattcaccaggtagtgctcgaaaattacgctttccccggcgggatgatggtaggaaccgactctcacactccgaatgccggaggactgggcatggtggccatcggcgtcggcggtgcggatgccgtagacgtgatgacgggtatggaatgggaactgaaaatgccaaggattatcggtgtccgcctgaccggaaaactgagcggctggacttccccgaaagatgtgatcctgaaacttgctgggattctgaccgtaaaaggaggaacgaactccatcatcgaatatttcggaccgggaacagcttccctgtcggctaccggcaaagcgaccatttgcaatatgggtgcggaagtaggagctaccacttcgcttttcccgttcgacgggcgcatggctacttatctgagagccaccggcagggatcgcatcgtggaactggcggaagccgtggactgtgagctccgtgcggaccaacaggtgacggacgaaccggaaaagtactacgaccgtgtcatcgacattgacttgtccacgctcgaaccttatatcaacggccctttcacaccggatgccgctacccctatctctgaatttgcagaaaaagtattactgaacggctatccgcgtaagatggaagtcggactgatcggttcgtgtaccaactcttcttaccaagatctcagccgtgccgcatcccttgcaaggcaggtgaaggaaaagaatctgagtgtggcttccccgctgattatcaatccgggttccgagcaaatccgcgctactgccgaaagagacggaatgatggatgacttcatgcagatcggcgccgtgatcatggcaaatgcctgcggtccttgcatcggtcagtggaaacgtcatacggacgacccgacacggaagaactcgatcgtcacatccttcaaccgtaactttgccaaacgtgcggacggcaatccgaacacatacgcctttgttgcttctcccgaactgacgatggcactgaccattgccggtgatctttgcttcaatccgctgaaagacagactgatgaaccatgacggcgagaaagtgaaactggccgaacccgtaggagatgaactccccttgagaggtttcacctccggcaatgaaggctatatcacccccggcgggacgaaaacagcgatcaacgtcaacccggcttctcaacgcctgcaactgctgactcctttccccgcttgggacggacaagatatactcaatatgcccctgctgattaaggcgcagggcaaatgtactaccgaccatatttcgatggcgggaccgtggctgcgtttccgcggacatttggagaatatttcggataatatgctaatgggagccgtgaatgcgttcaatggcgaaacgaacaacgtgtggaaccgttcgacaaacacctacggaaccgtttcgggcacagccaaaatgtataaatccgaaggaatcccctctattgtcgtggccgaagaaaactatggagaaggctccagtcgcgagcacgcggcaatggaaccccgtttcctgaatgtgcgtgtgattctcgccaagagcttcgcccgtatccacgaaacgaatctgaaaaagcagggcatgcttgcccttacctttgcagacaaagcggattatgacaagatacaggagcacgacctcctttcagtcatcggcttgccggactttgctccgggacggaatctgaccgtcgttctccatcacgaagacggaacgaaagagagttttgaagcgcaacatacatacaacgaacagcagattgcctggttccgtgccggctctgccttgaatgccagataa

SEQ ID NO: 66861 - protein, 747 aa, Bacteroides thetaiotaomicron VPI-5482
MVYDLTMLEAFYSAYKGKVEHVRAVLKRPLTLAEKILYAHLFNEGDLKNYKRGEDYVNFRPDRVAMQDATAQMALLQFMNAGKEKVAVPSTVHCDHLIQAYKGAKEDIATATKTNEEVYDFLRDVSSRYGIGFWKPGAGIIHQVVLENYAFPGGMMVGTDSHTPNAGGLGMVAIGVGGADAVDVMTGMEWELKMPRIIGVRLTGKLSGWTSPKDVILKLAGILTVKGGTNSIIEYFGPGTASLSATGKATICNMGAEVGATTSLFPFDGRMATYLRATGRDRIVELAEAVDCELRADQQVTDEPEKYYDRVIDIDLSTLEPYINGPFTPDAATPISEFAEKVLLNGYPRKMEVGLIGSCTNSSYQDLSRAASLARQVKEKNLSVASPLIINPGSEQIRATAERDGMMDDFMQIGAVIMANACGPCIGQWKRHTDDPTRKNSIVTSFNRNFAKRADGNPNTYAFVASPELTMALTIAGDLCFNPLKDRLMNHDGEKVKLAEPVGDELPLRGFTSGNEGYITPGGTKTAINVNPASQRLQLLTPFPAWDGQDILNMPLLIKAQGKCTTDHISMAGPWLRFRGHLENISDNMLMGAVNAFNGETNNVWNRSTNTYGTVSGTAKMYKSEGIPSIVVAEENYGEGSSREHAAMEPRFLNVRVILAKSFARIHETNLKKQGMLALTFADKADYDKIQEHDLLSVIGLPDFAPGRNLTVVLHHEDGTKESFEAQHTYNEQQIAWFRAGSALNAR

SEQ ID NO: 66862 - DNA, 2673 bp, Coxiella burnetii RSA 493
  CDS (1)..(2673): transl_table=11
atggcggattcattaaaaacacggcgtgaattaacggctggtggcaaaacctaccactaccatagcttaaaagcggcggaagacgcgggtctttcaaacattcatcgccttccgtactcactcaaaattttattggaaaaccaattacggcatgaagatggagaaacagtcactcaaacgcatattgaagcgttcgctcactggctgaaagataaacattccgaccgcgaaatcgcttatcgacccgcgcgagtcttaatgcaagattttaccggcgttcccgccgtggtcgatttagccgcgatgcgcgatgcgatggcgcgcatgaaaggggatccgaccaaaatcaaccctcattgccctgtcgatcttatcatcgaccattccgtgcaagtggatgaattcggcaatgaagaggcctttcgagataacgtgcgcattgaaatggagcgcaaccacgaacgatataccttcttaaaatggggacaacaagcgtttcgtcattttcaattggtgccgccaggcaccggtatttgccaccaagtgaatctggaataccttgggcgcggcgtgtggtctagccaacaagacggtgagtggttggcttatcccgacacgctggtcgggacggacagtcacacgaccatgatcaatggactgggtgttttgggatggggcgtcgggggcatcgaagccgaagcggctatgctgggacagcccatctctatgctaatccccgaagtcattggtttttatctttctggtcaattatgcgaaggcattacagccactgatcttgttttaaccgtgactcaaatgctgcgtcaaaaaggcgttgtgggaaaattcgttgaattctacggccccggtttagcggagcttcctctggctgaccgagcgactatcggcaatatggctcctgaatatggcgccacttgcggacttttccctatcgatgccgaaacgattaaatatttagaattaaccggccgggacgctgaagcgatcgaactggttaaggcttattcaaaagcgcaaggcacttggcacgacgaaaatacccccgaacctattttctcagacacgctatcccttgacctttccaccgtcgaacccagtctcgccggccccaaacgcccccaagaccgcgtccccttagccaagttaaagaaaaccatcgaaggtgttattgcgacggctgagcgcgatcaagaactcgatcactcttttcaaagtaccggagatttcgatctccatcatggcgatgtcgtgatcgccgccatcaccagttgtacgaatacctccaatcccagcgtaatgctcgccgcaggtttgcttgcaaaaaacgcggtggaaaaagggcttcaaagaaaaccctgggttaaatcatcgctagcaccagggtccaaagtggttacggattatttgcataaaacaggattaattgattatctggaaaagattggcttttatctggttggctacggctgcacgacctgtattggcaattcgggacccttacccgagactgtggctaaaacggtgacggaaaatgatcttattgtgtcgtccgttttatccggcaatcgtaattttgaaggtcgtattcatccgttagttaaaacaaattggttagcatcaccaccgctggtggttgcttttgcccttgctggcacaacgcgcattgatcttactaaagatccgctgggtcataacgatcgtggagaacctatttttctaaacgatatctggccatcgaatgcagaaattgcaaagacagtgatgcaagttcgcaatgatatgttccgcaaagaatacgccgacgtattcgagggagacgaagaatggcagcgtattcatgtgtctgccggagacactttcagttggcaaacgaattccacttatgtgaaaaatccccctttctttgaaaacatgagtgcgaaacccgagccgttaaaaaatattattgacgcacgcattttagctattttaggcgacagtgtaacgacggatcatatttctcccgcaggcgccattaaagcggatagtccagccggtaaatatttaatcgagcatggcatcgacattaaagattttaattcttatggttctcgccgcggtaatcacgaagtattgatgcgcgggacgtttgccaacattcgtattcgtaatgaaatgttatcgaaagtggaaggcggatttacgaaacattttccggatggggaacagcttcccatttacgacgctgcaatgaagtatcacagcgagaatatcccgttggtggtgatcgcggggaaagaatacggtaccggttcttcgcgcgattgggccgccaaaggtccgcggctattgggtgttaaagcagtggtggcggaaagttttgaacgtattcatcgttctaatttagtcggtatgggtgtgctgccgttggaattcaaaaatgacgataatcgtcattctttaaaattagagggaaatgaagtcattgatatcaccggattggaaaatgatttacagcctggaggtgacgttattatgacggttaaacgaaaagatggaactattgagaaaattccattgcattgtcgtatcgatacacaaaatgaattggcttattaccagcatggtggaattttacagtttgtgttacgccaaatgttgagatcttcttaa

SEQ ID NO: 66863 - protein, 890 aa, Coxiella burnetii RSA 493
MADSLKTRRELTAGGKTYHYHSLKAAEDAGLSNIHRLPYSLKILLENQLRHEDGETVTQTHIEAFAHWLKDKHSDREIAYRPARVLMQDFTGVPAVVDLAAMRDAMARMKGDPTKINPHCPVDLIIDHSVQVDEFGNEEAFRDNVRIEMERNHERYTFLKWGQQAFRHFQLVPPGTGICHQVNLEYLGRGVWSSQQDGEWLAYPDTLVGTDSHTTMINGLGVLGWGVGGIEAEAAMLGQPISMLIPEVIGFYLSGQLCEGITATDLVLTVTQMLRQKGVVGKFVEFYGPGLAELPLADRATIGNMAPEYGATCGLFPIDAETIKYLELTGRDAEAIELVKAYSKAQGTWHDENTPEPIFSDTLSLDLSTVEPSLAGPKRPQDRVPLAKLKKTIEGVIATAERDQELDHSFQSTGDFDLHHGDVVIAAITSCTNTSNPSVMLAAGLLAKNAVEKGLQRKPWVKSSLAPGSKVVTDYLHKTGLIDYLEKIGFYLVGYGCTTCIGNSGPLPETVAKTVTENDLIVSSVLSGNRNFEGRIHPLVKTNWLASPPLVVAFALAGTTRIDLTKDPLGHNDRGEPIFLNDIWPSNAEIAKTVMQVRNDMFRKEYADVFEGDEEWQRIHVSAGDTFSWQTNSTYVKNPPFFENMSAKPEPLKNIIDARILAILGDSVTTDHISPAGAIKADSPAGKYLIEHGIDIKDFNSYGSRRGNHEVLMRGTFANIRIRNEMLSKVEGGFTKHFPDGEQLPIYDAAMKYHSENIPLVVIAGKEYGTGSSRDWAAKGPRLLGVKAVVAESFERIHRSNLVGMGVLPLEFKNDDNRHSLKLEGNEVIDITGLENDLQPGGDVIMTVKRKDGTIEKIPLHCRIDTQNELAYYQHGGILQFVLRQMLRSS

SEQ ID NO: 66864 - DNA, 2718 bp, Streptomyces avermitilis MA-4680
  CDS (1)..(2718): transl_table=11
gtgtcggcgaacagcttcgacgcccgcagcacgctgcaggtgggcgacgagtcgtacgagatcttccggctggacaaggtggaaggctcggctcgccttccgtacagcctgaaggtgctgctggagaacctgctccgcaccgaggacggcgcgaacatcaccgccgaccacatccggtccatcggcaactgggactcccaggcgcagcccagccaggagatccagttcacgcccgcccgcgtgatcatgcaggacttcaccggcgtgccctgcgtcgtggacctcgccaccatgcgtgaggccgtgaaggagctcggcggcgaccccgcgaagatcaacccgctggcgccggccgagctggtcatcgaccactccgtcatcgccgacaagttcggcacgaacgacgccttcgcgcagaacgtcgagctggagtacggccgcaacaaggagcgctaccagttcctgcgctggggccagaccgccttcgacgagttcaaggtcgtcccgccgggcaccggcatcgtccaccaggtcaacatcgagcacctcgctcgcacggtcatggtccgaggcggccaggcctacccggacaccctggtcggcaccgactcccacaccaccatggtcaacggcctcggtgtgctgggctggggcgtcggtggcatcgaggccgaggccgcgatgctcggccagccggtctcgatgctcatcccgcgcgtcgtcggcttcaagctcaccggtgagctcaagcccggcacgaccgccacggacctcgtgctcacgatcaccgagatgctgcgcaagcacggcgtcgtcggcaagttcgtcgagttctacggcgagggtgtggcggccacgagcctcgccaaccgcgccaccatcggcaacatgtcgccggagttcggctccaccgccgcgatcttcccgatcgacgacgagaccctgaagtacctgcgcctgaccggccgtgacgagcagcaggtcgcgctcgtcgaggcgtacgccaaggagcagggcctctggctcgacccggccgccgagcccgacttctccgagaagctcgagctcgacctctccacggtcgtcccgtcgatcgccggcccgaagcgcccgcaggaccgcatcgtcctcgccaacgcggcccagcagttcgcccaggacgtccgcaactacgtggacgaggtggacgaggcgggcaaggagtccttcccggcctccgacgcccccgcgctccgccccaacggtgcgccgagccgcccgaccctcgtcacggcccccgacggctcgacgtacgagatcgaccacggcgcggtgacggtcgcggccatcacctcctgcaccaacacctcgaacccgtacgtcatggtcgccgccgcgctcgtcgcgaagaaggccgtggagaagggcctgacccgcaagccgtgggtcaagaccaccctcgccccgggctccaaggtcgtcaccgactacttcgacaaggcggggctcaccccctacctcgacaaggtcggcttcaacctcgtcggctacggctgcaccacctgcatcggtaactccggcccgctgccggaggaggtctccaaggccgtcaacgagcacgacctcgcggtcacctcggtcctctccggcaaccggaacttcgagggccgcatcaaccccgacgtcaagatgaactacctggcctccccgccgctggtcgtcgcctacgcgctcgcgggctccatgaaggtggacatcaccaaggacgcgctgggcatcgaccaggacggcaagccggtctacctggccgacatctggccctccgaggccgaggtcaacgacgtcgtggcgaacgccatcggcgaggacatgttcaacaagtcctaccaggacgtcttcgcgggcgacgcccagtggcaggcgctgccgatcccgaccggcaacaccttcgagtgggacccgcagtccacctacgtccgcaagcccccgtacttcgagggcatggcgcacgagccgtccccggtcaccgacatcaccggtgcccgcgtgctggccaagctgggcgactcggtcaccaccgaccacatctccccggccggcgccatcaaggccgacaccccggccggcaagtacctcaccgagcacggtgtggagcgtcgtgacttcaactcctacggctcgcgccgaggcaaccacgaggtcatgatccgcggcacgttcgccaacatccgcctgcgcaaccagatcgcgccgggcaccgagggcggctacacccgcgacttcacccagccgggcgcgccggtgtcgttcatctacgacgcctcgcgcaactacatcgagcagggcaccccgctggccatcctggccggcaaggagtacggctccggctcgtcccgcgactgggccgccaagggcaccgcgctcctcggcgtcaaggccgtcatcgccgagtcgtacgagcgcatccaccgctcgaacctcatcggcatgggcgtcctgccgctccagttcccggagggcgcgaacgccgagtccctcggcctcaccggcgaggagaccttctccttcaccggcgtcgaggagctcaacaacggcaccaccccgcgcacggtgaaggtcaccaccgacacgggcgtcgagttcgacgcggtcgtccgcatcgacacccccggtgaggccgactactaccgcaacggcggcatcatgcagtacgtgctgcgcagcctgatccgcaagtaa

SEQ ID NO: 66865 - protein, 905 aa, Streptomyces avermitilis MA-4680
MSANSFDARSTLQVGDESYEIFRLDKVEGSARLPYSLKVLLENLLRTEDGANITADHIRSIGNWDSQAQPSQEIQFTPARVIMQDFTGVPCVVDLATMREAVKELGGDPAKINPLAPAELVIDHSVIADKFGTNDAFAQNVELEYGRNKERYQFLRWGQTAFDEFKVVPPGTGIVHQVNIEHLARTVMVRGGQAYPDTLVGTDSHTTMVNGLGVLGWGVGGIEAEAAMLGQPVSMLIPRVVGFKLTGELKPGTTATDLVLTITEMLRKHGVVGKFVEFYGEGVAATSLANRATIGNMSPEFGSTAAIFPIDDETLKYLRLTGRDEQQVALVEAYAKEQGLWLDPAAEPDFSEKLELDLSTVVPSIAGPKRPQDRIVLANAAQQFAQDVRNYVDEVDEAGKESFPASDAPALRPNGAPSRPTLVTAPDGSTYEIDHGAVTVAAITSCTNTSNPYVMVAAALVAKKAVEKGLTRKPWVKTTLAPGSKVVTDYFDKAGLTPYLDKVGFNLVGYGCTTCIGNSGPLPEEVSKAVNEHDLAVTSVLSGNRNFEGRINPDVKMNYLASPPLVVAYALAGSMKVDITKDALGIDQDGKPVYLADIWPSEAEVNDVVANAIGEDMFNKSYQDVFAGDAQWQALPIPTGNTFEWDPQSTYVRKPPYFEGMAHEPSPVTDITGARVLAKLGDSVTTDHISPAGAIKADTPAGKYLTEHGVERRDFNSYGSRRGNHEVMIRGTFANIRLRNQIAPGTEGGYTRDFTQPGAPVSFIYDASRNYIEQGTPLAILAGKEYGSGSSRDWAAKGTALLGVKAVIAESYERIHRSNLIGMGVLPLQFPEGANAESLGLTGEETFSFTGVEELNNGTTPRTVKVTTDTGVEFDAVVRIDTPGEADYYRNGGIMQYVLRSLIRK

SEQ ID NO: 66866 - DNA, 2724 bp, Bacillus cereus ATCC 14579
  CDS (1)..(2724): transl_table=11
atggtcaaacataatccatttcaatcacgtgcaacttttgaagtagatggaaaaacgtatcattattatgatttgaaagcgcttgaaaatgcaggggttggcaacgtatctcaattaccatattccgtgaaagttttacttgaatcagtacttcgtcaagtagacggacgtgtaatcacagaagagcatgttacaaatttagcgaaatggggaacgaaagatgttcaagatatcgatgttccatttaaaccatctcgtgtaattttacaagatttcactggtgttccagctgttgttgatttggcttcgcttcgtaaagcaatggcagacatgggcggagatcctgacaaaattaatcctgaaattactgtagaccttgtaattgaccactctgtacaggttgatagagcgggtacggcagacgcgcttgcattcaacatggacttagagtttaaacgtaatgaagaacgttataaatttttaagctgggcacaaaaatcatttgataactaccgtgcggttccaccagctacaggtattgtacaccaagtaaaccttgaatatttagcaccagttgttcatgctgtgaaaaatgctgaaggtgacttagttgcatacccagattcattagttggaacagactcacatacaacaatgattaacggtatcggcgttcttggatggggcgttggtggtattgaagcagaagcaggaatgcttggacagccttcatacttcccagtacctgaagtaatcggtgtgaaattaactggtacacttccaagtggtactacagcgacagacgttgcattaaaagtaacacaagtattacgtcaaaaaggtgtagttggtaaatttgttgagttcttcggtaatggactaaagagcatgcctttagctgaccgtgcaacaatttcaaatatggcaccagaatacggcgcaacttgtggattcttcccaatcgatgatatttcattagaatacttacgtttaacaggtagagatgaagaacaaattcgcgttgttgaagaatactgtaaagcgaacggtttattctatacagcagacagtaaagatccaatctatactgatcttgttgaaattgatttaaatacaattgaatctaacctttctggaccgaaacgcccacaagatttaattccactttcagatatgaaagatgcgttccacaaagctgttgtagcaccagttggaacacaaggacttggatttaatgagcaagagttcgataaagaagtgaaggttacattagaagataaagaagtaacgatgaaaacaggtgcaattgcaatcgcagcaattacaagctgtacaaatacatcaaacccatacgtattaattggagcaggtctagttgcgaagaaagcaattgaaaaaggacttgtagtacctgagtatgtaaaaacatcattagcaccaggatctaaagttgttactgagtacttagataaatcaggtttaacaacatatttagaccaattaggtttccaaacagttggttacggctgtacgacttgtattggtaactctggtccattagcgccagaattagaagaagcaatcgcagcaaacgacttattagtaacatctgttttatctggtaaccgtaactttgaaggtcgtattcatccacttgtaaaagcgaactacttagcatcaccaccacttgttgtggcatatgcacttgcaggtactgttgatattgacctgaaaaatgatgaaatcggtaaagatgcaaatggtaatgctgtttacttcaacgatatttggccatcagctaaagaaattgaagatgtagttcaaagcgttgttacatctgagctgttcaagaaagaatatgcacaagtatttaatagcaatgagcgttggaatgaaatccaaacttcaaacgaagctttatatacttgggataatgattcaacatacattcaaaacccaccattctttgaaggagtatctaaagaaccaggtgaagttgaaacgttatcaagcttacgcgtagttgggaaatttggtgactctgtaacgacagaccacatttcaccagcaggttcaatcggtaagcacacaccagctggacgctacttattagaaaacggcgtacaaccagttgactttaactcttacggttctcgtcgtggtaaccatgaagttatgatgcgtggtacattcgcgaacatccgtattaaaaaccaaattgcaccaggaacagaaggcggatatacaacatactggccgactggtgaagtaacatcaatctatgatgctgctatgaaatataaagaagatggcacaggtcttctagttgttgctggtaaagattatggtatgggaagttctcgtgactgggctgcgaaaggtactaacttattaggtattaaagcagtaatcgcagaaagcttcgaacgtattcaccgcagtaacttagtgttaatgggtgtattaccacttcaatttaaagatggcgaaagtgctgaaacgttaggtcttgttggtaacgagtcatttgaaattcaaatcgacaaatcagttagaccacgtgatcttgtaaaagtagttgcaactgatttagatggcaacgaaaaacaatttgaagtagtagctcgtttcgatagtgaagttgaaattgattactaccgtcacggtggtattctgcaaatggttcttcgtgagaaaattgaagagtcaaaagtgtcaaactaa

SEQ ID NO: 66867 - protein, 907 aa, Bacillus cereus ATCC 14579
MVKHNPFQSRATFEVDGKTYHYYDLKALENAGVGNVSQLPYSVKVLLESVLRQVDGRVITEEHVTNLAKWGTKDVQDIDVPFKPSRVILQDFTGVPAVVDLASLRKAMADMGGDPDKINPEITVDLVIDHSVQVDRAGTADALAFNMDLEFKRNEERYKFLSWAQKSFDNYRAVPPATGIVHQVNLEYLAPVVHAVKNAEGDLVAYPDSLVGTDSHTTMINGIGVLGWGVGGIEAEAGMLGQPSYFPVPEVIGVKLTGTLPSGTTATDVALKVTQVLRQKGVVGKFVEFFGNGLKSMPLADRATISNMAPEYGATCGFFPIDDISLEYLRLTGRDEEQIRVVEEYCKANGLFYTADSKDPIYTDLVEIDLNTIESNLSGPKRPQDLIPLSDMKDAFHKAVVAPVGTQGLGFNEQEFDKEVKVTLEDKEVTMKTGAIAIAAITSCTNTSNPYVLIGAGLVAKKAIEKGLVVPEYVKTSLAPGSKVVTEYLDKSGLTTYLDQLGFQTVGYGCTTCIGNSGPLAPELEEAIAANDLLVTSVLSGNRNFEGRIHPLVKANYLASPPLVVAYALAGTVDIDLKNDEIGKDANGNAVYFNDIWPSAKEIEDVVQSVVTSELFKKEYAQVFNSNERWNEIQTSNEALYTWDNDSTYIQNPPFFEGVSKEPGEVETLSSLRVVGKFGDSVTTDHISPAGSIGKHTPAGRYLLENGVQPVDFNSYGSRRGNHEVMMRGTFANIRIKNQIAPGTEGGYTTYWPTGEVTSIYDAAMKYKEDGTGLLVVAGKDYGMGSSRDWAAKGTNLLGIKAVIAESFERIHRSNLVLMGVLPLQFKDGESAETLGLVGNESFEIQIDKSVRPRDLVKVVATDLDGNEKQFEVVARFDSEVEIDYYRHGGILQMVLREKIEESKVSN

SEQ ID NO: 66868 - DNA, 2706 bp, Rhodopirellula baltica SH 1
  CDS (1)..(2706): transl_table=11
gtgactgcggatatcttcggcgcacgcgaacaatttgaaaccggatccggctctgcagcgatgtatcgcttggaggcgctccagaaacgaggcttggggcaaattgaccgtttgccgttttcgattcgcgtgctgttggaagccgtgctgcggaactgcgacggtttccaaatcagtgaggacgacgtcaagaacctcgccggttgggacgcgaaagcggttgctcctcacgaggtgccgttcaaaccttatcgcgttgtcttgcaggatttcacgggcgttcccgctgtggtcgacttggccgcgatgcgttccgcgatggaacgaatcgggggcgatccgaacaagatcaacccgctgatccccgtcgacctggtcatcgaccactcggtgcaagtcgacttctttggcagcgaaggcgcgttggttcaaaatgtcgagcgtgaattcgaacgcaacaaggaacgctacgagttcctccgttggggccaacaagcgttcgacaacttcggcgtggttcctcctaatgttgggatcgttcaccaagtcaacctggaatacctcgctcgcgtcgttgccatgggcaaagacgagcaaggccccgtggcgatgcccgacacattggtcggtactgattcgcacacgaccatgatcaatggtttgggtgttttgggatggggcgttggaggcatcgaagccgaagccaacatgctcggccaaccgctttacatgttgatgcccgaagtcatcgggttcgaactgaccggtgaattgccttccggagcgaccgcgacggacatggtgttgcgagtcgtcgaaatcttgcgagccgaaggcgtggtgggcaagttcgtggaattcttcgggaccggcatgaacgcgatgagcgtcgctgaccgagccacgatcgcgaacatggcacccgagtacggtgcgacgatgggattcttcccggtcgatgatctgacgctgcattacatgcgtcaaaccggccgcagcaaggaaaacgtcgagctggtcgaacgttactgcaaagaacagggtttgttccgtctcgatgacggccccgcattgaactacaccaagaccgtgtcgctcgatttgtcgacggttgaacccagcatggctggaccgaaacgtccgcaagatcgtgtgccgttggcatcgatgaagaaagcgttcaacgaatcgttgacggctcccgttggtgcctccggattcggtctcgctcccgaagctctcagccgcaccggtcacgtctccaacaacggtgccagcaccgacatcacgcatggtgccgtcgtgattgctgcgatcacatcttgcacgaacacgtccaacccatcggtgatggttggtgccggattgctggccaagaaggcagcggaacgcggattgaccgtgccgtctcacgtcaaaacatcgttggcccctggttcgcgagtcgtgacggattacttgaacaaagctggtctgtccgaatcgctcgacaagcttggtttcaacactgttggctatggttgcacgacctgcatcggtaactccggacctctgccagaacccgttgccgcggccatccaagaaggcgacttgatcgcatcagcggtcctgtccggcaaccggaactttgagggccgggtcaatccgctgaccaaagccaactacttggccagcccaccgttggtcgttgcttacgctttggcgggaacgacagacattgatttgaacaccgaaccgctgggcaaagacaccaacggcgaagacgtttacttgaaggatgtgtggccatcggccgaagaaattcgcgaaaccatcgcggcttgcattcagcccgaaatgttcaccaacgaatacgaagccgccgtgtcgggcaacgacatgtggaacgccattgaagcggctggcggagcgttgtacccgtgggacgaaaagagcacctacattcaccacccaccattcttggacagtgtcaccgcggaagcggtgccggacatcgctccgatcaagggtgcgaaggtgttggcattgctgggcgattcggtcacgaccgaccacatttcgcctgccggtgcgatcgcgaccgacggacctgcgggccgttacctgcaagaaaacggtgtgccgattcgcgaattcaactcgttcggttcgcgtcgtgggaacgaccgagtgatggtgcgtggaacgttcgcgaacattcgcattcgcaatcaactggcacccggcaccgaaggcggcgtgacgcgatacctgccgactggtgaaacgatgagcatctacgatgcttcgatgaagtaccaagccgacaatgtgccattggttgtcttggctggcaaggaatacggaaccggcagtagtcgtgactgggccgccaagggaacgatgatgttgggtgtcaaagccgtcatcacgaccagcttcgaacggatccaccgcagcaacttggtcgggatgggagtgttgcctttggaattcgccgatggcggttcgtggcaatcactcggtttgaccggtgaggaaagctatgacatcgacggcttgtccaatgacctcgagcctcgttcgttgatcaccgttgtcgccacggcggaagacggcaagaagaccgagttcgagtgccgcgttcgcatcgatacgccagttgaattgcagtactaccagaacggtgggatcctcccaacggttctgcgaaaccttcgcggttga

SEQ ID NO: 66869 - protein, 901 aa, Rhodopirellula baltica SH 1
MTADIFGAREQFETGSGSAAMYRLEALQKRGLGQIDRLPFSIRVLLEAVLRNCDGFQISEDDVKNLAGWDAKAVAPHEVPFKPYRVVLQDFTGVPAVVDLAAMRSAMERIGGDPNKINPLIPVDLVIDHSVQVDFFGSEGALVQNVEREFERNKERYEFLRWGQQAFDNFGVVPPNVGIVHQVNLEYLARVVAMGKDEQGPVAMPDTLVGTDSHTTMINGLGVLGWGVGGIEAEANMLGQPLYMLMPEVIGFELTGELPSGATATDMVLRVVEILRAEGVVGKFVEFFGTGMNAMSVADRATIANMAPEYGATMGFFPVDDLTLHYMRQTGRSKENVELVERYCKEQGLFRLDDGPALNYTKTVSLDLSTVEPSMAGPKRPQDRVPLASMKKAFNESLTAPVGASGFGLAPEALSRTGHVSNNGASTDITHGAVVIAAITSCTNTSNPSVMVGAGLLAKKAAERGLTVPSHVKTSLAPGSRVVTDYLNKAGLSESLDKLGFNTVGYGCTTCIGNSGPLPEPVAAAIQEGDLIASAVLSGNRNFEGRVNPLTKANYLASPPLVVAYALAGTTDIDLNTEPLGKDTNGEDVYLKDVWPSAEEIRETIAACIQPEMFTNEYEAAVSGNDMWNAIEAAGGALYPWDEKSTYIHHPPFLDSVTAEAVPDIAPIKGAKVLALLGDSVTTDHISPAGAIATDGPAGRYLQENGVPIREFNSFGSRRGNDRVMVRGTFANIRIRNQLAPGTEGGVTRYLPTGETMSIYDASMKYQADNVPLVVLAGKEYGTGSSRDWAAKGTMMLGVKAVITTSFERIHRSNLVGMGVLPLEFADGGSWQSLGLTGEESYDIDGLSNDLEPRSLITVVATAEDGKKTEFECRVRIDTPVELQYYQNGGILPTVLRNLRG

SEQ ID NO: 66870 - DNA, 2706 bp, Bordetella pertussis Tohama I
  CDS (1)..(2706): transl_table=11
atgccgcacaatacgttcgacactctcaagactttcaagatcggcaagaaaacctgtcagttctattcgctgccggccctgggcaaggccctgggcgtggatgtacagcgcttgccggtgtccatccgcatcgtgctcgaatcggtgctgcgcaactgtgacggcgccaaggtcacgcaagagcacgtgcgccaattggccaactggcaggccaacgccaagcgcgaggacgagatccccttcgtggtggcgcgggtggtgctgcaggacttcaccggcgtgccgctgctggccgatatcgccgccatgcgttcggtggctgccaagatgggcaaggaccccaagcgcatcgagccgctggtgccggtggacctggtggtggaccactcggtcatgatcgattacttcggcaccaagaacgcgctcgacctgaacatgaagctggagttccagcgcaaccgcgagcgctaccagttcatgaagtggggcatgcaggccttcgacaccttcggcgtggtgcccccgggcttcggcatcgtgcaccaggtcaacctcgagtacctggcgcgcggcgtgcaccgtgacaagaacaacgacgtctactaccccgactcgctggtgggcaccgacagccacaccaccatgatcaacggcatcggcgtggtcggctggggcgtgggcggcatcgaggccgaggccggcatgctgggccagccggtctatttcctgacgccggacgtggtcggcgtggagctcaagggcaagctgcgcggcggcgtgacagccaccgacctggtgctgaccatcaccgagatgctgcgccgcgagaaggtcgtgggcaagttcgtcgaattctgcggcgaaggcaccgccagcctgtcggtcaccgaccgggccaccatcggcaacatggcgcccgagtacggcgcgaccatgggctttttcccggtcgacgaacgcaccatcgattacttcgaaggcaccggccgcacggccgaggaaatcgccgccctcgaggcctatttcaaggcgcagaagatgttcggcgtgcccaaggccaaggacatcaactacaccaagctgctgacgctggacctgggcaccgtggcgccgtcgctggccggccccaagcgcccgcaggaccgcatcgagatcggcaacgtcaagaacaccttcaccgagctgttctccaagcccatcgccgaaaacggcttcaaccagccggccgacaagctgcaccaggcctacacgaccagcgccggcaccaaggtcaagaacggcgacatcctgatcgccgccatcacgtcgtgcaccaacacgtcgaaccccagcgtgctgctggccgccggcctgctggccaagaaggcggtcgaggccggcctgaaggtgcccaagcacatcaagacctcgctggcgcccggatcgcgcgtggtcacggaatacctgaccaagaccggcctgctgccctatctcgagaagctgggcttcgacgtggcggcctacggctgcaccacctgcatcggcaacgcgggcgacctgaccgccgacctgaacgaagccatcctgggcaacgacctggtgtgctcggccgtgctgtcgggcaaccgcaacttcgaggcccgcatccacccgaacatcaaggccaacttcctggcctcgccgccgctggtggtggcgtacgcgctggccggcacggtcacgcgcgacctgatgaccgagccggtgggccgcggcaagaacggcgacgtgtggctgggcgacatctggccgagcagcgaggagatccaggcgctgctcaagttcgccatgaatccgaccgccttcaaggaaaactacagccaggtcaagagcaaccccggcaagctgtgggagaacatcaagggcgtgacgggcgagacctataactggcccgaatcgacctacatcgccgaaccgccgttcttcgaaggctttggaatgacgcccgccgccatgccggcggtcaagggcgcgcgcgcgctgggcatcttcggcgactcggtgaccaccgaccacatctcgccggccggctccatcaaggagacctcgccggccggcaagtggctcaaggagaacggcgtgatgaaggccgacttcaacagctacggttcgcggcgcggcaaccacgagatcatgatgcgcggcacgttcgccaacgtgcgcatcaagaacctcatgatcccggcccgtccggacggcagccgcttcgaaggcggcgagacgctgttccagcccaccggcgagcagatgtcgatctacgacgccgccatgaagtacgtggcgcaaggcacgtcctcggtcgtgttcggcggcgaggagtacggcaccgggtcgtcgcgcgactgggccgccaagggaacgcagctgctgggcgtgaaggccgtgatcgcgcgcagcttcgagcgcatccaccgcagcaacctggtgggcatgggcgtgctgccgctgcagttcaagggcagcgacagcgcgcagtcgctgggcatcgtgggcaacgagacgttcgacgtcacgggcctggagggcggcatcaagccgatgcaggacgtcaccctgacgatccaccgcgccgacggctcgcgccaggacgtgacggtgctgctgcgcatcgacacgcccatcgaggtcgattactaccagcacggcggcatcctgccgttcgtactgcgccagttgctggccgcctga

SEQ ID NO: 66871 - protein, 901 aa, Bordetella pertussis Tohama I
MPHNTFDTLKTFKIGKKTCQFYSLPALGKALGVDVQRLPVSIRIVLESVLRNCDGAKVTQEHVRQLANWQANAKREDEIPFVVARVVLQDFTGVPLLADIAAMRSVAAKMGKDPKRIEPLVPVDLVVDHSVMIDYFGTKNALDLNMKLEFQRNRERYQFMKWGMQAFDTFGVVPPGFGIVHQVNLEYLARGVHRDKNNDVYYPDSLVGTDSHTTMINGIGVVGWGVGGIEAEAGMLGQPVYFLTPDVVGVELKGKLRGGVTATDLVLTITEMLRREKVVGKFVEFCGEGTASLSVTDRATIGNMAPEYGATMGFFPVDERTIDYFEGTGRTAEEIAALEAYFKAQKMFGVPKAKDINYTKLLTLDLGTVAPSLAGPKRPQDRIEIGNVKNTFTELFSKPIAENGFNQPADKLHQAYTTSAGTKVKNGDILIAAITSCTNTSNPSVLLAAGLLAKKAVEAGLKVPKHIKTSLAPGSRVVTEYLTKTGLLPYLEKLGFDVAAYGCTTCIGNAGDLTADLNEAILGNDLVCSAVLSGNRNFEARIHPNIKANFLASPPLVVAYALAGTVTRDLMTEPVGRGKNGDVWLGDIWPSSEEIQALLKFAMNPTAFKENYSQVKSNPGKLWENIKGVTGETYNWPESTYIAEPPFFEGFGMTPAAMPAVKGARALGIFGDSVTTDHISPAGSIKETSPAGKWLKENGVMKADFNSYGSRRGNHEIMMRGTFANVRIKNLMIPARPDGSRFEGGETLFQPTGEQMSIYDAAMKYVAQGTSSVVFGGEEYGTGSSRDWAAKGTQLLGVKAVIARSFERIHRSNLVGMGVLPLQFKGSDSAQSLGIVGNETFDVTGLEGGIKPMQDVTLTIHRADGSRQDVTVLLRIDTPIEVDYYQHGGILPFVLRQLLAA

SEQ ID NO: 66872 - DNA, 2694 bp, Bordetella pertussis Tohama I
  CDS (1)..(2694): transl_table=11
gtgccgcgccgggtccgccatgccggcccggcgcggccggcccggcccccgcagccccgctttccggcctgcctgcatgcccatagagacacgcctgtcatgaacacgaaataccgcaagaatctgcccggtacgtcgctggactatttcgacgcccgccaggcggtcgaagacctccaggccggcgcctgggccacgctgccctatacctcgcgcgtcctggccgagaatctggtgcgccgctgcgaccccgccacgctgtccgactcgctgcggcagctgatcgagcgccgccgcgacatggacttcccctggtaccctgctcgcgtggtgtgccacgacatcctgggccagacggcgctggtcgacctggccggcctgcgcgacgcgattgccgacgccggcggcgacccggcgcagatcaacccggtggtgcccacgcaactcatcgtggaccactctctggcggtcgagtacccgggcttcgacaaggacgccttcgagaagaaccgcgcggtggaagaccggcgcaacgaagaccgcttccacttcatcaactggaccaagctggccttccgcaacgtggatgtgatcccgccgggcaacggcatcatgcaccagatcaacctggagaagatgtctccggtggtgcaagtgcgcgacggcatggcctttccggacacctgcgtgggcaccgacagccacaccccgcacgtcgacgccctgggcgtgatcgccatcggcgtgggcggcctggaggccgaaaacgtgatgctcgggcgcgcttcctggatgcgcctgccggacatcgtcggcgtggagctgaccggccggccgcaagccggcattacctgcaccgacatcgtgctggcgctgaccgaattcctgcgccgcgaaaaggtggtgggcgcctacctcgaattcctgggcgaaggcgccagcgcgctgaccatcggcgaccgcgccacgatttccaacatgaccccggaattcggggcgacggccgcgatgttctatatcgacggccagaccaccgactacctcaccctgaccggccgcgaagacagccaggtcaagctggtggaaacctatgccaggcaggccggactgtgggccgacgacctggcgggcgcgcagtacgaacgcatgctgcgcttcgacctgtcgtcggtcgtgcgcaacatggccggcccctccaacccgcacaagcgggtggccaccaccgaactggccgaacgcggcattgccgggccgtggcaggaaacgccgggacagatgcccgacggcgcggtgatcatcgccgccatcaccagctgcaccaacaccagcaacccgcgcaacgtcatcgccgccgcgctgctggcgcgcaacgccaaccgcgccggcctgacgcgcaagccgtgggtcaagagctcgctggcgccgggctcgaaggcggtccagctttacctggaagaagccggcctgctgcccgacctggaaaaactgggtttcggcatcgtggctttcgcctgcacgacctgtaacggcatgagcggcgcgctcgacccgaagatccagcaggaaatcatcgagcgcgatctctatgccaccgccgtgctgtcgggcaaccgcaacttcgacggccgcatccacccgtacgccaagcaggccttcctggcatcgccgccgctggtgatcgcctacgccatcgccggcaccgtgcgcttcgacatcgagaaggacgcgctaggcgtggacgccgcgggcaagcccgtgacgctcaaggacatctggcccagcgatgcggaaatcgatgcggtggtgacggccagcgtcaagcccgagcagttccgcaaggtctacgagccgatgttccgcttcgcgcaggaacagaccggcaagatcgatccgctctacgcctggcgcccgcaaagcacctacatccgccgcccgccctattgggaaggcgcgctggccggggagcgcacgctcgagggcatgcgcccgctggccgtactgggcgacaacatcaccaccgaccacctctcgccatccaacgccatcatggccgatagcgcggcgggcgagtacctggccaagatgggcctgccggaagaggatttcaactcgtacgccacccaccgcggcgaccacctgaccgcgcagcgcgccaccttcgccaatccgaagctgatcaacgaaatggccgtggtcgacggccaggtcaagcaaggctcgctcgcgcggctggagcccgagggcaaggtcatgcgcatgtgggaaaccatcgaaacctacatggaccgcaagcagccgctgatcatcatcgccggcgccgattacggccagggctcgtcgcgcgactgggcggccaagggcgtgcggctggccggcgtggaggccatcgtcgccgagggcttcgagcgcatccaccgcaccaacctgatcggcatgggcgtgctgccgctggagttccaggcgggcgtcgatcgcaagacgctgggcatcgacggcaccgaaacctttgatgtcgtcggcgaacgcgtgccgcgcgccacgctgacgctggtcatacaccgccgcgacggcgagcaagtgcaagtgccggtcatctgtcgcctggacaccgccgaggaagtctcgatctacgaggctggcggcgtgctgcagcgatttgcccaggatttcctggagtccacgcagacggcctga

SEQ ID NO: 66873 - protein, 897 aa, Bordetella pertussis Tohama I
MPRRVRHAGPARPARPPQPRFPACLHAHRDTPVMNTKYRKNLPGTSLDYFDARQAVEDLQAGAWATLPYTSRVLAENLVRRCDPATLSDSLRQLIERRRDMDFPWYPARVVCHDILGQTALVDLAGLRDAIADAGGDPAQINPVVPTQLIVDHSLAVEYPGFDKDAFEKNRAVEDRRNEDRFHFINWTKLAFRNVDVIPPGNGIMHQINLEKMSPVVQVRDGMAFPDTCVGTDSHTPHVDALGVIAIGVGGLEAENVMLGRASWMRLPDIVGVELTGRPQAGITCTDIVLALTEFLRREKVVGAYLEFLGEGASALTIGDRATISNMTPEFGATAAMFYIDGQTTDYLTLTGREDSQVKLVETYARQAGLWADDLAGAQYERMLRFDLSSVVRNMAGPSNPHKRVATTELAERGIAGPWQETPGQMPDGAVIIAAITSCTNTSNPRNVIAAALLARNANRAGLTRKPWVKSSLAPGSKAVQLYLEEAGLLPDLEKLGFGIVAFACTTCNGMSGALDPKIQQEIIERDLYATAVLSGNRNFDGRIHPYAKQAFLASPPLVIAYAIAGTVRFDIEKDALGVDAAGKPVTLKDIWPSDAEIDAVVTASVKPEQFRKVYEPMFRFAQEQTGKIDPLYAWRPQSTYIRRPPYWEGALAGERTLEGMRPLAVLGDNITTDHLSPSNAIMADSAAGEYLAKMGLPEEDFNSYATHRGDHLTAQRATFANPKLINEMAVVDGQVKQGSLARLEPEGKVMRMWETIETYMDRKQPLIIIAGADYGQGSSRDWAAKGVRLAGVEAIVAEGFERIHRTNLIGMGVLPLEFQAGVDRKTLGIDGTETFDVVGERVPRATLTLVIHRRDGEQVQVPVICRLDTAEEVSIYEAGGVLQRFAQDFLESTQTA

SEQ ID NO: 66874 - DNA, 2694 bp, Bordetella parapertussis 12822
  CDS (1)..(2694): transl_table=11
gtgccgcgccgggtccgccatgccggcccggcgcggccggcccggcccccgcagccccgctttccggcctgcctgcatgcccatagagacacgcctgtcatgaacacgaaataccgcaagaatctgcccggtacgtcgctggactatttcgacgcccgccaggcggtcgaagacctccaggccggcgcctgggccacgctgccctatacctcgcgcgtcctggccgagaacctggtgcgccgctgcgaccccgccacgctgtccgactcgctgcggcagctgatcgagcgccgccgcgacatggacttcccctggtaccccgctcgcgtggtgtgccacgacatcctgggccagacggcgctggtcgacctggccggcctgcgcgacgcgattgccgacgccggcggcgacccggcgcagatcaacccggtggtgcccacgcaactcatcgtggaccactcgctggcggtcgagtacccgggcttcgacaaggacgccttcgagaagaaccgcgcggtggaagaccggcgcaacgaagaccgcttccacttcatcaactggaccaagctggccttccgcaacgtggacgtgatcccgccgggcaacggcatcatgcaccagatcaacctggagaagatgtctccggtggtgcaagtgcgcaacggcgtggcctttccggacacctgcgtgggcaccgacagccacaccccgcacgtcgacgccctgggcgtgatcgccatcggcgtgggcggcctggaggccgaaaacgtgatgctcggacgcgcttcctggatgcgcctgccggacatcgtcggcgtggagctgaccggccggccgcaagccggcattacctgcaccgacatcgtgctggcgctgaccgaattcctgcgccgcgaaaaggtggtgggcgcctacctcgaattcctgggcgaaggcgccagcgcgctgaccatcggcgaccgcgccacgatttccaacatgaccccggaattcggggcgacggccgcgatgttctatatcgacggccagaccaccgactacctcaccctgaccggccgcgaagacagccaggtcaagctggtggaaacctatgccaggcaggccggactgtgggccgacgacctggcgggcgcgcagtacgaacgcatgctgcgcttcgacctgtcgtcggtcgtgcgcaacatggccggcccctccaacccgcacaagcgggtggccaccaccgaactggccgaacgcggcattgccgggccgtggcaggaaacgccgggacagatgcccgacggcgcggtgatcatcgccgccatcaccagctgcaccaacaccagcaacccgcgcaacgtcatcgccgccgcgctgctggcgcgcaacgccaaccgcgccggcctgacgcgcaagccgtgggtcaagagctcgctggcgccgggctcgaaggcggtccagctttatctggaagaagccggcctgctgcccgacctggaaaaactgggtttcggcatcgtggctttcgcctgcacgacctgtaacggcatgagcggcgcgctcgacccgaagatccagcaggaaatcatcgagcgcgatctctatgccaccgccgtgctgtcgggcaaccgcaacttcgacggccgcatccacccgtacgccaagcaggccttcctggcatcgccgccgctggtgatcgcctacgccatcgccggcaccgtgcgcttcgacatcgagaaagatgcgctgggcgtggacgccgcgggcaagcccgtgacgctcaaggacatctggcccagcgatgcggaaatcgatgcggtggtgacggccagcgtcaagcccgagcagttccgcaaggtctacgagccgatgttccgcttcgcgcaggaacagaccggcaagatcgatccgctctacgcctggcgcccgcaaagcacctacatccgccgcccgccctattgggaaggcgcgctggccggggagcgcacgctcgcgggcatgcgcccgctggccgtgctgggcgacaacatcaccaccgaccacctctcgccatccaacgccatcatggccgatagcgcggcgggcgagtacctggccaagatgggcctgccggaagaggatttcaactcgtacgccacccaccgcggcgaccacctgaccgcgcagcgcgccaccttcgccaatccgaagctgatcaacgaaatggctgtggtcgacggccaggtcaagcaaggctcgctcgcgcggctggagcccgagggcaaggtcatgcgcatgtgggaaaccatcgaaacctacatggaccgcaagcaaccgctgatcatcatcgccggcgccgattacggccagggctcgtcgcgcgactgggcggccaagggcgtgcggctggccggcgtggaggccatcgtcgccgagggcttcgagcgcatccaccgcaccaacctgatcggcatgggcgtgctgccgctggagttccaggcgggcgtcgatcgcaagacgctgggcatcgacggcaccgaaacctttgatgtcgtcggcgaacgcgtgccgcgcgccacgctgacgctggtcatacaccgccgcgacggcgagcaagtgcaagtgccggtcatctgtcgcctggacaccgccgaggaagtctcgatctacgaggctggcggcgtgctgcagcgatttgcccaggatttcctggaggccacgcagacggcctga

SEQ ID NO: 66875 - protein, 897 aa, Bordetella parapertussis 12822
MPRRVRHAGPARPARPPQPRFPACLHAHRDTPVMNTKYRKNLPGTSLDYFDARQAVEDLQAGAWATLPYTSRVLAENLVRRCDPATLSDSLRQLIERRRDMDFPWYPARVVCHDILGQTALVDLAGLRDAIADAGGDPAQINPVVPTQLIVDHSLAVEYPGFDKDAFEKNRAVEDRRNEDRFHFINWTKLAFRNVDVIPPGNGIMHQINLEKMSPVVQVRNGVAFPDTCVGTDSHTPHVDALGVIAIGVGGLEAENVMLGRASWMRLPDIVGVELTGRPQAGITCTDIVLALTEFLRREKVVGAYLEFLGEGASALTIGDRATISNMTPEFGATAAMFYIDGQTTDYLTLTGREDSQVKLVETYARQAGLWADDLAGAQYERMLRFDLSSVVRNMAGPSNPHKRVATTELAERGIAGPWQETPGQMPDGAVIIAAITSCTNTSNPRNVIAAALLARNANRAGLTRKPWVKSSLAPGSKAVQLYLEEAGLLPDLEKLGFGIVAFACTTCNGMSGALDPKIQQEIIERDLYATAVLSGNRNFDGRIHPYAKQAFLASPPLVIAYAIAGTVRFDIEKDALGVDAAGKPVTLKDIWPSDAEIDAVVTASVKPEQFRKVYEPMFRFAQEQTGKIDPLYAWRPQSTYIRRPPYWEGALAGERTLAGMRPLAVLGDNITTDHLSPSNAIMADSAAGEYLAKMGLPEEDFNSYATHRGDHLTAQRATFANPKLINEMAVVDGQVKQGSLARLEPEGKVMRMWETIETYMDRKQPLIIIAGADYGQGSSRDWAAKGVRLAGVEAIVAEGFERIHRTNLIGMGVLPLEFQAGVDRKTLGIDGTETFDVVGERVPRATLTLVIHRRDGEQVQVPVICRLDTAEEVSIYEAGGVLQRFAQDFLEATQTA

SEQ ID NO: 66876 - DNA, 1938 bp, Gloeobacter violaceus PCC 7421
  CDS (1)..(1938): transl_table=11
atgaatctgacctgtaaaatcttgcaagcccacctgatgagcggcgaattgcggccaggctccgaaatcggcatccgcatcgaccagacactgacccaggatgccaccggcacgatggcctatctacagttcgaagcgatgggattgccgcgggtgcgcacgaagctgtcggtttcctacatcgaccacaacatgttgcagacgggcttcgagaacgccgacgatcatcgctatttgcagtcggtgggtcagaaatacggcatcgtcttctcgcgcccgggcaacggcatctgccaccaggtgcaccgcgagcgcttcgcggtgcccgctcagacgctgctgggttccgattcgcacacgcccacctgcggcggcctcggcatgctcgccatcggcgcgggcgggctcgacgtggcggtggcgatggcgggcgagccttactttattccgatgccgaaggtgctgggggtaagactgaccggcaccctgcagccctggtgctcgggcaaggacgtcatcttggagatgctccggcggctcaccgtcaagggcggcaccggccgcatcgtcgaatataccggtccgggggtcgcctcgctgagcgtctcccatcgcttcacgatcaccaacatgggtgccgaactcggggcaaccaccagtgtctttccttccgacgaagtcacccatcgcttcctggccgcccagggccgcgaaggcgactgggtgcccctcgccgccgatccggacgccacctacgacgaaacggtcgaaatcgacctcgacaccctggagccgctgaccgcctgtccctccagccccgacaacgtcgtgagcgtgcgcgcagtggcggggacacccgtggtgcaggtgtgcatcggctcgtgcaccaactccagctacgaagatctggccaccgccgcgctgttgctgcgcggcaggcgcgtgcatccgaacgtctcgatgacggtcaccccgggttccaagcaggtcttcgagatgatcgtccgcgacggctatttcgcggacttgattgccgccggttgccgcattctcgaatcggcctgcgggccgtgcatcggcatgggtcaggcccctcccaccggcggtgtctcggtgcgcagcttcaaccgcaacttcaagggccgctccggcaccgccgacgatctggtctatctggcgagccccgaagtctgcgtcgcctgtgccctcaccggcgagatcaccgacccgcgcacgctgggcatcgatccgattgccatggccacccccgggcagttcctcatcaacgacaacatgctcgtcttcccgcccgccgacggcaaagacgtcgaggtgctgcgcggtcccaacatcaagccggtgccgcttggcgaaccgcccaccgctacgctggaggcgcccgttttattgaaactgggggacaatatttccaccgaccacatcatgccggcgggggccaaggttttgcctttgcgctccaatatcccggccatcgccgagttcgtctttatgcgcgtcgatccgacttttcctgagcgcgcccgggccgccggcccttcgttggtcgtgggcgggagcaactacggccagggttcctcgcgcgaacacgccgccctcgccccgatgtacctgggcgtgcgggcggtgatcgtcaagtccttcgcccgcatccaccgcgccaacttgatcaacttcggcatcctgccgctcacctttgcggacgaggccgaccacgacggggtcgatcaaggcgaccagttgcgcctcgaagggattgccgagggtctgacgaccggccacttcaccgtcgccaacctcaccaagggcacgaacttccgggccgacgcccagctcaccgagcgcgagcgcgaagtgatcctggcgggcggtctgctcaacaagatcaaaagcgaaaagaccgagacggcggcggtataa

SEQ ID NO: 66877 - protein, 645 aa, Gloeobacter violaceus PCC 7421
MNLTCKILQAHLMSGELRPGSEIGIRIDQTLTQDATGTMAYLQFEAMGLPRVRTKLSVSYIDHNMLQTGFENADDHRYLQSVGQKYGIVFSRPGNGICHQVHRERFAVPAQTLLGSDSHTPTCGGLGMLAIGAGGLDVAVAMAGEPYFIPMPKVLGVRLTGTLQPWCSGKDVILEMLRRLTVKGGTGRIVEYTGPGVASLSVSHRFTITNMGAELGATTSVFPSDEVTHRFLAAQGREGDWVPLAADPDATYDETVEIDLDTLEPLTACPSSPDNVVSVRAVAGTPVVQVCIGSCTNSSYEDLATAALLLRGRRVHPNVSMTVTPGSKQVFEMIVRDGYFADLIAAGCRILESACGPCIGMGQAPPTGGVSVRSFNRNFKGRSGTADDLVYLASPEVCVACALTGEITDPRTLGIDPIAMATPGQFLINDNMLVFPPADGKDVEVLRGPNIKPVPLGEPPTATLEAPVLLKLGDNISTDHIMPAGAKVLPLRSNIPAIAEFVFMRVDPTFPERARAAGPSLVVGGSNYGQGSSREHAALAPMYLGVRAVIVKSFARIHRANLINFGILPLTFADEADHDGVDQGDQLRLEGIAEGLTTGHFTVANLTKGTNFRADAQLTEREREVILAGGLLNKIKSEKTETAAV

SEQ ID NO: 66878 - DNA, 2676 bp, Photorhabdus luminescens subsp. laumondii TTO1
  CDS (1)..(2676): transl_table=11
atgtcgtttgatttaaaaaaagtttgtgtttcaacactttccgctgcaagtaaacaatatgattattacagcttaccactggttgctaaacatttgggtgatatttcccgtttgcccaaatcactgaaagttcttctggaaaatcttcttcgcaatatcgatggcaattctgttgttgttgatgatttgaaagcaattgttgattggcaaaatactggtcatgcagacagagaaattgcttaccggccagcacgtgtattaatgcaggatttcaccggggtgcctgccgttgttgatttagcggccatgagagaagcggttcagcgccttggtggtaatgttgaacaagttaatccactatcacccgttgatttggttattgaccattcagttatggtggataaatttggcacggaaaaagcctttgaacaaaatgttcaattagaaatggaacgtaattacgagcgttatctctttctgcgttgggggcaaaaagcttttaaccgttttcgtgttgtcccgcccggaaccgggatttgccatcaggtaaacctggaatacctgggtaaaacggtttggcatgaaatgcataacggacgagagttggcttatcctgataccttggttggtaccgattctcataccaccatgatcaatggtctcggtgttctaggatggggtgtgggcggtattgaagctgaagcggccatgttaggacaacctgtttccatgcttattcctgatgtggtgggttttaaacttaccggtaaattacgcgaaggaattactgcaacagaccttgtattgacagtgactcagatgctgcgtgcccatggtgtggtcgggaaatttgttgaattttatggagatgggttagctgatttgccgctggcagacagggcaaccattgccaatatgtcaccggaatatggtgcaacttgcggtttcttcccggcagatggtattaccctgagctatatgcgattgacagggcgtacagaacagcagattgagctggtagaagcttattgtaagatccaaggattatggcgaaatcccggtgatgaaccggtatttaccagtagtcttgaactggacatgtcgacggtggaagcgagcctcgctggaccgaaacgtccacaagacagggtggctttagcgcgagtacctcaagtatttcaatcatccgttgatctagaaatgaataaatcccaggggaaagccatctcagcgccagttaatctggataaccagaagtatgagttagaagagggggctgttgtcattgctgcaattacttcttgtaccaacacatctaatcccagcgtactaatggctgcggggttgttggcgaaaaaagcggttgagaaggggcttaaacgccaaccgtgggtgaaaacctcactggcgcccggctcgaaagtggtgacagattaccttgaattggcgggcttgatgccttatctggaggaactgggcttcaatctggtgggttacggttgcacaacttgcattggtaactctgggccattacctgaatctattgaaacggcgattaagcaagctgatcttaccgtcggtgccgtcctttctggcaaccgaaactttgaaggccgtatccatcctctgataaaaactaactggctagcgtcgccgccgttagttgtggcatatgctttatccggcaacatgaaaaaggatttgactaaagatcctcttggtcaggatcaacaaggcaatgatgtctatttgaaggatatatggcctgatagcaaagaaattgctaaagctgttgagcaaattaaggcggatatgtttcacaaagagtatgcggaagtctttgatggtgatgaaacatggcaatcgctggatgttgcgagttctgcaacttatcacttccagcttgattctacttatattcgccacccgccattctttagtgagatgaccgcagaaccagaagcgataacggatattcacggcgcgaatatattggctattcttggggattctgtcaccacagaccatatttctccggcggggaatatcaaagctgacagtccggcagggcgttatcttcaagaacatggcgttgaacctaaagattttaactcctacggttcaaggcgcggtaatcatgaagtcatgatgcgtggaacgtttgccaatatccgtatccgtaatgagatgattgctggtgtggaaggaggatatacccgccatattccgtcacagacacaattagcgatttatgatgcggctatgcgttatcaggaagaaaaaaccccattggctatcattgcgggcaaagaatatggttccggttcgagccgcgactgggcagcgaaggggactcggttattgggcgttagagtggtgattgcggaatcatttgagcgtattcaccgttcgaacctgattggtatgggcgtattaccattggaatttcctcaaggcgtaaatcgtaagacattaaatctgcaaggtgatgagacaattgatattgaagggatgaataacctcaagccgggacaaattgtaccggtgaaaatgacttattcggatgggcatcaggagatcattaatgctcagtgtcgtattgataccaaaactgaattagattatttccaccacggtggtatcttgcactatgttattcgtcacatgttgaaataa

SEQ ID NO: 66879 - protein, 891 aa, Photorhabdus luminescens subsp. laumondii TTO1
MSFDLKKVCVSTLSAASKQYDYYSLPLVAKHLGDISRLPKSLKVLLENLLRNIDGNSVVVDDLKAIVDWQNTGHADREIAYRPARVLMQDFTGVPAVVDLAAMREAVQRLGGNVEQVNPLSPVDLVIDHSVMVDKFGTEKAFEQNVQLEMERNYERYLFLRWGQKAFNRFRVVPPGTGICHQVNLEYLGKTVWHEMHNGRELAYPDTLVGTDSHTTMINGLGVLGWGVGGIEAEAAMLGQPVSMLIPDVVGFKLTGKLREGITATDLVLTVTQMLRAHGVVGKFVEFYGDGLADLPLADRATIANMSPEYGATCGFFPADGITLSYMRLTGRTEQQIELVEAYCKIQGLWRNPGDEPVFTSSLELDMSTVEASLAGPKRPQDRVALARVPQVFQSSVDLEMNKSQGKAISAPVNLDNQKYELEEGAVVIAAITSCTNTSNPSVLMAAGLLAKKAVEKGLKRQPWVKTSLAPGSKVVTDYLELAGLMPYLEELGFNLVGYGCTTCIGNSGPLPESIETAIKQADLTVGAVLSGNRNFEGRIHPLIKTNWLASPPLVVAYALSGNMKKDLTKDPLGQDQQGNDVYLKDIWPDSKEIAKAVEQIKADMFHKEYAEVFDGDETWQSLDVASSATYHFQLDSTYIRHPPFFSEMTAEPEAITDIHGANILAILGDSVTTDHISPAGNIKADSPAGRYLQEHGVEPKDFNSYGSRRGNHEVMMRGTFANIRIRNEMIAGVEGGYTRHIPSQTQLAIYDAAMRYQEEKTPLAIIAGKEYGSGSSRDWAAKGTRLLGVRVVIAESFERIHRSNLIGMGVLPLEFPQGVNRKTLNLQGDETIDIEGMNNLKPGQIVPVKMTYSDGHQEIINAQCRIDTKTELDYFHHGGILHYVIRHMLK

SEQ ID NO: 66880 - DNA, 2718 bp, Rhodopseudomonas palustris CGA009
  CDS (1)..(2718): transl_table=11
atgacctcgctcgacagcttcaaatgccggaagatcctcaaggtcggcagcaagtcttacgtctattacagcctgcccactgccgagaagaatggcctgaaggggatctcccgtctgccctactcgatgaaggtgctgctggaaaacctgctgcgcaacgaggacgaccgcaccgtcaagaaggccgacatcatggcggtcgccaagtggatgcggaagaaggcgctggagcacgaaatcgcattccgcccggcgcgcgtgctgatgcaggacttcaccggcgtgccggccgtggtcgatctggcggcgatgcgcaacgcgatgcagaagctcggtggtgatgccgagaagatcaatccgctggtgccggtcgacctcgtgatcgaccactcggtgatcgtcaacttcttcggtaacaaccaggcgttcaagaagaacgtcgccgaggagtacaagcagaaccaggagcgctacgagttcctgaagtggggccagaaggcattctcgaacttcgcggtggtgccgcccggcaccggcatctgccaccaggtcaatctcgagtacttggcgcagacggtctggaccaagaaggagaagatgacgatcggccgcaagaccggtaccttcgaagtcgcctatccggacacgctggtcggtaccgactcgcacaccaccatggtcaacggtctcgccgtgctcggctggggcgtcggtggcattgaggcggaagctgcgatgctcggccagccgctgtcgatgctgctgcccgaagtggtcggcttcaagctcaagggcgcgctcaaggaaggcgtcaccgcgaccgacctggtgctgaccgtcacccagatgctgcgtaagcagggcgtggtcggcaagttcgtcgaattcttcggcccgggcctcgacaacctctcggtcgccgacaaggcgacgatcgccaatatggcgccggaatacggtgcgacctgcggcttcttcccggtcgacggtgaaaccatcgattacttgaagacctcgggccgtgcctcggcgcgggtcgcgctggtcgagaagtacgccaaggcgcagggcctgttccgcaccgccaagtcgccggacccggtgttcaccgtgacgctgacgctggacctcgccgacgtggtgccgtcgctggccggtccgaagcgtcccgagggtcgcgtcgcgctgccggcggtggcggaaggcttcaccacggcgatggacgccgaatacaagaaggcgctcgacggcgcccgctacaaggtcgaaggccgcaatttcgatatcggccacggtgacgtggtgatcgcggcgatcacctcctgcaccaacacctcgaacccgagcgtgctgatcggcgccggcctgttggcgcgtaacgccgccgccaagggcctcaaggccgcgccgtgggtgaagacctcgctggccccgggctcgcaggtggtcgccgagtatctggcgaactcgggtctgcagaaggacctcgacaaggtcggcttcaacctggtcggcttcggctgcaccacctgcatcggcaattccggcccgctgccggaggagatctcgaagtcgatcaacgacaacggcatcgttgccgccgccgtgctgtcgggcaaccgcaacttcgaaggccgcgtctcgccggacgtgcaggcgaactatctggcgtcgccgccgctggtggtggcctacgcgctcgccggctcggtgaccaagaacctcgcggtcgatccgatcggcaccggcaaggacggcaagccggtttacctgaaggacatctggccgagcaccaaggagatcaacgccttcgtcaagaagtacgtgacctccaagatcttcaaggcgcgctacgccgacgtgttcaagggcgacaccaactggcgcaagatcaagacggtcgagtccgagacctacaagtggaacatgtcgtcgacctacgtgcagaacccgccgtatttcgaaggcatgaccaagcagccggagccgatcaccgacgtggtcgacgcccgcgtgctggcgctgttcggcgacaagatcaccaccgaccacatctcgccggccggttcgatcaagctgacgtcgccggctggtaagtatctgaccgagcgtcaggtccgcccggccgacttcaatcagtacggcacccgccgcggcaaccatgaagtgatgatgcgcggcaccttcgccaacatccgcatcaagaaccacatgctgaagggcgccgacggcaacattccggaaggcggcctgaccaagcactggcccgacggcgagcagatgtcgatctacgacgctgccatgaagtaccaggaagagaaggtgccgctggtggtgttcgccggtgccgaatacggcaacggttcgtcgcgcgactgggccgcgaaaggcacccgtctgctcggcgttcgcgccgtgatctgccagagcttcgagcgcatccaccgctcgaacctggtcggcatgggcgtgctgccgctgaccttcgaagagggcacctcgtgggcctcgctcggcctcaagggcgacgagaaggtcacgatccgcggcctcgagggcgacctcaagccgcggcagatgctggaagccgagatcacctcggctgcaggcaagcgcaagcgcgtgccgttgctgtgccgcatcgatacgctcgacgaactcgattactaccgcaacggcggtattctgcactacgtgctgcgcaagctcgcggcctga

SEQ ID NO: 66881 - protein, 905 aa, Rhodopseudomonas palustris CGA009
MTSLDSFKCRKILKVGSKSYVYYSLPTAEKNGLKGISRLPYSMKVLLENLLRNEDDRTVKKADIMAVAKWMRKKALEHEIAFRPARVLMQDFTGVPAVVDLAAMRNAMQKLGGDAEKINPLVPVDLVIDHSVIVNFFGNNQAFKKNVAEEYKQNQERYEFLKWGQKAFSNFAVVPPGTGICHQVNLEYLAQTVWTKKEKMTIGRKTGTFEVAYPDTLVGTDSHTTMVNGLAVLGWGVGGIEAEAAMLGQPLSMLLPEVVGFKLKGALKEGVTATDLVLTVTQMLRKQGVVGKFVEFFGPGLDNLSVADKATIANMAPEYGATCGFFPVDGETIDYLKTSGRASARVALVEKYAKAQGLFRTAKSPDPVFTVTLTLDLADVVPSLAGPKRPEGRVALPAVAEGFTTAMDAEYKKALDGARYKVEGRNFDIGHGDVVIAAITSCTNTSNPSVLIGAGLLARNAAAKGLKAAPWVKTSLAPGSQVVAEYLANSGLQKDLDKVGFNLVGFGCTTCIGNSGPLPEEISKSINDNGIVAAAVLSGNRNFEGRVSPDVQANYLASPPLVVAYALAGSVTKNLAVDPIGTGKDGKPVYLKDIWPSTKEINAFVKKYVTSKIFKARYADVFKGDTNWRKIKTVESETYKWNMSSTYVQNPPYFEGMTKQPEPITDVVDARVLALFGDKITTDHISPAGSIKLTSPAGKYLTERQVRPADFNQYGTRRGNHEVMMRGTFANIRIKNHMLKGADGNIPEGGLTKHWPDGEQMSIYDAAMKYQEEKVPLVVFAGAEYGNGSSRDWAAKGTRLLGVRAVICQSFERIHRSNLVGMGVLPLTFEEGTSWASLGLKGDEKVTIRGLEGDLKPRQMLEAEITSAAGKRKRVPLLCRIDTLDELDYYRNGGILHYVLRKLAA

SEQ ID NO: 66882 - DNA, 1938 bp, Geobacter sulfurreducens PCA
  CDS (1)..(1938): transl_table=11
atgggcaagaacctcgcaaccaaaatcctcgaagcgcacctcgtgaagggcgaactgacgccgggcaccgagatcgccctgaagatcgaccatgcgctcctccaggacgccaccggcaccatggccatgctggagttcatcgccatgggggtggaccgggtgaaggtggagctggcggcccagtacatcgaccacaacctgctccagaccgacaaccgcaacgccgacgaccacgtcttcctcatgaccgcggcccaacggttcggcgtccatctgtccaagccggggaacggggtctcccaccaggtccacctggagcgcttcggcgtgccgggccggaccatgctgggagccgactcccacaccacctccgccgccgggctctccatgatcgccattggcgccggcggactcgacgtctccctggccatggcggggcacccgttccacctcccctgcccgaagatctggggagtgaagctcacgggacagctccagccctgggtttcggccaaggacgtgatcctggagatgctccggcgccacaccgtgaaggggggcgtgggcaagatcatcgagtactacggccccggcgtggcgaccctctcggcaacggaccgcgccatcatcggcaacatgggggcggagctgggagccaccacctccctcttcccctcggaccaccggacccgcgagttcctggaggcccaggggcgcggcgaggtatggcaggagcttgccgccgacccggacgccacctacgacgagtacgaggaaatcgatctcgccacggtggagcccctcatcgcctgcccctcgtctccggacaacgtggtgcgggtggccgacatcgaagggctcaaggtggatcaggtgctcgtggggagttccgccaactccgccttccgggacctgatgaccgtctgccgcatcctggacgggcgccgcgtggcctcccacgtctccttcaacgtgaatccgggcagccgccaggtgttggagaacgtggccgatcaaggcggaatcatgatgctcctcctggccggggcccagatccaccagcccggctgcctcggctgcattggcatggggcaggcgccgggcaccgaccaggtaagtctgcgcaccttcccccgcaactttcccggccgcagcggaacgaagaatgacaaggtctatctctgctcccccgaaacggcagccgccgccggaatcttcggcgtggtcaccgatccccggaaactcggcgatctcatggcatggcccaacgtccggaacccggagaagtacgtgctggacgactccagcatcatcttccccctgccgcccgaggaggcgaagcaggtggagatcgtcaccggccccaacatcgtcccgtttcccgactttgacccgctgccggagaccctggaggccgaggtcatcttcatggtgggggacaacatctccactgacaccatcatgcccgccggcaacaaggtgcttccctaccggagcaacgtcccggccatcagccagttcgtgttcgagcaactggaccccgacttccacaagcgggccagggagaaggggaccggcgtggtcatcggcggcgagaactacggccagggatcgagccgtgagcacgcggccctggctccccgctacctgggcatccgggccaagatcgtcaaaagctttgcgcggatccacaaggccaatctggtcaacttcggcatcctgccgctcacgttcaagaatcccgccgactatgacctcctgaagcagggggaccggctggagttccccgacgtgcggcggctcgtggcctccggagccgtggagatcccggtgcgggtgggcgggaaggaaatcgtcaccctgctggacgtctcggaccggcagcggcaggaactgctggccggcgggacgttgaactacgtgaaacggagcgcctga

SEQ ID NO: 66883 - protein, 645 aa, Geobacter sulfurreducens PCA
MGKNLATKILEAHLVKGELTPGTEIALKIDHALLQDATGTMAMLEFIAMGVDRVKVELAAQYIDHNLLQTDNRNADDHVFLMTAAQRFGVHLSKPGNGVSHQVHLERFGVPGRTMLGADSHTTSAAGLSMIAIGAGGLDVSLAMAGHPFHLPCPKIWGVKLTGQLQPWVSAKDVILEMLRRHTVKGGVGKIIEYYGPGVATLSATDRAIIGNMGAELGATTSLFPSDHRTREFLEAQGRGEVWQELAADPDATYDEYEEIDLATVEPLIACPSSPDNVVRVADIEGLKVDQVLVGSSANSAFRDLMTVCRILDGRRVASHVSFNVNPGSRQVLENVADQGGIMMLLLAGAQIHQPGCLGCIGMGQAPGTDQVSLRTFPRNFPGRSGTKNDKVYLCSPETAAAAGIFGVVTDPRKLGDLMAWPNVRNPEKYVLDDSSIIFPLPPEEAKQVEIVTGPNIVPFPDFDPLPETLEAEVIFMVGDNISTDTIMPAGNKVLPYRSNVPAISQFVFEQLDPDFHKRAREKGTGVVIGGENYGQGSSREHAALAPRYLGIRAKIVKSFARIHKANLVNFGILPLTFKNPADYDLLKQGDRLEFPDVRRLVASGAVEIPVRVGGKEIVTLLDVSDRQRQELLAGGTLNYVKRSA

SEQ ID NO: 66884 - DNA, 2880 bp, Mycobacterium avium subsp. paratuberculosis K-10
  CDS (1)..(2880): transl_table=11
ctgttaaagttggcaccgtcgccgacacggcccgtcggcggaagaactaaatccttgggagttgaagtgactgattctgtgaactcgttcggagcccgcaacaccctcaaggtcggcgacaagagttaccagatctatcgcctcgacgccgtccccaataccgagaagcttccctacagcctcaaggtgctggccgagaacctgctgcgcaacgaggacggcagcaacatcaccaaagaccacatcgaggccatcgcgaactgggatcccaaggcggagcccagcattgaaatccagtacacgcccgcccgggtggtgatgcaggacttcaccggggtgccgtgcatcgtcgacctggccaccatgcgggaggcgatcgccgacctgggcggcaacccggagaaggtcaacccgctcgcgccggccgacctggtgatcgaccactcggtgatcgccgacctgttcggcacggccgacacgttcgagcgcaacgtcgagatcgaataccagcgcaacggcgagcgctaccagttcctgcgctgggggcagggcgccttctccgacttcaaggtggtgccgccgggcaccgggatcgtgcaccaggtgaacatcgagtacctggcccgggtggtgatggagcgcgacggggtggcctatccggacacctgcgtgggcaccgactcgcacaccacgatggtcaacggcctgggcgtgctgggctggggcgtcggcggcatcgaggccgaggccgcgatgctcggccagccggtgtcgatgctgatcccgcgggtggtcggcttcaagctgaccggtgagatccagccgggcgtgaccgccaccgacgtggtgctgaccgtcaccgagatgctgcgcaagcacggcgtggtcggcaagttcgtcgagttctacggcgagggggtggccgaggtgccgctggccaaccgcgccaccctgggcaacatgagccccgaattcggttccaccgcagcgattttcccgatcgacgaggaaaccatcgactacctgaagttcaccggccgcaacgccgagcaggtggcgctggtcgagacctacgccaaagagcagggcctgtggcacgaccccgcccacgagccggccttctcggagtacctggagctcgacctgtcccaggtggtgccctcgatcgccgggcccaagcgcccccaggaccgaattgcgttgtcgcaggccaagtccgtcttccgcgagcagatccccagctacgtcggcgacggcgacgggcagcagggctactcgaagctggacgaggtggtcgacgagacgttcccggccagcgacccgggggcgccgtccaacggccacgccgacgacctgcccgcggtgcagtcggccgccgcgcacgccaacggccgcccgagcaacccggtgacggtccgctccgacgagctgggcgagttcgtgctcgaccacggcgcggtggtgatcgccgcggtcacgtcgtgcaccaacacctccaaccccgaggtgatgctgggcgcggcgctgttggcgcgcaacgccgttgagaaggggctggcctccaagccgtgggtgaagaccacgatggcgccgggctcgcaggtggtccacgactactacgacaaggccgggctgtggccgtatttggagaagctcggcttctatctggtcggctacggctgcaccacctgcatcggcaactccggtccgctgcccgaggagatctcgaaggccatcaacgacaacgacctgtcggtgaccgcggtgctctcgggtaaccgcaacttcgagggccgcatcaacccggacgtgaagatgaactacctggcgtcgccgccgctggtggtggcctacgcgctggccggcaccatggacttcgacttcgaaaagcagccgctgggcaaggacaaggacggcaacgacgtctacctgaaggacatctggccgtcgcagaaggacgtctcggacaccatcgcatcggcgatcaactccgagatgttcaccaagaactacgccgacgtcttcaagggtgacgagcgctggcgcaacctgcccaccccgagcggcaatacctttgagtggagcccggattcgacgtacgtgcgcaagccgccgtacttcgagggcatgccggccgagcccgagccggtcgccgacatctccggcgcgcgggtgctggcgctgctgggcgactcggtgaccaccgaccacatctcccccgccggcagcatcaagccgggcaccccggcggcgcagtacctcgacgagcacggcgtggaccgcaaggattacaactccttcggctcgcggcgcggcaaccatgaggtgatgatccgcggcacgttcgccaacatccggctgcgcaacctgctgctcgacgacgtggccggcggctacacccgcgacttcacccaggacggcggtccgcaggcgttcatctacgacgcggcgcaaaactatgcggcacaaaacattccgctggtggtgctgggcggcaaggaatacgggtccggctcgtcgcgagactgggcggccaagggcacccggctgctgggcgtacgcgcggtgatcgccgagtcgttcgaacggatccaccgctccaacctgatcgggatgggtgtgatcccgctgcagttcccggacggcaaatcggccaaggacctggggctggacggcaccgaggtgttcgacatcaccggcatcgaagagctcaacaagggcaagacaccgaagacggtgcacgtcaaggcgagcaaaaacggttcggacgcagtcgaattcgatgcggtggtgcgcatcgacacccccggtgaggcggactactaccgcaacggcggcatcctgcagtacgtgctgcgcaacatgctcaagtccggctga

SEQ ID NO: 66885 - protein, 959 aa, Mycobacterium avium subsp. paratuberculosis K-10
MLKLAPSPTRPVGGRTKSLGVEVTDSVNSFGARNTLKVGDKSYQIYRLDAVPNTEKLPYSLKVLAENLLRNEDGSNITKDHIEAIANWDPKAEPSIEIQYTPARVVMQDFTGVPCIVDLATMREAIADLGGNPEKVNPLAPADLVIDHSVIADLFGTADTFERNVEIEYQRNGERYQFLRWGQGAFSDFKVVPPGTGIVHQVNIEYLARVVMERDGVAYPDTCVGTDSHTTMVNGLGVLGWGVGGIEAEAAMLGQPVSMLIPRVVGFKLTGEIQPGVTATDVVLTVTEMLRKHGVVGKFVEFYGEGVAEVPLANRATLGNMSPEFGSTAAIFPIDEETIDYLKFTGRNAEQVALVETYAKEQGLWHDPAHEPAFSEYLELDLSQVVPSIAGPKRPQDRIALSQAKSVFREQIPSYVGDGDGQQGYSKLDEVVDETFPASDPGAPSNGHADDLPAVQSAAAHANGRPSNPVTVRSDELGEFVLDHGAVVIAAVTSCTNTSNPEVMLGAALLARNAVEKGLASKPWVKTTMAPGSQVVHDYYDKAGLWPYLEKLGFYLVGYGCTTCIGNSGPLPEEISKAINDNDLSVTAVLSGNRNFEGRINPDVKMNYLASPPLVVAYALAGTMDFDFEKQPLGKDKDGNDVYLKDIWPSQKDVSDTIASAINSEMFTKNYADVFKGDERWRNLPTPSGNTFEWSPDSTYVRKPPYFEGMPAEPEPVADISGARVLALLGDSVTTDHISPAGSIKPGTPAAQYLDEHGVDRKDYNSFGSRRGNHEVMIRGTFANIRLRNLLLDDVAGGYTRDFTQDGGPQAFIYDAAQNYAAQNIPLVVLGGKEYGSGSSRDWAAKGTRLLGVRAVIAESFERIHRSNLIGMGVIPLQFPDGKSAKDLGLDGTEVFDITGIEELNKGKTPKTVHVKASKNGSDAVEFDAVVRIDTPGEADYYRNGGILQYVLRNMLKSG

SEQ ID NO: 66886 - DNA, 2586 bp, Wolbachia endosymbiont of Drosophila melanogaster
  CDS (1)..(2586): transl_table=11
atgaacaattctttaaatgcaaaaacgactttaaacattgacgggaagtcatacaactattttagcctaagtagtgctagtgaatttttaggaatagatgtgactaaattgccttgctcacttaaggttctgcttgaaagtttattgcgcaatgaagatggagtaaacgtaaagctagatgacataagagtactagcagactgcgttaataaacacactaatcacgaaattagctataaaccagcaagggtgttgatgcaagattttacaggggttcctgctgttgttgatctagcttcaatgcgggactatgttaagaaaaatggaggaaacccaagcaatataaatccgtctgtaccggttgatcttgtgattgaccattctgttcaagtagatagttatggaagtgtttccgcattcagtaagaatgttgagttagaagtaaaaagaaatttggagagatatcaatttttaaagtggggagaatcgtccttcacaaattttagagtagtgccgcctggcacagggatttgccatcaagtgaaccttgaatatttagcgcaagttgtgtgtaataatgatggagtcatatatcctgatactttagttggtactgacagccatactacaatggttaacgggttatcagttcttggttggggtgttggaggcatagaagctgagtctgtgatgcttggtcaaccaattagtatggtgattccagaagtagttggatttaaattaattggcagactgccggaaggagtaactgcgactgatttagtgctgacggttaccaatatcctaagaacaaaaggcgttgttggtaagtttgtagaattttatggtgatggtttagattatttatctttggcagatagagccactatagcaaacatggccccagagtatggtgcaacttgtgggttttttccaattgatcagaaaacactcgattatttacatttaacagggcgaccagaaaagctgattaagttagttgaggcttatgcgaaagagcaaggattgtggcgtggcaataatgagttagcattttttgacgcactagaacttgatttatcgagcgtgaagccagtaatggctggtcctaaaagaccacaagataaggtttttctttcacaagtggcagagtctttttctaaatcattttcagttaatgagtcaaaggaaagcgataaactccaagatggaagtgtagttattgcagcaataacaagctgcactaatacttcaaatccaagtgtgatgattgctgcaggtcttgtagctcgtaatgcaattaaacttggattaaaatcaaagccttgggttaaaacttctcttgctccagggtcacaagttgtaacagaatatttagaaaagtctggattgcaggtagatctaaatgctttgggttttaatctagttggatatggttgcacaacttgcattgggaattctggtccacttaataaagatatagaagatggcattaaaaacaaaaacttaaccgttgctgcagttttatctggcaatcgtaactttgaaggaagaattcatccgttagtcaaagctaattacttggcatctccgccacttgttgttgcatatgcacttgctggtactgtgcaaattgatctgacaaaagattcaatatgcaaagataagaatggaaatgatgtctatctcaaagatatatggccaacaaacaatgaaatcgaagattgtgttaaaagtgtggtaacacgtgagatgtttatacaaaagtataaggatgttttttctggtgatgaacattggcggaagataaagtgtgaaaaaagtgaaatctataattgggatgcaaacagtacttacatacaaaatccgccttattttgataacttatcacctaaaaataataaaatcgatataaagggtgcacaaatattagcaatgtttggcgatagcataactactgatcatatttcccctgcgggaaatattgcctcgagtagtcctgccggtctatatttaaaagggcttggaattgaaccacgggatttcaattcatacgggtctcgccgtggtaatcacaatgtaatgatgcgtgggacttttgctaacattagaataaaaaatgaaatggttagcaccgaaggtggatatacaaaatatattccttctcaagaaactatgccaatttttgatgcggcgatgcgctacaaggaagctctcatcattgtggcaggaaaggagtatggcacaggttcaagtagggattgggcagcaaagggtactttattgttggggattaaagttgtaattgcagaaagctttgagcgtatacataggtccaacttagttggtatgggtgttcttccacttatattccaaaatggaataaccagaaagatatttgatggtagtaaggtaataagcataaaaggtgaaatagtgccaggtggaaatctaaaatgtatcatcaaaggaaaggataattctgaacaatcaattcaactcaaatgctgtgtacaaaccgcaactgagactaaatacttgatgtgtggtggagtgttgagctacatacttgcacaatctttttga

SEQ ID NO: 66887 - protein, 861 aa, Wolbachia endosymbiont of Drosophila melanogaster
MNNSLNAKTTLNIDGKSYNYFSLSSASEFLGIDVTKLPCSLKVLLESLLRNEDGVNVKLDDIRVLADCVNKHTNHEISYKPARVLMQDFTGVPAVVDLASMRDYVKKNGGNPSNINPSVPVDLVIDHSVQVDSYGSVSAFSKNVELEVKRNLERYQFLKWGESSFTNFRVVPPGTGICHQVNLEYLAQVVCNNDGVIYPDTLVGTDSHTTMVNGLSVLGWGVGGIEAESVMLGQPISMVIPEVVGFKLIGRLPEGVTATDLVLTVTNILRTKGVVGKFVEFYGDGLDYLSLADRATIANMAPEYGATCGFFPIDQKTLDYLHLTGRPEKLIKLVEAYAKEQGLWRGNNELAFFDALELDLSSVKPVMAGPKRPQDKVFLSQVAESFSKSFSVNESKESDKLQDGSVVIAAITSCTNTSNPSVMIAAGLVARNAIKLGLKSKPWVKTSLAPGSQVVTEYLEKSGLQVDLNALGFNLVGYGCTTCIGNSGPLNKDIEDGIKNKNLTVAAVLSGNRNFEGRIHPLVKANYLASPPLVVAYALAGTVQIDLTKDSICKDKNGNDVYLKDIWPTNNEIEDCVKSVVTREMFIQKYKDVFSGDEHWRKIKCEKSEIYNWDANSTYIQNPPYFDNLSPKNNKIDIKGAQILAMFGDSITTDHISPAGNIASSSPAGLYLKGLGIEPRDFNSYGSRRGNHNVMMRGTFANIRIKNEMVSTEGGYTKYIPSQETMPIFDAAMRYKEALIIVAGKEYGTGSSRDWAAKGTLLLGIKVVIAESFERIHRSNLVGMGVLPLIFQNGITRKIFDGSKVISIKGEIVPGGNLKCIIKGKDNSEQSIQLKCCVQTATETKYLMCGGVLSYILAQSF

SEQ ID NO: 66888 - DNA, 2259 bp, Bdellovibrio bacteriovorus HD100
  CDS (1)..(2259): transl_table=11
atggcttcgaaaatcgaaactacaccggatatggtgcagaacgtttacaagaagacagctgaaagactggctgttgttcgcaatcgcttgaaccgccctttgacattggcggagaaaattttgttcggtcacttggacgatccacaaaaccaggaattggttcgtggcgaaagtttcttgttgttgagaccagaccgcgtggcgatgcaagatgcgacagcgcagatggctttgttgcaattcatgctggctggtaaagacgaagcagctgttccttccacagtacactgcgatcacttgatccaggcttacaaaggtgcgggcgcagacatgacggttgccaatgcaaccaacaaagaagtttatgacttcctggcgacagcttcttcccgttacaacatcggcttctggaaaccaggcgctggtatcattcaccaagtcatccttgaaaactacgcgttcccaggcggcttgatgatcggtacggactctcacactccgaatgcgggtggtttgggtatgtgtgctgtgggcgttggtggttctgatgcttctgacgtgatggtgggtctgccttgggaagttaaaaatcctaagctgatcggtgttcacctgaaaggcaaactgggcggttgggcgtctgcaaaagacgtgatcctgaaactgtgcggaatgctgactgtaaaaggtggtacggataaggttgtcgagtacttcggtgaaggcacgtcctccatctcttgtactggtaaagcaactatcaccaacatgggtgctgagctgggtgcaacctgctctgtattcccatacgacgagcgcatgggcgcttacctgaaatccacaggtcgtgatcaactggcggctatcgctgacggtcacaaagacatcctgtctgcagacgcggacgttgtggcaaacccaggtaaatacttcgacgaagtttacgaaatcgacttgtctgctttggaaccacacctggtgggtcctcacactccagacttggctcgtccgatctctgcacttaaaaaagaagtggctgagaaaggttacacagttaagatttcctctgctttgatcggttcctgcacgaattcttcttacgaagatatcggtcgcgcggcgttcgtggcgaaacaagctatggaagtgggcgtgaaaatgacgtctccgttcctggtttccccgggttccactcagatccagaacacgattgagcgtgatggccagatggcgacgttcaacgaagtgggcgcgacagtgttggcgaacgcttgcggtccttgcatcggtcagtggaaacgtgacgacatcaaggcgggcgagaaaaacacgatcgtaacttccttcaaccgtaacttccgcgcacgtaacgatgcgaatccagagactctggcgttcatcgcttcgccggaaatcgttatggcattgggtctggcaggtcgtttggacttcaacccggcgactgacgagctggaaggtccaaaaggcaaaatcaaacttcaggcgccagtggctccagagttgccggctaaaggcttcatcgccgacactgaaggttatcagaaaccagcaggtgctaccgctcaagtggcagtgaatccttcttctgatcgtttgcagcttctttctccgttcaccaaatgggatggcaaagacttcgttgatcaattggttcttgcgaaagcaaaaggcaagtgcacgacggatcatatctctccgggtggtaaatggttgaactaccgtggtcacttggacaacatctccaacaacatgttgttgggtgcggataacgcgttcacaggtgaaatcggtaaaggtaaaaaccaactgactggtgaaacagcagaattcgctcaggtggcacgtgcttaccaaaaagcgggtaaaggctgggttatcatcggtgatgaaaactacggtgaaggttcttcccgtgaacacgcggcaatgtgcccaagacacttgggtgcttctgcggttatcacgaaatccttcgctcgtatccacgagacgaacctgaaaaaacaaggtgtgctggctttgactttcgttaatccaaaagattacgacaaagttcaggaagcagaccgtgtttccctggttgatctgaaagatctggctccaggtaaaaacgtgaaaatgaacatcaaacacgctgatggctcttccgagactatcgagctgaaacacacttacaacgctgaacagttgaaatggttccgcgcgggaagtgcgttgaatctgatccgcggtctgtaa

SEQ ID NO: 66889 - protein, 752 aa, Bdellovibrio bacteriovorus HD100
MASKIETTPDMVQNVYKKTAERLAVVRNRLNRPLTLAEKILFGHLDDPQNQELVRGESFLLLRPDRVAMQDATAQMALLQFMLAGKDEAAVPSTVHCDHLIQAYKGAGADMTVANATNKEVYDFLATASSRYNIGFWKPGAGIIHQVILENYAFPGGLMIGTDSHTPNAGGLGMCAVGVGGSDASDVMVGLPWEVKNPKLIGVHLKGKLGGWASAKDVILKLCGMLTVKGGTDKVVEYFGEGTSSISCTGKATITNMGAELGATCSVFPYDERMGAYLKSTGRDQLAAIADGHKDILSADADVVANPGKYFDEVYEIDLSALEPHLVGPHTPDLARPISALKKEVAEKGYTVKISSALIGSCTNSSYEDIGRAAFVAKQAMEVGVKMTSPFLVSPGSTQIQNTIERDGQMATFNEVGATVLANACGPCIGQWKRDDIKAGEKNTIVTSFNRNFRARNDANPETLAFIASPEIVMALGLAGRLDFNPATDELEGPKGKIKLQAPVAPELPAKGFIADTEGYQKPAGATAQVAVNPSSDRLQLLSPFTKWDGKDFVDQLVLAKAKGKCTTDHISPGGKWLNYRGHLDNISNNMLLGADNAFTGEIGKGKNQLTGETAEFAQVARAYQKAGKGWVIIGDENYGEGSSREHAAMCPRHLGASAVITKSFARIHETNLKKQGVLALTFVNPKDYDKVQEADRVSLVDLKDLAPGKNVKMNIKHADGSSETIELKHTYNAEQLKWFRAGSALNLIRGL

SEQ ID NO: 66890 - DNA, 2685 bp, Bdellovibrio bacteriovorus HD100
  CDS (1)..(2685): transl_table=11
atgttcattcaatccaaagacagttttaagacgaaatcgaaacttcaggtgggctcacagagctacaccattttcaacgctcacaaaatccagcatcccaacattaaaaaacttccggtgtcgctgaaggtccttttggaaaaccttctgcgccacgaagatgggctgcatgtcagcaaagaggacattgattccctgctgagcctgagcaacgaatccctgacccgcgaaatttcattcttcccggcgcgagtgctgatgcaggactttaccggggtgccggcggtcgtggatctggcggcgatgcgggatgcgatgaagtctctgggcggtgatccgaaaaaaatcaacccgctggtgccggtcgatctggtgattgaccactcggtgatggtcgatgccttcggtacgccgaagtcctttgatgaaaacgtgaaaatggagtttgagcgcaatcacgaacgttatgtcttcctgaagtgggggcagaacgcgttccagaatttcaaagtggttccgccgggcacaggtatttgtcaccaggtgaatctggaatatctgggtaaaaccgtgtggtccaatcaagggcctgagggggctaatgccttccctgacaccttggtgggcacagacagtcacaccaccatgatcaacggtctggctgtgttgggctggggtgtgggtggcatcgaggcggaagcggtgatgctgggacagcctctaagcatgctgattccggaagtggtcggctttaagcttgatggaaaaatgcaggaaggcacgacggcgacggatcttgtcctgaccatcacgcaaatgctgcgtaaaaaaggtgtggttggaaagtttgttgaattctatggcccgggtctggcaaccatgtctttggcggatcgggcgacgattgccaacatggcacctgaatacggcgcaacctgcggattcttcccggtggatgagcaaactatgaagtatctgcgtctgtccggtcgggatgccgcgaccattgctttggttgaagcctatgcgaaagaaaccgggttgtggcgttcggaagaagcggagaagcactatcacttcaacgacactcttcacttggacatgtccactgtcgagccttctttggccggccctaagcgcccgcaagaccgtgtggttctggctggcgctgctgaagatttcaaaaaacaactggtggcgggtttccaggtggaggccgacaaagcgaccaaatccgcttcggcggtgaccgtcgacactcaaaactactctttgggtcacggggacgtggtgattgccgcgatcaccagctgcacgaacacctccaatccatcggtgatgatcggcgccggtctggtggcgaagaaagccgtggaaaagggcctgaccgtgaagccgtgggtgaagacatccctggctcccgggtctcaggtggtgacggactatctggagcgcgccggtttgcaaacttatctggataagctgggtttcaatcttgtgggttacggttgcacgacctgtatcgggaactccggaccgctggatcctccggtggcgggggcggttgaaaaaggaaatctggttgtggcgtcggttctttccggaaaccgcaactttgaaggccgcatcaatccgcatgtgaaagccaactatctggcgtctccgatgctggtggtggcgcacgcattggcgggcaacatgatgattgatatcacccgcgattctttgggcaatgattcatctggaaagcctgtttatctgaaggacatctggccaagcagtcaggagattcaggacaccatcaacaaaaccgttgaaactaaaatgttcgacacgcgttacggaaatgtttttgctggcaccgaagactggcaaaaaatcaacaccacgtcttcccaggtctacaactgggaaaagagcacttacatcaagaaccccccgtactttgagggcatggccctgaagccggaagcggttcatgacgtgaagggcgctcgtcctttggcaatcctgggtgattcaatcacgacggaccatatttctccggcgggaagtatcaaaaaggattctccggcaggacgctatctgatgtcccatggggtggatgccaaagacttcaactcttacggatcccgtcgtggtaatgacgaggtgatggtgcgcgggactttcgccaacatccgcattaaaaacgaaatgcttcagggggtggaaggcggcatgaccaagtacgtgccaagcggtgaaacgctggccatatacgatgcttcggtaaagtatcagtccacgatgacgcctttggtggtgatcgccggtaaagagtacggcacgggttcttcccgggactgggctgccaagggcactcgtcttctgggtgtgaaagccgtgatcgcggaaagtttcgagcgtattcaccgttccaacctgattggtatgggggtgttgcctctgcagttccatccgggcacggatcgcaagactttgcatctggatggctcagagacgttcgatatttccggcattgaatccggcatgaagccacagcaggatttgatgttgaccattcatcgcgccaacggtcagaaagaggacgtgaaagtgcgctctcgtatcgacaccgcagttgaacttgagtactacaaaaatgggggcatcctccattacgtgcttcgcaaactggtctag

SEQ ID NO: 66891 - protein, 894 aa, Bdellovibrio bacteriovorus HD100
MFIQSKDSFKTKSKLQVGSQSYTIFNAHKIQHPNIKKLPVSLKVLLENLLRHEDGLHVSKEDIDSLLSLSNESLTREISFFPARVLMQDFTGVPAVVDLAAMRDAMKSLGGDPKKINPLVPVDLVIDHSVMVDAFGTPKSFDENVKMEFERNHERYVFLKWGQNAFQNFKVVPPGTGICHQVNLEYLGKTVWSNQGPEGANAFPDTLVGTDSHTTMINGLAVLGWGVGGIEAEAVMLGQPLSMLIPEVVGFKLDGKMQEGTTATDLVLTITQMLRKKGVVGKFVEFYGPGLATMSLADRATIANMAPEYGATCGFFPVDEQTMKYLRLSGRDAATIALVEAYAKETGLWRSEEAEKHYHFNDTLHLDMSTVEPSLAGPKRPQDRVVLAGAAEDFKKQLVAGFQVEADKATKSASAVTVDTQNYSLGHGDVVIAAITSCTNTSNPSVMIGAGLVAKKAVEKGLTVKPWVKTSLAPGSQVVTDYLERAGLQTYLDKLGFNLVGYGCTTCIGNSGPLDPPVAGAVEKGNLVVASVLSGNRNFEGRINPHVKANYLASPMLVVAHALAGNMMIDITRDSLGNDSSGKPVYLKDIWPSSQEIQDTINKTVETKMFDTRYGNVFAGTEDWQKINTTSSQVYNWEKSTYIKNPPYFEGMALKPEAVHDVKGARPLAILGDSITTDHISPAGSIKKDSPAGRYLMSHGVDAKDFNSYGSRRGNDEVMVRGTFANIRIKNEMLQGVEGGMTKYVPSGETLAIYDASVKYQSTMTPLVVIAGKEYGTGSSRDWAAKGTRLLGVKAVIAESFERIHRSNLIGMGVLPLQFHPGTDRKTLHLDGSETFDISGIESGMKPQQDLMLTIHRANGQKEDVKVRSRIDTAVELEYYKNGGILHYVLRKLV

SEQ ID NO: 66892 - DNA, 2724 bp, Bacillus cereus ATCC 10987
  CDS (1)..(2724): transl_table=11
atggtcaaacataatccatttcaatcacgcgcaacttttgaagtagatggaaaaacgtatcattattatgatttgaaagcgcttgaaaacgcaggggttggcaacgtatctcaattaccatattccgtgaaagttttacttgagtcagtacttcgtcaagtagacggacgtgtaattacagaagagcatgttacaaatttagcgaaatggggaacgaaagatgtgcaagatatcgatgttccatttaaaccatctcgtgtaattttacaagatttcactggtgttccagctgttgttgatttggcttcgcttcgtaaagcaatggcagacatgggtggggatcctgataaaattaatccagaaattactgtagaccttgtaattgatcactctgtacaggttgatagagcgggtacggcagacgcgcttgcattcaacatggacttagagtttaaacgtaatgaagaacgttataaatttttaagctgggcacaaaaatcatttgataactatcgtgcagttccaccagctacaggtattgtacaccaagtaaaccttgaatatttagcaccagttgttcacgctgtgaaaaatgaggaaggtgacttagttgcatatccagattcattagttggaacagactcacatacaacaatgattaacggtatcggtgttcttggatggggcgttggtggtattgaagcagaagcaggaatgcttggacagccttcatacttcccagtacctgaagtaatcggtgtgaaattaactggtacacttccaagtggtactacagcaactgacgttgcattaaaagtaacgcaagtattacgtcaaaaaggtgtagttggtaaattcgttgagttcttcggtaatggactaaagagcatgcctttagctgaccgtgcaacaatttcaaacatggcaccagaatacggcgcaacttgtggattcttcccaatcgatgatatttcattagaatacttacgtttaacaggtagagatgaagagcaaattcgagttgttgaagaatactgtaaagcaaacggtttattctatacagcagacagcaaagatccaatttacactgatcttgttgaaattgatttaaatacaattgaatctaacctttctggaccgaaacgcccacaagatttaattccactttcagatatgaaagatgcgttccacaaagctgttgtagcaccagttggaacacaaggacttggatttaatgagcaagagttcgataaagaggtgaaggttacattagaagataaagaagtaacgatgaaaacaggtgcaattgcaatcgctgcaattacaagctgtacaaatacatcaaacccgtacgtattaattggagcaggtctagttgcgaagaaagcaattgaaaaaggacttaaagtacctgaatacgtaaaaacatcattagcaccaggatctaaagttgttacagagtacttagataagtctggtttaacaacatatttagatcaattaggtttccaaacagttggttacggctgtacgacttgtatcggtaactctggtccattagcgccagaattagaagaagcaatcgcagcaaacgacttattagtaacatctgttttatctggtaaccgtaactttgaaggtcgtattcatccacttgtaaaagcgaactacttagcatcaccaccacttgttgtggcatatgcacttgcaggtactgttgatattgacctgaaaaatgatgaaatcggtaaagatgcaaatggcaatgctgtttacttcaacgatatttggccatcagctaaagaaattgaagatgtagttcaaagcgttgttacatctgaactgttcaaaaaagaatatgcacaagtatttaatagcaatgagcgttggaatgaaatccaaacttcaaacgaagctttatatacttgggataatgattcaacatacattcaaaatccaccattctttgaaggtttatctaaagagccaggtgaagttgaaacgttatcaggcttacgcgtagttggtaaatttggtgactctgtaacgacagaccatatttcaccagcaggttcaatcggtaagcatacaccagctggacgctacttattagaaaacggcgtacaaccagttgactttaactcttacggttctcgtcgtggtaaccatgaagtgatgatgcgtggtacattcgcgaacatccgtattaaaaaccaaattgcaccaggcacagaaggcggatatacaacatactggccaactggtgaagtaacatcaatctatgatgctgctatgaaatataaagaagacggcacaggccttctagttgttgcaggtaaagattacggtatgggaagttctcgtgactgggctgcaaaaggtacaaacttattaggtattaaagcagtaatcgcagaaagcttcgagcgtattcaccgcagtaacttagtgttaatgggcgtattaccgcttcaatttaaagatggtgaaagcgctgaaacattaggtcttgttggtaacgagtcatttgaaattcaaatcgacaaaacagttaaaccacgcgatcttgtaaaagtagttgcaactgatgcagatggcaacgaaaaacaatttgaagtagtagctcgtttcgatagtgaagttgaaattgactactaccgtcacggtggtatcttacaaatggttcttcgtgagaaaattgaagagtctaaagtgtcaaactaa

SEQ ID NO: 66893 - protein, 907 aa, Bacillus cereus ATCC 10987
MVKHNPFQSRATFEVDGKTYHYYDLKALENAGVGNVSQLPYSVKVLLESVLRQVDGRVITEEHVTNLAKWGTKDVQDIDVPFKPSRVILQDFTGVPAVVDLASLRKAMADMGGDPDKINPEITVDLVIDHSVQVDRAGTADALAFNMDLEFKRNEERYKFLSWAQKSFDNYRAVPPATGIVHQVNLEYLAPVVHAVKNEEGDLVAYPDSLVGTDSHTTMINGIGVLGWGVGGIEAEAGMLGQPSYFPVPEVIGVKLTGTLPSGTTATDVALKVTQVLRQKGVVGKFVEFFGNGLKSMPLADRATISNMAPEYGATCGFFPIDDISLEYLRLTGRDEEQIRVVEEYCKANGLFYTADSKDPIYTDLVEIDLNTIESNLSGPKRPQDLIPLSDMKDAFHKAVVAPVGTQGLGFNEQEFDKEVKVTLEDKEVTMKTGAIAIAAITSCTNTSNPYVLIGAGLVAKKAIEKGLKVPEYVKTSLAPGSKVVTEYLDKSGLTTYLDQLGFQTVGYGCTTCIGNSGPLAPELEEAIAANDLLVTSVLSGNRNFEGRIHPLVKANYLASPPLVVAYALAGTVDIDLKNDEIGKDANGNAVYFNDIWPSAKEIEDVVQSVVTSELFKKEYAQVFNSNERWNEIQTSNEALYTWDNDSTYIQNPPFFEGLSKEPGEVETLSGLRVVGKFGDSVTTDHISPAGSIGKHTPAGRYLLENGVQPVDFNSYGSRRGNHEVMMRGTFANIRIKNQIAPGTEGGYTTYWPTGEVTSIYDAAMKYKEDGTGLLVVAGKDYGMGSSRDWAAKGTNLLGIKAVIAESFERIHRSNLVLMGVLPLQFKDGESAETLGLVGNESFEIQIDKTVKPRDLVKVVATDADGNEKQFEVVARFDSEVEIDYYRHGGILQMVLREKIEESKVSN

SEQ ID NO: 66894 - DNA, 2352 bp, Strongylocentrotus purpuratus
  CDS (1)..(2352)
atggcgtacgcggttagagcatcaggatcgaggatgaaatccctcatggctgcaggccttcgggccaggctgctacagacttctgcagcagcaagtcaggtagccatgagccgattcgaacaagacacgtttattaactatgaccaattggacgcaaacctcaagattgtgaaagatagacttcaacgaccccttaccctcagtgaaaagattgtttatggtcatctcgacaaacctaaggaacaggacattgagcgtggagaatcctacttgaagttgaggccagaccgtgtcgctatgcaagatgctacagctcaaatggctatgctacagttcatctccagcggtcttccaaaagttgcagtcccgtctaccatccattgtgatcacttgattgaagcccaggtgggaggagctaaggatctcacaagggccaaggacttgaacaaagaagtgtacaacttcttggcgtcagctggtgctaagtatggtgtgggcttctggaagccaggcagtggtatcattcatcagatcatccttgagaactatgcctaccctggtgtactactgattggaacggactcccacactcccaacggaggggggttaggaggcgtctgcatcggtgtcggaggggctgatgccgtggatgtgatggcagatatcccatgggaactcaaatgccctaatgtcattggagtgaaattgaccggtcaactcagtggctggacctcacctaaagatgtaatcctgaaggtagctggtatcttgaccgtcaagggcggtaccggagccatcgtggagtactttggacctggtgtagactccatctcttgcacgggtatgggtaccatctgcaacatgggtgccgagatcggtgctaccacgtccatgttcccattcaacagcagaatgagagactacctggtcgctaccgacagatcagaaattgcggatctggctgacaaaaacaaacatctcctgacagccgatgaaggtgcacaatatgatgaggtcattgagatcaatcttagtgagcttgaacctctcatcaatggacctttcacccctgaccttatgaaccctgtgtcaaaggttggggaggttgccgtcaaggagggttggcctctggaggtcaaagtcggtctgattggtagttgtacaaacagcagctacgaggacatgagcagagcagctagcattgcccagcaggctctggataatggcatcaaatgcaaggccgctttcacggtgactccagggtccgagcagatccgagccaccattgagagggacggtcaagccgctactctcagggagtttggtggcattgtcctagccaatgcctgcggtccatgcatcggtcagtgggataggcaagatgttaagaagggagagaagaacaccatcgtcacatcctacaaccgtaacttcaccggccgtaacgacgctaaccctgccacccatgcattcgtagcatccccagaggttaccacagccctggctctagcaggtcgtctggactttgacccagaggtagatgaactgacgggagcaaacggacagaagtttaaactcaagagcccctatggagatgagttgccaagccagggctttgatcctggccaggacaccttccagccgccgcctagcgacgggtcaggcattgctgtcgatgtggacccatctagcaaccgtctccagctgctctcaccgtttcagcccaacggacaagacttggaggatatggtagtactcatcaaggttaaaggcaaatgcaccacagatcacataagctcggctggtccatggttgaaatacagaggacatctggacaacatctcggacaatcttctcattggagcaacaaacattgagaatggagccatgaacagtgttaggaatcagctgacaggagagtttggggaagtcccagctacagcaagggattacaagtccaagaacactccctgggttgtgtttggagatgagaactacggagagggaagcagcagggagcatgccgctctagaacccaggcatcttggtggacgcgccatcatcgtaaagagcttcgcccgtatccatgaaaccaacttgaagaagcaaggtatgcttcctctgacgttctccaaagctgcagattacgataaggtcagacccgacgacaaagtatccctgagaggacttgcatcactagcccctggaaagcccgttgagtgtgtactgaagcacacagacggcagttcagacaccatcctcctcgaccacaccttcaacgagacgcaactcgagtggttccaagcgggcagcgccctcaacaggatgaaagaggtacaggcagcctcatag

SEQ ID NO: 66895 - protein, 783 aa, Strongylocentrotus purpuratus
MAYAVRASGSRMKSLMAAGLRARLLQTSAAASQVAMSRFEQDTFINYDQLDANLKIVKDRLQRPLTLSEKIVYGHLDKPKEQDIERGESYLKLRPDRVAMQDATAQMAMLQFISSGLPKVAVPSTIHCDHLIEAQVGGAKDLTRAKDLNKEVYNFLASAGAKYGVGFWKPGSGIIHQIILENYAYPGVLLIGTDSHTPNGGGLGGVCIGVGGADAVDVMADIPWELKCPNVIGVKLTGQLSGWTSPKDVILKVAGILTVKGGTGAIVEYFGPGVDSISCTGMGTICNMGAEIGATTSMFPFNSRMRDYLVATDRSEIADLADKNKHLLTADEGAQYDEVIEINLSELEPLINGPFTPDLMNPVSKVGEVAVKEGWPLEVKVGLIGSCTNSSYEDMSRAASIAQQALDNGIKCKAAFTVTPGSEQIRATIERDGQAATLREFGGIVLANACGPCIGQWDRQDVKKGEKNTIVTSYNRNFTGRNDANPATHAFVASPEVTTALALAGRLDFDPEVDELTGANGQKFKLKSPYGDELPSQGFDPGQDTFQPPPSDGSGIAVDVDPSSNRLQLLSPFQPNGQDLEDMVVLIKVKGKCTTDHISSAGPWLKYRGHLDNISDNLLIGATNIENGAMNSVRNQLTGEFGEVPATARDYKSKNTPWVVFGDENYGEGSSREHAALEPRHLGGRAIIVKSFARIHETNLKKQGMLPLTFSKAADYDKVRPDDKVSLRGLASLAPGKPVECVLKHTDGSSDTILLDHTFNETQLEWFQAGSALNRMKEVQAAS

SEQ ID NO: 66896 - DNA, 2754 bp, Nasonia vitripennis
  CDS (1)..(2754)
atgatgttaaaggcactttttattgttctgatcggatgtgccgtagcttttgctagccctgtcaaacgagatgctttggcagaaaggtctattgctaaggaagtaactaaaattggttctggattcaaagaactaatcaaggaaatatttgcagcaattgtaggacagattggtggagcgatcgcggataatctgcagggggcattccgtaagcttggagaacgtctgcacaccaaggaatacaaagaaggagttcaagaattttttgaaactatgcagaaattggaggaagctgaggacaaggttggcgaagctttcttttatttggttgagcaggcctacgagaagatcaagaacaacgaagaaggtaccgtgaatgctgaagaattcaagaaagtcgtggacgaattcaagcaaaagaaagtagctagtttggctgctgaagtacaacaaagatgcttcagcacaagcccactcacctttgcagccgcaaaggtggctatgtcaaaattcgactccactgcttacttaccttacgacaaattggatgagaacatcaaaattgttaagaaaaggttggacaggcccttgactctatcagaaaagattttgtactctcacttggatgaaccccagaagcaggacattgttcgtggaaccagctatttgcgtctgcgtcctgaccgtgtcgctatgcaggatgctacggctcaaatggctatgctccaattcatcagctctggactaccaagagttgctgttccatcaacaattcactgcgatcacttgattgaagcccagttgggtggagacaaagatttgaagcgtgccaaggacatcaacaaggaggtttacagcttcttgaaaactgctggtgctaaatatggtgtaggcttctggaatcctggatctggaatcattcatcagatcatccttgagaactatgccttccctggtcttctcatgattggtactgactctcacactcccaacggaggtggtcttggtggtctatgcattggtgttggtggtgctgatgctgtcgacgttatggctaacatcccatgggagcttaagtgtcccaaggtcatcggtgtcaagctcactggagaactgaaaggctggactagccccaaagacatcatccttaaggtcgcgggaatcctgaccgtcaagggtggtactggtgccatcgttgagtactttggaccgggtgtagacagcatcagctgcaccggtatggccaccatctgcaatatgggtgccgagatcggagccaccacatccgttttcccctacaacgacagaatgaaggactaccttaaggccacccagcgtgccagcatcgcctccgctgcagaccagttcaagggatcgcttctgactgctgacagcaacgccaagtacgaccaggttatcgaactcgatctgtccactctcgagcctcacgtcaacggaccttttactcctgatcttgctaatcccatttcgaaactgggcgccgaggcaaagaagaacggttggcccaatgaagttaaagttggtctcatcggctcctgcacgaacagctcctacgaagacatgggcaggtgtgccagcatcgccaagcaggccatgaagcacggtctgaaggctaaggccgcattcaacatcacccccggttccgagcaaatccgcgccaccatcgagcgtgacggaatctccaaagtcttcagagaatttggaggcaccgttcttgccaacgcctgcggaccctgcatcggtcagtgggatcgacaggacatcaagaaaggagataagaacaccattgtcacctcttataatcgtaacttcaccggtagaaacgacgccaacccctccacccacgccttcgtcaccagtcccgagctcgtcaccgctctcactttagctggacgtcttgacttcaaccctctgactgacaaactgaagggtgctgatggaaaggaattcctccttgacagtccttatggcgacgagctaccgagcaaaggattcgaccccggtatggacacgtacgacgcgcctccagccgacggaagcaaagtcagagtcgacgttgacccgaaatcccagcgtcttcagctgttggaaccattcgacaaatgggacggtaaagatctgaccgacttgactgttttgatcaaggtcaaaggaaagtgcacgaccgatcacatttccgctgccggaccttggctcaaataccgtggacacttggataacatatccaacaacatgttcatcggtgccaccaattccgagaacggtgagatgaacaagatcaagaaccagctgaccggtgagtggggtggtgtaccagatgtggctcgtcactacaaaaagaacggaatcaggtgggtcgctatcggtgacgacaactacggtgagggttcctctcgggagcacgccgctcttgaaccccgtcatcttggtggccgtgccatcatcgtcaagagctttgcccgtattcacgagaccaacttgaagaagcagggtatgcttcctcttacctttgccaacgcatcggactatgacaagattcagccgaccgacaagatcaacattctcggtttgaaggacctcgcacctggaaagcccgtgaaatgcgaaatcaagcacaaggatggcaaggtagataccatcaccctcaatcacactctcaacgaacagcaaatcgagtggttcagagcaggttcagctctcaaccgcatgaaggaaattgccgctggcaagtga

SEQ ID NO: 66897 - protein, 917 aa, Nasonia vitripennis
MMLKALFIVLIGCAVAFASPVKRDALAERSIAKEVTKIGSGFKELIKEIFAAIVGQIGGAIADNLQGAFRKLGERLHTKEYKEGVQEFFETMQKLEEAEDKVGEAFFYLVEQAYEKIKNNEEGTVNAEEFKKVVDEFKQKKVASLAAEVQQRCFSTSPLTFAAAKVAMSKFDSTAYLPYDKLDENIKIVKKRLDRPLTLSEKILYSHLDEPQKQDIVRGTSYLRLRPDRVAMQDATAQMAMLQFISSGLPRVAVPSTIHCDHLIEAQLGGDKDLKRAKDINKEVYSFLKTAGAKYGVGFWNPGSGIIHQIILENYAFPGLLMIGTDSHTPNGGGLGGLCIGVGGADAVDVMANIPWELKCPKVIGVKLTGELKGWTSPKDIILKVAGILTVKGGTGAIVEYFGPGVDSISCTGMATICNMGAEIGATTSVFPYNDRMKDYLKATQRASIASAADQFKGSLLTADSNAKYDQVIELDLSTLEPHVNGPFTPDLANPISKLGAEAKKNGWPNEVKVGLIGSCTNSSYEDMGRCASIAKQAMKHGLKAKAAFNITPGSEQIRATIERDGISKVFREFGGTVLANACGPCIGQWDRQDIKKGDKNTIVTSYNRNFTGRNDANPSTHAFVTSPELVTALTLAGRLDFNPLTDKLKGADGKEFLLDSPYGDELPSKGFDPGMDTYDAPPADGSKVRVDVDPKSQRLQLLEPFDKWDGKDLTDLTVLIKVKGKCTTDHISAAGPWLKYRGHLDNISNNMFIGATNSENGEMNKIKNQLTGEWGGVPDVARHYKKNGIRWVAIGDDNYGEGSSREHAALEPRHLGGRAIIVKSFARIHETNLKKQGMLPLTFANASDYDKIQPTDKINILGLKDLAPGKPVKCEIKHKDGKVDTITLNHTLNEQQIEWFRAGSALNRMKEIAAGK

SEQ ID NO: 66898 - DNA, 2355 bp, Magnaporthe grisea 70-15
  CDS (1)..(2355)
atgctggccctcaggagagctgccgcggcatcgccgctggcccgcgtgagcgccgtgacccgtcgtcgcatggcaacggtttcggacagcccgcttgacaggaaggtcaggcaaaacaactgggaggagaacaacttcatcccctacaagaagctgtcggagaacctcgccattgtccgcagtcgtctcaaccgtcccctcacatacgccgagaagattctctactctcacttggacaacccgcacgagcaggatattgagcgtggcgtttcatacctcaagctccgccctgaccgtgttgcttgccaggatgccaccgctcaaatggctatccttcagttcatgtcggctggcatgccctcggttgccaaccccaccaccgtccactgtgaccacttgattgaggcccaggttggtggccccaaggatctagagcgcgccgtcaacattaacaaggaggtctacgacttccttgcctctgcctgcgccaagtacaacatcggtttctggaagcccggctctggtatcatccaccagatccttctcgagaactacgctttccccggtggtcttctcatcggtactgactcgcacactcccaacggtggtggtctcggtatggctgccattggtgttggtggtgccgatgccgtcgacgttatggctggtctcccctgggagctgaaggctcccaagtacattggtgtccacctgactggccagatgtctggctggacttctgccaaggacatcatcaccaagcttgctggcatcacgactgtcaagggtggtactggtcacattgttgagtactacggtcctggtgtcgacaccctctccagcaccggtgccggaaccgtctgcaacatgggtgccgagattggtgccaccacctccgttttccgcttcactgagcgcatggccgactacctgaaggccaccaagcgttcagacatcgccgagtacgcccgcgcctacgccaaggagctccgcgaggacgaaggtgccgagtacgaccaggttatcgagatcaacctgtctgagcttgagccccacgtcaacggaccttttacccccgacttggccactcccatctccaagttcagcgaggctgtcaaggccaacggctggccttcggagctcaaggtcggtctcatcggctcttgcaccaactcctcgtacgaggacatgtcccgtggtgcctccattgcccgtgacgctctcgaccacggtttgaaggccaagactgctttcacaatcactcccggttcggagcagattcgtgctaccatcgcccgtgatggtcagctcgccaccttcgaggagtacggcggcatggtcctcgcaaacgcctgtggtccttgcattggtcagtgggaccgcaaggacgtcaagaagggcgaggccaactcgattgtctcttcgtacaaccgtaacttcaccggacgcaacgatggcaaccctgccacccactctttcgtcacctcccccgacttggtcgtcgccatgaccgtcgctggctctttgcacttcaaccctttgaccgacaagctcaaggacaaggatggtaacgagtttatgctgaagcccccgaccggcgaggctcttcccgctcgcggctatgatgccggtgagaacacctaccaggctccccccaaggaccgcgcatccgtctcggttgccgtcaacccctcgtccgaccgtctccaggttctctctccatttgaggcttgggatggcaaggatgccaaggacctccccgtccttatcaaggcccagggcaagaccaccaccgaccacatcagcatggctggcccgtggctcaagtaccgtgggcacttggacaacatctccaacaacatgttgattggcgccatcaacgaggccaacggtgaggccaacaaggtcaagaaccagcttactggcgagttcgacgctgtcccagctgttgctcgtgactacaagaagaacggtatcaagtgggttgtcatcggtgactggaactacggtgagggttcgtcgcgtgagcacgccgctcttgagccccgtcaccttggtggccttgccatcatcacccgcagcttcgcccgtatccacgagaccaacctgaagaagcagggtatgctcccgcttacctttgttgaccccgccgactacgagaagatcaagcccgacgacagggtcgacattaagtgcactgagctcgctcccggcaagaacatcaccatgactgtccaccccaaggatggcaaggctttcgacatccccttggctcacaccttcaacgagggccagattgagtggttcaagaacggaagtgcattgaacaccatggctaaggccaacaagaactga

SEQ ID NO: 66899 - protein, 784 aa, Magnaporthe grisea 70-15
MLALRRAAAASPLARVSAVTRRRMATVSDSPLDRKVRQNNWEENNFIPYKKLSENLAIVRSRLNRPLTYAEKILYSHLDNPHEQDIERGVSYLKLRPDRVACQDATAQMAILQFMSAGMPSVANPTTVHCDHLIEAQVGGPKDLERAVNINKEVYDFLASACAKYNIGFWKPGSGIIHQILLENYAFPGGLLIGTDSHTPNGGGLGMAAIGVGGADAVDVMAGLPWELKAPKYIGVHLTGQMSGWTSAKDIITKLAGITTVKGGTGHIVEYYGPGVDTLSSTGAGTVCNMGAEIGATTSVFRFTERMADYLKATKRSDIAEYARAYAKELREDEGAEYDQVIEINLSELEPHVNGPFTPDLATPISKFSEAVKANGWPSELKVGLIGSCTNSSYEDMSRGASIARDALDHGLKAKTAFTITPGSEQIRATIARDGQLATFEEYGGMVLANACGPCIGQWDRKDVKKGEANSIVSSYNRNFTGRNDGNPATHSFVTSPDLVVAMTVAGSLHFNPLTDKLKDKDGNEFMLKPPTGEALPARGYDAGENTYQAPPKDRASVSVAVNPSSDRLQVLSPFEAWDGKDAKDLPVLIKAQGKTTTDHISMAGPWLKYRGHLDNISNNMLIGAINEANGEANKVKNQLTGEFDAVPAVARDYKKNGIKWVVIGDWNYGEGSSREHAALEPRHLGGLAIITRSFARIHETNLKKQGMLPLTFVDPADYEKIKPDDRVDIKCTELAPGKNITMTVHPKDGKAFDIPLAHTFNEGQIEWFKNGSALNTMAKANKN

SEQ ID NO: 66900 - DNA, 2406 bp, Magnaporthe grisea 70-15
  CDS (1)..(2406)
atgcggccaattgggctttccagccgctctggtggtatcctactgaggataccgcgggctcaagcaattcgctgctgcgctggtcgtcgactctataccacaggccctccgctcccgcccatttacgaaaagctatactcgaactatagccttgtgcgcaaggttctgggaaggcagcggcttacgttggctgagaagatcctatacagtcatctggacgatgttgaggcgtcgttactaaatggcaccaagaacggtaccgacatccgcggcaatgcaaacctgcagctgaagcccgatcgggtgaacatgcaggacgcgtctgcgcagatggccctgctgcagttcatgtcttgtaatcttccgcaaacagccattccggcaagcatccactgtgaccacctgattgtcggcgaaaagggtgcggccgaggacctgacgtcaggcattaacatgaacaaggaggttttcgactttctagagtccgccgccaggaagtatggcttggacttttggccgcctggagcgggtatcattcatcagaccgtgctggagaactacgcgattcctggcatgatgatgcttggtaccgacagtcacactcccaatgccggcggcttgtgcaccatcgctatcggtgttggcggtgctgatgccgttgaggcccttgtcggagcgccatgggagcttaaggcaccaaagatactcaacgttcaccttaccggaaagttgagcgagtgggcttcacctaaagacatcatccttaaccttgcgggtcagcttaccgtccggggaggtactggctacatcatcgagtattccggcccgggagtcgacacgctcagcgccactggcatggcaacggtgacgaacatgggtgctgaggtcggcgcgacgacttcaatattcccatacacaccagcgtctgctcgctatctcaaatcgacaaggagggaggcagctgcgaacgcggcgtcgatgctacagacgtatcctggtgtcggcgctggtgacgaccagtacttcaggtttgaggcagacaagggcgctgagtttgatcaacaggtcaacattgatctctcgactctggaaccgcatatcaacgggccattcacgcctgatctctcgacacccctctccaagttcaaggagacgatcaaggcggagggctggccggagacattatccgcagggttgataggcagctgtaccaacagctcctatgaggacatgacgcgcgtagagagcatgctcaaggcagctggcgaagccggcctcaagccagccgcagacttctatatcacaccgggcagtgagcagatccgctctacactggagcgtgatgggacgctagagacttttactgacgccggtgggattgtcctgtcgaatgcatgtggcccatgtatcggccaatggaagaggcaggacaatattcccaagggacagccgaacgccatcctcacatcatacaaccgcaacttccgcggccggaatgacggtaacccgggaacgatgaacttcctcgcgtctcccgaaatcgtgacagctatggcttttgcagggtcgacgacctttaaccccgtcacggacagtctcaagaccccagacggaaaggacttcaaatttccccctccgcaaggactcgagggccccgcagcgccctttgactcgggcgtcgaggaactcttgccgctttgccagcaacccaacccccaagtcgacgttaagatttcgccaacctcggaacgtctcgcccttctggagcctttcgattcctttccggagcatgaccttaagggcctccgagttctggtcaaggtcacgggcaaatgcacgacggacaccatatctgcggccggaccttggctcaagtacaagggtcacctgcccaacatcagcaccaacaccctcaataccgccataaacgcggcgacgggtgaggtcaacgcggcttacgatctcgacggcagcaaacatacgatcccggatcttgcggcgcgttggcgggcggccggacgggagtgggttgtggtcgcggaacacaactacggcgagggcagtgctcgcgagcacgctgcgctgcagccgagatatctcggttgtcgtgccattgtgaccaagtcatttgcccgcatccacgagacgaacctgaagaagcagggtgttgtgcccttgacttttgcagaagagatcgactatgacaaaattgaggcgggcgacgaggttgagaccgtgggtctatacgacatgctgaagaacggcgggcagggagaggtgcaattgagggttacaaagggcgacggaagtgaggtgatgattccagtgaagcacgctgtgagcaaggaccaggctgggttcatcctggctggcagtgctttgaatatgctgtcgaaaagaaactag

SEQ ID NO: 66901 - protein, 801 aa, Magnaporthe grisea 70-15
MRPIGLSSRSGGILLRIPRAQAIRCCAGRRLYTTGPPLPPIYEKLYSNYSLVRKVLGRQRLTLAEKILYSHLDDVEASLLNGTKNGTDIRGNANLQLKPDRVNMQDASAQMALLQFMSCNLPQTAIPASIHCDHLIVGEKGAAEDLTSGINMNKEVFDFLESAARKYGLDFWPPGAGIIHQTVLENYAIPGMMMLGTDSHTPNAGGLCTIAIGVGGADAVEALVGAPWELKAPKILNVHLTGKLSEWASPKDIILNLAGQLTVRGGTGYIIEYSGPGVDTLSATGMATVTNMGAEVGATTSIFPYTPASARYLKSTRREAAANAASMLQTYPGVGAGDDQYFRFEADKGAEFDQQVNIDLSTLEPHINGPFTPDLSTPLSKFKETIKAEGWPETLSAGLIGSCTNSSYEDMTRVESMLKAAGEAGLKPAADFYITPGSEQIRSTLERDGTLETFTDAGGIVLSNACGPCIGQWKRQDNIPKGQPNAILTSYNRNFRGRNDGNPGTMNFLASPEIVTAMAFAGSTTFNPVTDSLKTPDGKDFKFPPPQGLEGPAAPFDSGVEELLPLCQQPNPQVDVKISPTSERLALLEPFDSFPEHDLKGLRVLVKVTGKCTTDTISAAGPWLKYKGHLPNISTNTLNTAINAATGEVNAAYDLDGSKHTIPDLAARWRAAGREWVVVAEHNYGEGSAREHAALQPRYLGCRAIVTKSFARIHETNLKKQGVVPLTFAEEIDYDKIEAGDEVETVGLYDMLKNGGQGEVQLRVTKGDGSEVMIPVKHAVSKDQAGFILAGSALNMLSKRN

SEQ ID NO: 66902 - DNA, 2367 bp, Gibberella zeae PH-1
  CDS (1)..(2367)
atgctcgctacccgccaggttctgggcaacatgtcccggggccgcgccctcgctggcgctgcctctggcttccgccgcatggcgaccgtctcagacaaccctctggacaagaaggtccgccagaacaactgggaggagggtaactacatcaactacaagaagatgtccgaaaaccttgatatcgtccgctctcgtctgaaccgacccctggcttatgccgagaagatcctgtactctcacttggctgatccccatggtcaagatattcagcgtggtcagagctacctcaagctgcgacctgatcgtgttgcttgccaggatgctaccgctcagatggccatcctccagttcatgtctgctggcatggacaaggttgccaaccccaccactgtccactgtgaccacttgattgaggctcaggtcggtggtgccaaggatcttgctcgcgctgttgacatcaacaaggaggtttacaacttcctttccactgcctgtgccaagtacgatatcggtttctggaagcccggttccggtatcatccaccaaattcttctcgagaactactgcttccccggtggtcttcttattggtactgactctcacactgtcaatggtggtggtcttggtatggccactatcggtgtcggtggtgctgatgccgtcgatgttatggccaacctcgactgggaactgaaggcccctaacgtcattggtgttaagctgaccggccagctcaacggctggactgctcctaaggatattatcctcaaggttgctgatatcctcactgtcaagggtggcactggtgccatcgtcgaataccacggccccggaaccgatgccatctcttgcactggtatggctactatttgcaacatgggtgctgaaatcggtgccactacctctgtcttccccttcaacgatcgcatgtacgattacctcgccgccaccaagcgaaaggagatcggtgacttcgcccgctcttacgcccacggcctccgccctgacgagaacgtcgagtacgaccagcttatcgagatcaacctctctgagctcgagccccacatcaacggtcctttcactcccgatctgggaactcccatctccaagttcagccaggctgtcaaggagaacggctggcccgaggagctcaaggtcggcctgatcggttcttgcaccaactcctcctacgaggacatgacccgtgctgcttccattgcccgtgatgctctcaaccacggtgtcaaggccaagtctgctttcactgtcactcctggttccgagcagatccgcgccaccattgagcgtgatggccagctccagaccttcgaggagttcggcggtatcgttcttgccaacgcttgtggtccctgcattggtcagtgggatcgacgtgacgtcaagaagggcgaggccaactccatcatctcttcttacaaccgtaacttcaccggccgaaacgacggtaaccctgccacccactctttcgtcgcctctcccgatctggtcgtcgccatgtctattgctggctcccttcacttcaaccctctcaccgacaccctaaaggataaggatggcaaggacttcaagcttgcccctcccaccggtgatggtctcccatcccgaggttacgaccccggccaggacacttaccaggccccccccaaggaccgcgccagtgtcaatgttgacgttgcccccacctctgaccgtcttcagatcctaactcctttcaagccttgggacggcaaggacgccaaggacatgcccatcctgatcaaggccaagggcaagaccactactgaccatatctccatggccggtccctggttgaagtaccgtggtcaccttgacaacatctccaacaacatgttgattggtgccatcaacgaggctaacgatgaggccaacaagatcaagaactacaccactggtgagtggggcgctgttcccgctgtcgctcgcgactacaagtccaagggcatcaagtgggttgtcattggcgactggaactacggcgaaggctcttctcgagagcatgccgctcttgagccccgtcaccttggtggtcttgccattatcacccgctccttcgctcgtatccacgagaccaacctcaagaagcagggtatgctgcccttgaccttctctgaccctgccgactacgacaagatccgacctgatgacaaggtcgatatcctctgcaccaagctccaagttggcaagcccctccccctcgttgtccaccctgccgatggcagcaagtccttcgaggtgcccctctctcacaccttcaacgaagcccaaatcgagtggttcaagaacggctccgccctcaacaccatggcgaaggctaccaagaactaa

SEQ ID NO: 66903 - protein, 788 aa, Gibberella zeae PH-1
MLATRQVLGNMSRGRALAGAASGFRRMATVSDNPLDKKVRQNNWEEGNYINYKKMSENLDIVRSRLNRPLAYAEKILYSHLADPHGQDIQRGQSYLKLRPDRVACQDATAQMAILQFMSAGMDKVANPTTVHCDHLIEAQVGGAKDLARAVDINKEVYNFLSTACAKYDIGFWKPGSGIIHQILLENYCFPGGLLIGTDSHTVNGGGLGMATIGVGGADAVDVMANLDWELKAPNVIGVKLTGQLNGWTAPKDIILKVADILTVKGGTGAIVEYHGPGTDAISCTGMATICNMGAEIGATTSVFPFNDRMYDYLAATKRKEIGDFARSYAHGLRPDENVEYDQLIEINLSELEPHINGPFTPDLGTPISKFSQAVKENGWPEELKVGLIGSCTNSSYEDMTRAASIARDALNHGVKAKSAFTVTPGSEQIRATIERDGQLQTFEEFGGIVLANACGPCIGQWDRRDVKKGEANSIISSYNRNFTGRNDGNPATHSFVASPDLVVAMSIAGSLHFNPLTDTLKDKDGKDFKLAPPTGDGLPSRGYDPGQDTYQAPPKDRASVNVDVAPTSDRLQILTPFKPWDGKDAKDMPILIKAKGKTTTDHISMAGPWLKYRGHLDNISNNMLIGAINEANDEANKIKNYTTGEWGAVPAVARDYKSKGIKWVVIGDWNYGEGSSREHAALEPRHLGGLAIITRSFARIHETNLKKQGMLPLTFSDPADYDKIRPDDKVDILCTKLQVGKPLPLVVHPADGSKSFEVPLSHTFNEAQIEWFKNGSALNTMAKATKN

SEQ ID NO: 66904 - DNA, 2436 bp, Gibberella zeae PH-1
  CDS (1)..(2436)
atggtttcaatggaggtcgccagccgctcaggcggtgccatgacgcaactcttgcgacgctctggtcccaacgctatccgatccactgctgctctctcttccaacaagaactcaaggaggaacttctcttccgtcaagtctcttcctcctacctacgagaagctttacaccaagtacactgatgttcgtcgtgtactgggcaagcagcgtcttacacttgccgagaagatcctctacagccatctcgacaaccccgaggagtcgctgcttagcaacaccgaaaatggacaaaacatccgtggcaaggctaacctgcgtctcaaccccgaccgtgtgaacatgcaggatgcttctgctcagatggccatcctccagttcatgtcttgcaacctcgccaagcctgctatccccgcaagcattcactgtgatcacttgattgtgggatccaagggtgctaaggatgatttgtctgctggtattgagaccaacaaggaggtgtttgacttccttgagtctgctgctcgcaaatacggaatggacttctggcctcctggcgctggaattattcatcagactgttctcgagaactacgctcttcctggactgatgatgcttggaaccgactctcacagtcccaacgccggtggtctttctacaatcactattggtgtcggcggtgctgatgctgtcgaggcgcttgttggtgctccttgggaactcaaggcccccaaggttctcggtgtgcaccttgttggcaagctgagcaactgggcttctcctaaggacgttattcttcgtctcgctggccaccttactgttcgtggcggtacaggctccatcattgagtactttggcgagggcgtcgatagcctcagcgccaccggcatggctaccatctgcaacatgggtgccgaagtcggtgctaccacttcaatcttcccctacaccaaggcctcagcgagataccttgactcgactcgacgatcgcaggccaacaagaacatcgaggctctcgagagctttgccggcaacagctctgaccccgatgcccgatggcaattcaaggccgatgagggtgccgagtacgacgacctcatcaccattgatctctccaccctcgagcctcacatcaacggacctttcactcctgatctggccacacccctctccaagttcaaggaggttgtcaaggagcaggaatggcctgaactcctctctgctggtctcattggtagctgcactaacagttcctatgaggatatgacccgagtcgagagtctgctcaaggatgcccagaaggctggcctcaagcccgctgctgacttctacatcacccctggaagtgaacagattcgcgctactctcgagcgagacggcacccttcaaactttccagcaggccggcggtatcgttctttccaacgcatgtggtccctgtattggtcagtggaagcgacaggatggtgttgagaagggcaccagcaacgctatcttgacctcttacaatcgaaacttccgtggtcgtaacgatggtaaccctgataccatgaacttcctcgcgtcccccgagattgttactgccatggctttcgctggatctaccaccttcaaccctgtgaccgacagcatcaagacccctgacggcaaggacttcaagttctccccccctcacggtctcgagggccctcagacccccttcgagtctggcaacgccgagttgggcgtcctgtctcaagagcctgaccccaacaccaagatcgccatctctcctacctctgagcgtttggccttcctcgaccctttccctgctttcccctcatccaatctctcaggcctccgcgtcctcgtcaaggtcaccggcaagtgcaccactgacactatctctgccgccggcccctggctcaagtacaagggtcatctgcccaacatcagcaccaacactcttaacaccgctatcaacaaagagactggcgaagtcaacgccgcttacgaccttgatggctccaagcacaccattcccgagcttggtcagctctggaaggatcgtggccaggagtggctggttgtcgccgagcacaactatggcgagggctctgcccgtgagcacgctgctctccagcctcgctacctcggtgcccgcgttgtcttgaccaagtcttttgcccgtatccacgagaccaacctcaagaagcagggtgttgtccccctgactttcgaggacgaggctgactacgacaagatcgcagctggtgacgaggtcaccactgtcggtctttacgagatgctccagaacggcggcaagggcgatgttcagctgcgtgtcaccaagtcctctggcgaggaggtcctcatcccgaccaagcatgctgtcaccaaggaccaggctggtttcattctcgccggcagtgccctcaacttgctgtccaagggcatctaa

SEQ ID NO: 66905 - protein, 811 aa, Gibberella zeae PH-1
MVSMEVASRSGGAMTQLLRRSGPNAIRSTAALSSNKNSRRNFSSVKSLPPTYEKLYTKYTDVRRVLGKQRLTLAEKILYSHLDNPEESLLSNTENGQNIRGKANLRLNPDRVNMQDASAQMAILQFMSCNLAKPAIPASIHCDHLIVGSKGAKDDLSAGIETNKEVFDFLESAARKYGMDFWPPGAGIIHQTVLENYALPGLMMLGTDSHSPNAGGLSTITIGVGGADAVEALVGAPWELKAPKVLGVHLVGKLSNWASPKDVILRLAGHLTVRGGTGSIIEYFGEGVDSLSATGMATICNMGAEVGATTSIFPYTKASARYLDSTRRSQANKNIEALESFAGNSSDPDARWQFKADEGAEYDDLITIDLSTLEPHINGPFTPDLATPLSKFKEVVKEQEWPELLSAGLIGSCTNSSYEDMTRVESLLKDAQKAGLKPAADFYITPGSEQIRATLERDGTLQTFQQAGGIVLSNACGPCIGQWKRQDGVEKGTSNAILTSYNRNFRGRNDGNPDTMNFLASPEIVTAMAFAGSTTFNPVTDSIKTPDGKDFKFSPPHGLEGPQTPFESGNAELGVLSQEPDPNTKIAISPTSERLAFLDPFPAFPSSNLSGLRVLVKVTGKCTTDTISAAGPWLKYKGHLPNISTNTLNTAINKETGEVNAAYDLDGSKHTIPELGQLWKDRGQEWLVVAEHNYGEGSAREHAALQPRYLGARVVLTKSFARIHETNLKKQGVVPLTFEDEADYDKIAAGDEVTTVGLYEMLQNGGKGDVQLRVTKSSGEEVLIPTKHAVTKDQAGFILAGSALNLLSKGI

SEQ ID NO: 66906 - DNA, 2367 bp, Apis mellifera
  CDS (1)..(2367)
atgtcgtactgcacccgtatccttcgggatcagaaactcgcgatattcgtgacagatatccagcaaagatgtttcagcgcgagcgcgttgagttttgccgcccaaaaggtggcgatgtccaaattcgattcgactagttatctcccttacgacaagttggaggagaaattaaaagtagtgaggaagagattgaaccgaccattgacgctgtccgaaaaagttttatattctcatctcgatgaacccgacaagcaggaaattcaacgtggaaccacttatctcagattgcgaccagatcgagtggctatgcaggatgccactgctcagatggccatgctgcaatttatcagctctggactgccaaaagtcgccgtgccctcgacgatccactgcgaccacttgatcgaggcccaagtgggtggcgagcaagatttgaaacgggccaaggacatcaacaaggaagtgtacaatttcctgaagacggccggtgccaagtacggcgtcggtttctggaaccctggttccggtatcatccaccaaatcatcctcgagaattacgcatttccaggtctgctgatgatcggcaccgactcccacacgcccaacggaggcggtctgggctgtctctgcatcggtgtaggtggcgctgacgccgtggacgtgatggccaacataccgtgggagttgaaatgccccaaggtgatcggggtgaagctgacgggggccctcaaggggtggacgagtcccaaggacatcattctcaaggtggccggtatcctgacggtgaaaggaggaaccggtgccatcgtcgaatactatgggccaggtgtcgagagcataagttgcactgggatggctaccatctgcaacatgggcgccgagataggcgcgacaacgtccatcttcccctacaactttcgtatgcaggattacttgagggcgactggacgatccgagatcgcaaacgcggccgatctgcacaggaagagccttctcactgccgacgccaacgctaaatacgatcagatcatcgagctcgatctttctacgttggagccacacgtgaacggaccgttcacgcccgatctcgctcatcccatttctaagttgggtgaaactgccaagaagaatggctggcctaacgagatcaaggtcggcctgatcggttcctgcacgaacagctcttacgaggacatgggtcgttgcgctaatatcgctaagcaagccatcgataatggattgaaagcgaaatcggcgttcaatgtcacgccaggctcggaacaaattcgtgccacgatcgagcgtgacggaatagccgaaattcttcgaaaatttggaggcaccgtgttggcgaacgcttgcgggccctgcatcggtcaatgggatcgtaaagacatcaagaagggtgataagaacacgatcgtcacatcgtacaatcgtaatttcacgggtcgaaacgatgccaatccggcgacacacgctttcgtcaccagccctgaactcgtcactgctctttcgctcgctggccgattggactttaatccggttaccgataagctcaaggccaaggatggaaaggaattccttcttaaagatccgttcggtgatgaacttccaaaccgcggtttcgaccctggccaagacacttatgacgctccaccagcagatggcagcagcgtgaaagtcgacgtgaacccgaagagcgagagattgcaattattagaaccgttcgacaaatgggacggcaaagatctcaccgatttgaccgttttaatcaaagtaaaaggaaaatgtaccaccgaccacatctcggctgctggcccatggctgaaatatcgtggccacttggacaatatctcgaacaatatgttcataggagctgtgaatgcagaaaatggcgagatgaacaaaataaagaaccagcttactggcgagtggggtaaagttccggacgttgccaggcattacaagaaaaatggcgtcaaatgggtagcagttggcgacgagaactacggcgagggttcgtcccgagagcacgcagctctggagccgagacacttaggcggccgtgccattatcgttaagagctttgcacgtatccacgagaccaacttgaagaaacaaggattgttgcctctcaccttcgccaatgctggcgattacgataagattcaacctactgataagatcagccttcttggattaaacgatttggcacctggaaaacccgttcaagcagaaatcaaacacaaggatgggaaagtggacaagatcacgttaaatcacaccatgaacgagcaacaaatttcctggttcaaggcaggttcagctctaaaccgtatgaaggagatcgccagtgggcagtaa

SEQ ID NO: 66907 - protein, 788 aa, Apis mellifera
MSYCTRILRDQKLAIFVTDIQQRCFSASALSFAAQKVAMSKFDSTSYLPYDKLEEKLKVVRKRLNRPLTLSEKVLYSHLDEPDKQEIQRGTTYLRLRPDRVAMQDATAQMAMLQFISSGLPKVAVPSTIHCDHLIEAQVGGEQDLKRAKDINKEVYNFLKTAGAKYGVGFWNPGSGIIHQIILENYAFPGLLMIGTDSHTPNGGGLGCLCIGVGGADAVDVMANIPWELKCPKVIGVKLTGALKGWTSPKDIILKVAGILTVKGGTGAIVEYYGPGVESISCTGMATICNMGAEIGATTSIFPYNFRMQDYLRATGRSEIANAADLHRKSLLTADANAKYDQIIELDLSTLEPHVNGPFTPDLAHPISKLGETAKKNGWPNEIKVGLIGSCTNSSYEDMGRCANIAKQAIDNGLKAKSAFNVTPGSEQIRATIERDGIAEILRKFGGTVLANACGPCIGQWDRKDIKKGDKNTIVTSYNRNFTGRNDANPATHAFVTSPELVTALSLAGRLDFNPVTDKLKAKDGKEFLLKDPFGDELPNRGFDPGQDTYDAPPADGSSVKVDVNPKSERLQLLEPFDKWDGKDLTDLTVLIKVKGKCTTDHISAAGPWLKYRGHLDNISNNMFIGAVNAENGEMNKIKNQLTGEWGKVPDVARHYKKNGVKWVAVGDENYGEGSSREHAALEPRHLGGRAIIVKSFARIHETNLKKQGLLPLTFANAGDYDKIQPTDKISLLGLNDLAPGKPVQAEIKHKDGKVDKITLNHTMNEQQISWFKAGSALNRMKEIASGQ

SEQ ID NO: 66908 - DNA, 2334 bp, Candida glabrata CBS 138
  CDS (1)..(2334)
atgttgtctgctagaacagtggtgagaaacactggtgtcaggagactggctacagtctctaacttgactagagactctaaggtcaaccagaacttgttggaggaccattctttcatcaattacaagcaaaacatcgagtatgtcgacatagtgagaaagaggctaggcagaccattgacctacgctgaaaagatcctgtacggtcacttggacgacccacacggacaacagatcgagagaggtgtttcctatttgaagctaagaccagaccgtgtcgcatgtcaggatgctaccgcccaaatggccatcttgcaattcatgtccgctggcttgccagaagtagctagaccagtcacagtccactgtgaccacttgatccaagcccaaattggtggtgagaaggatttgaagagagccgtcgacctaaataaggaagtctacgacttcttggcttctgcctccgctaagtacaacatcggtttctggaagccaggttctggtattatccaccaaattgttctagaaaactacgctttcccaggtgctttgatcatcggtaccgactcccacactccaaacgctggtggtctaggtcaattggctatcggtgtcggtggtgctgatgccgtcgatgtcatggctggtctaccatgggaactaaaggctccaaagattttgggtgttaagttgaccggtagaatgaacggttggacctctccaaaggatatcatcttgaagttggctggtattacaactgtcaagggtggtactggtaagatcgtcgaatacttcggtgaaggtgttgacactttctccgccactggtatgggtactatctgtaatatgggtgctgaaatcggtgctaccacttccgttttcccattcaacaagtctatgattgactacttgaaggctactcgtcgtgacaagatcgccgaattcgctcaattgtaccacaaggatctattgtccgctgaccaaggtgctgaatacgatgaagtcattgaaattgacttgaacactctagaaccatacgttaacggtccatttaccccagatttggccactccaatctctaagatgaaggaagttgctgtcgaaaacaattggccattggaagtcaaggtcggtttgatcggttcctgtactaactcttcttacgaagatatgtctcgttccgcttctatcatcaaggatgctgcctctcacggtttgaaggctaagtccatcttcacagttaccccaggttctgaacaaattagagccaccattgaacgtgatggtcaattggaaactttcaaggaattcggtggtattgtcttggctaacgcctgtggtccatgtattggtcaatgggaccgtcaagacatcaagaagggtgacaagaacactattgtctcttcttacaacagaaacttcacttccagaaacgatggtaacccacaaacccacgctttcgttgcttctccagaaattgttactgctttcgccattgccggtgacttgagattcaacccattgactgacaagttgaaggacaaggatggtaacgaattcaagttgaaggaaccattcggtaacggtttgccagaacgtggttacgacccaggtgagaacacttaccaagctccaccaaaggaccgtaacgctgttgatgttaaggttgctccaacctccgaccgtctacaagtcctaaagcctttcaagccatgggatggtaaggatgctctaaacatgccaatcttgatcaagtctttgggtaagaccaccactgaccatatctctatggccggtccatggttgaagtacagaggtcacttggaaaacatttctaacaactacatgattggtgctatcaatgctgaaaacaagaaggccaacagtgttagaaacgtctacactggtgaatacaagggtgttccagacactgccagagactacagagacgaaggtattaagtgggttgttattggtgatgagaacttcggtgaaggttcttctcgtgaacacgctgctttggaaccaagattcttgggtggtttcgctatcattactaagtcatttgctcgtatccacgaaactaacttgaagaagcaaggtttgttgccattgaacttcaagaacccagctgactacgacaagattaacccagatgacaagattgatattctaggattgaccgagcttgctccaggtaagaacgtcaccatgagagttcatccaaagaacggtgaagcttgggactgtgagttgactcacactttcaacagcgagcaaatcgaatggttcaagtacggttctgctctaaacaagattaaggctgacaaagcttaa

SEQ ID NO: 66909 - protein, 777 aa, Candida glabrata CBS 138
MLSARTVVRNTGVRRLATVSNLTRDSKVNQNLLEDHSFINYKQNIEYVDIVRKRLGRPLTYAEKILYGHLDDPHGQQIERGVSYLKLRPDRVACQDATAQMAILQFMSAGLPEVARPVTVHCDHLIQAQIGGEKDLKRAVDLNKEVYDFLASASAKYNIGFWKPGSGIIHQIVLENYAFPGALIIGTDSHTPNAGGLGQLAIGVGGADAVDVMAGLPWELKAPKILGVKLTGRMNGWTSPKDIILKLAGITTVKGGTGKIVEYFGEGVDTFSATGMGTICNMGAEIGATTSVFPFNKSMIDYLKATRRDKIAEFAQLYHKDLLSADQGAEYDEVIEIDLNTLEPYVNGPFTPDLATPISKMKEVAVENNWPLEVKVGLIGSCTNSSYEDMSRSASIIKDAASHGLKAKSIFTVTPGSEQIRATIERDGQLETFKEFGGIVLANACGPCIGQWDRQDIKKGDKNTIVSSYNRNFTSRNDGNPQTHAFVASPEIVTAFAIAGDLRFNPLTDKLKDKDGNEFKLKEPFGNGLPERGYDPGENTYQAPPKDRNAVDVKVAPTSDRLQVLKPFKPWDGKDALNMPILIKSLGKTTTDHISMAGPWLKYRGHLENISNNYMIGAINAENKKANSVRNVYTGEYKGVPDTARDYRDEGIKWVVIGDENFGEGSSREHAALEPRFLGGFAIITKSFARIHETNLKKQGLLPLNFKNPADYDKINPDDKIDILGLTELAPGKNVTMRVHPKNGEAWDCELTHTFNSEQIEWFKYGSALNKIKADKA

SEQ ID NO: 66910 - DNA, 2358 bp, Candida glabrata CBS 138
  CDS (1)..(2358)
atgtttagagctgtcggtagaagaaacctggctacagttagtcgaaatatcccctctgttccggagaatttgagagcatacactccaccttatgctaaattactaaataacttggacaaagttaagcaaatactgaacaatgaaccattgaccttggctgaaaagattctgtactcacatctgtgtaaccccgaagaatctcttacgtcctctagagtcgcagacatcagaggccagaagtacttgaaattgaatcctgatagagtcgccatgcaagacgcctctgcacaaatggctcttttgcagttcatgaccactggcctatcagaaactgctgttccagcatcgatccactgtgatcatttaattgtcggaaaagatggtgaaaccaaggatttgagaaactccattaagaccaaccaggaagtttttgatttcctggagagctgtgcgaagagatacggcatacagttctggggtcctggttccggtattatccatcaaatcgtgctggagaacttctccgcgcctggtttgatgatgctaggtacagactcacacactccaaacgctggtggtctaggtgccatcgctattggtgttggtggtgctgatgccgtggacgccttaactggaaccccatgggaattaaaggcaccaaaggttctgggtgttaaattgaccggtaaactacacggctggtcggctccaaaggatgtcatcaccatgcttgcaggtaaactaaccgttagaggtggtacaggctacattgtcgaatattttggagaaggtgtagaaactctatcatgtaccggtatggccacaatctgtaatatgggtgctgagatcggtgctaccacatccactttcccataccaagctgcacacaagagatatctggaagccactggtagaggttttgttgctactgcagcagacgccgccttggctaactacaatttcctaagagcggatgaaggtgctcaatatgacgaagtaatagaaattaacctatccgagttagaaccacacgtaaatggccccttcactcccgacttgtcgacaccaattactaaatatgctgaaagaagtctggaagaaaaatggcctcaaaatatctccgctgcattgattggttcatgtaccaattcatcataccaagatatgagtcgtgtgatcgatttagtcaaccaagctgaaaaggctggtttgaagcctcgcattcctttctttgttactccaggatctgaagctatcagagctacattggatagagatggccttattaagaaatttgaagataatggtgccattgtgttagctaacgcatgtggtccttgtattggtcaatgggatagagaagatgttccaaaggaatcaagcgagaccaactcaatttttacctcctttaacagaaacttcagggctagaaatgatggtaacagaaacaccatgaatttcctaacctccccagaaatcgttactgctatgagctattcaggtaatgctcaattcaacccattaactgatgctattccattaccaaatggcggtgaatttagattcaatccacctgtaggtgaagaacttccttccaagggatttgaacacggtagggataaattctatccagcaggaaaattaagtgctgatccaaatgttgaagtcaaagtttctccaacctctgatcgtttacaacttttggaacctttcaaaccttggaacggtaaggaattaaggactaatgtattgatgaaggtagaagggaaatgtacaactgatcatatttcagctgcaggtgtatggttgaagtataaaggtcatctggagaatatttcctacaacactttaattggtgcacaaaacaaggaaactggcgaggtgaataaggcttatgacttagatggtactgcctatgatatccctggattgatgatgaagtggaaagaggatggtagaccatggacagttgttgctgagcacaactatggtgaaggttcagcaagagaacatgctgctttgtctccaagatacttgggtggtcaaatgatacttgtcaaatcttttgccagaatccatgagacaaacttgaagaaacaaggtatgctaccactaacatttgctgatgaggcagactatgacagaatttctggtggtgacactttggagactgtgggcctaatagatttagtagctcaagacggtaataatggcgggttcctagatgtcaaagtaactaaaccaaatggtgaaagcttcataatcaaaaccaaacacactctgtcaaaggatcaaattgacttctttaaggctggatcagctatcaacttcattggtgaacaacgtagaaaccactga

SEQ ID NO: 66911 - protein, 785 aa, Candida glabrata CBS 138
MFRAVGRRNLATVSRNIPSVPENLRAYTPPYAKLLNNLDKVKQILNNEPLTLAEKILYSHLCNPEESLTSSRVADIRGQKYLKLNPDRVAMQDASAQMALLQFMTTGLSETAVPASIHCDHLIVGKDGETKDLRNSIKTNQEVFDFLESCAKRYGIQFWGPGSGIIHQIVLENFSAPGLMMLGTDSHTPNAGGLGAIAIGVGGADAVDALTGTPWELKAPKVLGVKLTGKLHGWSAPKDVITMLAGKLTVRGGTGYIVEYFGEGVETLSCTGMATICNMGAEIGATTSTFPYQAAHKRYLEATGRGFVATAADAALANYNFLRADEGAQYDEVIEINLSELEPHVNGPFTPDLSTPITKYAERSLEEKWPQNISAALIGSCTNSSYQDMSRVIDLVNQAEKAGLKPRIPFFVTPGSEAIRATLDRDGLIKKFEDNGAIVLANACGPCIGQWDREDVPKESSETNSIFTSFNRNFRARNDGNRNTMNFLTSPEIVTAMSYSGNAQFNPLTDAIPLPNGGEFRFNPPVGEELPSKGFEHGRDKFYPAGKLSADPNVEVKVSPTSDRLQLLEPFKPWNGKELRTNVLMKVEGKCTTDHISAAGVWLKYKGHLENISYNTLIGAQNKETGEVNKAYDLDGTAYDIPGLMMKWKEDGRPWTVVAEHNYGEGSAREHAALSPRYLGGQMILVKSFARIHETNLKKQGMLPLTFADEADYDRISGGDTLETVGLIDLVAQDGNNGGFLDVKVTKPNGESFIIKTKHTLSKDQIDFFKAGSAINFIGEQRRNH

SEQ ID NO: 66912 - DNA, 2388 bp, Kluyveromyces lactis NRRL Y-1140
  CDS (1)..(2388)
atgctatctgctagaagatcggtagtaaaccgtgctagaaacctatccacagttatcggtaatggtgtcgaaccatttctgcaagctcccgctgacttgaagtctagggtaccgccatatgccaaacttatttccaatctagaagttgtcaagagtcttgtaaatgatgctccgttgacactggctgaaaaaatcctatactcacatttatgtgatcctcatgaatcaataacatcctccaatctaaacgatattagaggtcaacaatatttgaagcttaacccagatcgtgtggctatgcaagatgcatctgcacaaatggctcttttacagttcatgactacagggttaccagaaacagctgttccaggttctattcactgtgatcatctaatcgttggtaaagacggtgaagccaaggatttagtgtcatccattgcaacaaaccaagaagtcttcgatttcttgcaatcatgttcatccaaatatggtatccagttctggggacctggttctggtattatccatcaaatcgtgctagagaacttctctgctcctggtttgatgatgttgggtaccgattctcacactccaaacgctggtgggttaggtgcaatcgctattggtgtcggtggtgctgatgcagtcgatgctttgaccggcacgccttgggaattgaaagctcctaagattttgggtgttaaattaacaggacacttaagtggatggacatctccaaaggatgttatcaccaaactggctggtatcttaaccgtaagaggtggtaccggtttcatcgttgaatatttcggtgaaggtgttggcactctatcctgtacaggtatggcgaccatctgtaatatgggtgccgaaatcggtgctaccacttctactttcccttaccaagaagctcacaaacgttatctacaggctaccaacagaggctttatcgcgtctgctgcagaccaagctttgcaccaatataatttcctaaaagctgatgaaggagctgaatacgataaagtgatcgaaatcaatttgtcagagttagagcctcacgtaaatggaccatttacacctgatttatctacaccaatatctgagttcggggaaaaaactttgaaagaggattggccacaaagaatttctgctggtttgatcggttcttgtaccaattcttcttatcaagatatgacccgtgctgctgaattggttagacaagcttctcaagcagggttgaagccaaaaatcccattcttcgtaactccaggttctgaacaaattagagcaacactagaaagggatggcctaatcaagacatttaaggacaatggtgctattgttcttgcaaacgcttgtggtccttgtatcggccaatgggataggcaagatgtagccaaaacatccaaagaatataactccattttcacatcgttcaacagaaacttcagagcaagaaatgacggtaatagaaacacaatgaatttcctcacttctccagaaatggtcacagcaatgatttactctggagatgcgcaattcaacccaatgaaggatgctatcaaattacagaatggcgaagagttcaaattcaatccaccaaagggagaagagctacctggtgccggattcatttcaggtagaaaggaattctatcctgaaaatgatccgaaacctaatccatccgtggaagttaaagttgctccagattccgaccgtctacaattgttagatccatttgaaccttggaacggtaaagaattgaaaactactgttcttttgaaggtggaaggaaagtgtacgacagatcatatttccgccgccggtgtctggttaaagtataaaggtcatctagaaaacatctcatacaacacgttaataggtgcacaaaataaagaaacaggtgaagtaaataaagcttatgacttagatggaactgcatacggtatcccagaattaatgatcaaatggaagcaagataagagaccatggattgtagtagcagaacataactatggtgaaggttctgctagagaacatgctgcattgtcaccaagattccttggaggtgaaataattttggtcaaatcttttgcaagaattcatgagacaaatttgaagaagcaaggtatgttgccattaacttttgcagatgaatctgattatgatagaatctcttctggtgacgttatagaaaccgttaatttagcggacatgattgctaagtatggtgacaatggaggtactttggacgttaaagtaacgaaacgttccggtgaatcattcatcattaagactaaacataccatgtccaaggaccaagttgaattcttcaaggcaggttctgcaattaactacatcggtactctacgtcgttcagcggcataa

SEQ ID NO: 66913 - protein, 795 aa, Kluyveromyces lactis NRRL Y-1140
MLSARRSVVNRARNLSTVIGNGVEPFLQAPADLKSRVPPYAKLISNLEVVKSLVNDAPLTLAEKILYSHLCDPHESITSSNLNDIRGQQYLKLNPDRVAMQDASAQMALLQFMTTGLPETAVPGSIHCDHLIVGKDGEAKDLVSSIATNQEVFDFLQSCSSKYGIQFWGPGSGIIHQIVLENFSAPGLMMLGTDSHTPNAGGLGAIAIGVGGADAVDALTGTPWELKAPKILGVKLTGHLSGWTSPKDVITKLAGILTVRGGTGFIVEYFGEGVGTLSCTGMATICNMGAEIGATTSTFPYQEAHKRYLQATNRGFIASAADQALHQYNFLKADEGAEYDKVIEINLSELEPHVNGPFTPDLSTPISEFGEKTLKEDWPQRISAGLIGSCTNSSYQDMTRAAELVRQASQAGLKPKIPFFVTPGSEQIRATLERDGLIKTFKDNGAIVLANACGPCIGQWDRQDVAKTSKEYNSIFTSFNRNFRARNDGNRNTMNFLTSPEMVTAMIYSGDAQFNPMKDAIKLQNGEEFKFNPPKGEELPGAGFISGRKEFYPENDPKPNPSVEVKVAPDSDRLQLLDPFEPWNGKELKTTVLLKVEGKCTTDHISAAGVWLKYKGHLENISYNTLIGAQNKETGEVNKAYDLDGTAYGIPELMIKWKQDKRPWIVVAEHNYGEGSAREHAALSPRFLGGEIILVKSFARIHETNLKKQGMLPLTFADESDYDRISSGDVIETVNLADMIAKYGDNGGTLDVKVTKRSGESFIIKTKHTMSKDQVEFFKAGSAINYIGTLRRSAA

SEQ ID NO: 66914 - DNA, 2367 bp, Kluyveromyces lactis NRRL Y-1140
  CDS (1)..(2367)
atgttgtctgctcgtgttgccttgaagaagcaaggagtcgttagacaaggagtcatcagacacttggctaccggagtctctagtactatgactagagactctaaagttcatcaaaatttgttggaagaccattccttcattaactataaacaaaacattgagtatgtcaatatcgtcagagaaagactaggacgtccattgacatacgcagaaaagattttgtacggtcatttggatgatcctcatggtcaagaaatcgaaagaggtgtttcttatttgaaattgagaccagatcgtgttgcttgtcaagatgctaccgctcaaatggctatcttgcaattcatgtcagcaggtttacctcaagttgctaagccattgactgttcactgtgaccatttgattcaagctcaaattggtggtgaaaaggatttgaagagagccattgatatcaacaaggaagtttacgatttcttggctactgctactgctaaatataatatgggtttctggaagccaggttccggtattatccatcaaatcgttttggaaaactatgctttcccaggtgctttgattattggtaccgattcgcatactccaaatgctggtggtctaggtcaattggctattggtgttggtggtgctgatgctgtcgatgtcatgtccgatttggcatgggaattgaaggctccaaagattatgggtgttaagttgaccggtagaatgaacggttggacttctccaaaggatattattctaaagttggctggtatcactaccgtcaaaggtggtactggtaagattgttgaatatttcggtgacggtgttgacactttcagtgctactggtatgggtaccatctgtaatatgggtgctgaaatcggtgccactacatccgttttcccattcaacaagtctatgattgactatttggatgctactggtagagacaagattgctcaattcgctcaattgtaccacaaggatttgttgtccgctgatgaaggtgctgagtacgatgaaatcatcgaaatcgatttgaacactttggaaccatatgtcaatggtccattcactccagatttggctactccaatctctaagatgaaggatgtcgctgtcaagaacaactggcctctagaagttaaagtcggtcttatcggttcttgtaccaactcttcttacgaagatatgtccagagctgcttccgtcgttaaggatgctgctacccacggtctaaaatctaagtctatcttcactgtgactccaggttctgaacaaatcagagctaccatcgctagagatggtcaattggaaactttcaaagaattcggtggtaccgttttggctaacgcttgtggtccatgtatcggtcaatgggacagacaagatatcaagaagggtgacaagaacaccattgtttcctctttcaacagaaacttcactgctagaaacgatggtaacccagatactcactccttcgttgcctctccagaaatcactaccgctttcgccattgctggtgatttgagatttaaccctctaaccgacactttgaaggacaaggacggtaacgaattcatgttgaaaccaccaactggtgttggtttgccagttaagggttacgacccaggtgaaaacacttaccaagctccaccaaaggaccgttcttccgttactgtccaagtttctccaacgtctgaccgtctacaattgttgaaacctttcaaggcttgggatggtaaggatgctttcgatatgccaatcttgatcaaatctctaggtaagaccaccactgaccatatctctatggctggtccatggttgaagtacagaggtcatttggaaaacatttcaaacaactatatgattggtgctattaacgctgaaaacaagaaggctaactgtgtcaagcaccactacactggtgaatacgccggtgttccagacactgctagagcttacagagatgcaggtatcagatgggttgtcattggtggtgaaaacttcggtgaaggttcttctcgtgaacacgctgccttggaaccaagattcttgggtggtttcgctattattaccaaatccttcgcaagaattcacgaaactaacttgaagaaacaaggtatgttgcctttgaactttgctgaaccagctgcttacgacaagatcaacccagatgacaccatcgacatcttgggtttgactactctagctccaggtaagaacttgatcatgagagttcatccaaaggaaggtgaagcttgggaaaccccattgtctcacactttcaacgctgaacaaatcgaatggttcaaggccggttctgctttgaacagattggctaacgccaagaaggctaagaactga

SEQ ID NO: 66915 - protein, 788 aa, Kluyveromyces lactis NRRL Y-1140
MLSARVALKKQGVVRQGVIRHLATGVSSTMTRDSKVHQNLLEDHSFINYKQNIEYVNIVRERLGRPLTYAEKILYGHLDDPHGQEIERGVSYLKLRPDRVACQDATAQMAILQFMSAGLPQVAKPLTVHCDHLIQAQIGGEKDLKRAIDINKEVYDFLATATAKYNMGFWKPGSGIIHQIVLENYAFPGALIIGTDSHTPNAGGLGQLAIGVGGADAVDVMSDLAWELKAPKIMGVKLTGRMNGWTSPKDIILKLAGITTVKGGTGKIVEYFGDGVDTFSATGMGTICNMGAEIGATTSVFPFNKSMIDYLDATGRDKIAQFAQLYHKDLLSADEGAEYDEIIEIDLNTLEPYVNGPFTPDLATPISKMKDVAVKNNWPLEVKVGLIGSCTNSSYEDMSRAASVVKDAATHGLKSKSIFTVTPGSEQIRATIARDGQLETFKEFGGTVLANACGPCIGQWDRQDIKKGDKNTIVSSFNRNFTARNDGNPDTHSFVASPEITTAFAIAGDLRFNPLTDTLKDKDGNEFMLKPPTGVGLPVKGYDPGENTYQAPPKDRSSVTVQVSPTSDRLQLLKPFKAWDGKDAFDMPILIKSLGKTTTDHISMAGPWLKYRGHLENISNNYMIGAINAENKKANCVKHHYTGEYAGVPDTARAYRDAGIRWVVIGGENFGEGSSREHAALEPRFLGGFAIITKSFARIHETNLKKQGMLPLNFAEPAAYDKINPDDTIDILGLTTLAPGKNLIMRVHPKEGEAWETPLSHTFNAEQIEWFKAGSALNRLANAKKAKN

SEQ ID NO: 66916 - DNA, 2337 bp, Debaryomyces hansenii CBS767
  CDS (1)..(2337)
atgttagctgcttcaagaactgctgctagagctccacgttcaattcgtggattagctaccgccggcttgactagggactctcaagttaaccaaaacttgttagaaacccactcattcatcaattacaagaaaaacttggaaaacgtccaaattgtcaaggacagattaaacagaccattgacttacgctgaaaagttgttgtacggtcacttggatgacccacacggacaagacatcgaaagaggtgtttcttacttgaagttaagaccagacagagttgcatgtcaagatgctaccgcacaaatggccatcttgcagtttatgtccgccggtatgccacaagtcgctactccatccaccgttcactgtgatcacttgattcaagcacaaattggtggtgaaaaggatttagccagagccattgacttgaacaaggaagttttcgatttcttgtcaactgcttgtgccaaatacgacttgggtttctggaagccaggttcgggtattattcatcaaattatcttggaaaactacgctttcccaggtgctttattgattggtactgattctcacactccaaatgctggtggtttaggtcaattagctattggtgtcggtggtgctgatgccgtcgatgtcatggccaacttggcttgggaattaaaggccccaaagattattggtgttaagttgaccggtaagatgtctggttggacttctccaaaggatatcatcttgaagttggctggtattaccaccgtcaagggtggtaccggtgctattgtcgaatacttcggttccggtgttgaaactttctcatgtaccggtatgggtaccatttgtaatatgggtgctgaaatcggtgctactacctccgttttcccatacaacaagtctatggttgactacttgaatgctaccaagagatctcaaatcgccgaattcgccaacctctacaaggaagacttcttagctgctgacgaaggttgtgaatatgatcaagttatcgaaatcgacttgaacaccttagaaccacatgttaacggtccattcaccccagatttagctactccaatctccaagatgaaggaaactgctgaagctaacggatggcccttagaagtcaaggttggtttgattggttcttgtaccaactcttcttacgaagatatgaccagagctgcttccattattaaggatgctggtgctcacggtttaaaggccaagtccatttacaccgtttccccaggttctgaacaagttagagctaccattgccagagatggtcaattaaagactttcgaagattttggtggtgttgtcatggctaatgcctgtggtccatgtattggtcaatgggatagacaagacattaagaagggtgacaagaacactattgtctcttctttcaacagaaatttcacttccagaaatgacggtaacccagctacccacgctttcgttgcttccccagaaattaccactgctttcgctatctccggacacttaggtttcaaccctcttactgactccttaaaggattctgaaggtaatgaattcaaattaaaggaaccagttggtgtcggtttaccaccaaacggttacgatgccggtgttaacacttaccaaggtccaccaaaggacagatcaagtgttgaagttgtcattaacccaagctccgacagattacaaaagttgactccattcaaggcatgggatggtaaggacgctgaaagattaccaattttgattaaggctcttggtaagactactaccgatcatatttctatggctggtccatggttgaaataccgtggtcacttagaaaacatttctaacaactatatgattggtgctaccaactgtgaaaacggtgaagttaataacgttaagaaccattacactggtgaatataagggtgttccagaaactgccgctgactacagagatgctggtaagagatgggttgttattggtgacgaaaatttcggtgaaggttcttcaagagaacacgctgctttagaacctagattcttaggtggtttcgccattattactaagtctttcgctcgtatccacgaaactaacttgaagaaacaaggtttattaccattgaacttcgttaacgttgctgactacgataaaattaacccagatgatgaagttgatcttctcggtttgaccaccttatccccaggtaagcacttaactttaagagttcatccaaaggacggtgaagcttgggatgctgaattatcgcacacctacaactctgaacaaattgaatggttcaagtgcggttcagctttaaacaagatggccaccaatgctaaataa

SEQ ID NO: 66917 - protein, 778 aa, Debaryomyces hansenii CBS767
MLAASRTAARAPRSIRGLATAGLTRDSQVNQNLLETHSFINYKKNLENVQIVKDRLNRPLTYAEKLLYGHLDDPHGQDIERGVSYLKLRPDRVACQDATAQMAILQFMSAGMPQVATPSTVHCDHLIQAQIGGEKDLARAIDLNKEVFDFLSTACAKYDLGFWKPGSGIIHQIILENYAFPGALLIGTDSHTPNAGGLGQLAIGVGGADAVDVMANLAWELKAPKIIGVKLTGKMSGWTSPKDIILKLAGITTVKGGTGAIVEYFGSGVETFSCTGMGTICNMGAEIGATTSVFPYNKSMVDYLNATKRSQIAEFANLYKEDFLAADEGCEYDQVIEIDLNTLEPHVNGPFTPDLATPISKMKETAEANGWPLEVKVGLIGSCTNSSYEDMTRAASIIKDAGAHGLKAKSIYTVSPGSEQVRATIARDGQLKTFEDFGGVVMANACGPCIGQWDRQDIKKGDKNTIVSSFNRNFTSRNDGNPATHAFVASPEITTAFAISGHLGFNPLTDSLKDSEGNEFKLKEPVGVGLPPNGYDAGVNTYQGPPKDRSSVEVVINPSSDRLQKLTPFKAWDGKDAERLPILIKALGKTTTDHISMAGPWLKYRGHLENISNNYMIGATNCENGEVNNVKNHYTGEYKGVPETAADYRDAGKRWVVIGDENFGEGSSREHAALEPRFLGGFAIITKSFARIHETNLKKQGLLPLNFVNVADYDKINPDDEVDLLGLTTLSPGKHLTLRVHPKDGEAWDAELSHTYNSEQIEWFKCGSALNKMATNAK

SEQ ID NO: 66918 - DNA, 2409 bp, Debaryomyces hansenii CBS767
  CDS (1)..(2409)
atgttaagtgctaggagatctattggagcaaaccgtacccttaatggtattagaaggttagctactcaagcaaaattttcatctcttgaagttccccaagattatgtatcaagaacaccaccttatgctaaattaatagaaaagttaaacttggtcaaaaagatcgttgataataagccattaacattagcggaaaagatattatattctcatttggttgatccagaagagagtttagcgtcatgcaaaggccagttatctaatatcagaggtcaagaatacttaaaattgaatcctgatagagttgcaatgcaagatgcgtccgcccaaatggcattattacaattcatgacatgcggtatgtcgaaaactgcggttccgggttctattcattgtgatcatttaattgtcgggaaagatggtgctgaggacgatttgactaaatccatcgctacaaataaagaggtttttgatttcttacaaagttgcggtgaaaaatatggtattcaattttggggaccaggttcgggtattattcatcaaattgttttagaaaacttttctgttcccggcttaatgatgttgggaactgattcacacaccccaaatgctggtggtttaggtgctatcgcaattggtgttggaggtgctgatgcagttgatgctttgactggtactccatgggaattaaaggcaccaaaagtattaggtgtaaaattaagtggtcacttatctggctggtcatcgccaaaggatgttatcacccatttggcaggtgttttaactgttcgtggtggtactggatatattgtggaatactttggagatggcgttgaaagtttgtcttgtacaggtatggccaccatttgtaacatgggagcagaaattggtgcaactacttcgactttcccttatcaggatgcccaccgtcgttatttgattcaaacagatagagaaccaatttctaaagctgctgacgttgctaataaagaattcaacttcttgagagcagatgaaggtgctgaatatgataaagtagttgaaattaacttatctgagttagaacctcatgttaatggtccattcactccagatttatcaacacctatatctgaatttggtgaaaccgcgaaaaaggaaaactggccttccacggtaagtgctgggttaattggttcttgtacaaactcttcttatcaagatatgtctcgtgctgtttctcttattaagcaagcagaagacgcaggcttgaagccaaagattccattctttgttactcctggttcagaacaaattagagctactatcgaaagagatggattaattgatactttcgagaaaaatggtgcgattgtgttagctaatgcatgtggtccttgtattggtcaatgggacagaacagatgtctcaaaaacttctactgaatctaacgcaatcttcacttcttttaatagaaatttcagagcaagaaatgatggtaacagaaatactatgaactttttaacttctcccgacatggttactgctatgatttattcaggagatatgagttttaatccagttactgactccattaaattgccaaatgggaaatcttttaggtttcaacctcctattggtgaggaattaccaggtagtggatttattaagggccgtaaggaattctatccagaagctgatccacagccaaaagctgatgttgaagttaacgtttcaccagaatctgataggttgcaactcttagatcctttccaaccttggtcaggtgatgagatgtctactaatgttttgcttagagttgaaggtaaatgtaccactgatcatatctctgctgctggtgcttggttgaaatataaaggtcacttagaaaatatctcatacaatactttaattggtgcagttaataaagatacaggtgaagtgaataaagcctatgacttaaatggtgatcaatatagcattcctgaattaatgatgaaatggaaagatgaagaccgtccatgggttgttgttgccgaacataactacggtgaaggttctgcaagagaacacgctgcattatcaccaaggtttttgggcggttcgatcattttagttaaatcatttgctagaattcatgaaacaaacttgaagaaacaaggtatgttacctttaacttttgctgatgaagctgattatgataaaatttctccatgtgacttattaaccacggttgatttaaaggatatgattgctaaggatggtaataacggaggagttttaagaatgaaggtgactaaaaaggatggtactgaatttgaaatcttgtgtaagcatactatgtctaaagatcaaattgaatttttcaaagcgggttctgctattaatcacatcggtaatttaaaaagagaacaagaagcatcgatctaa

SEQ ID NO: 66919 - protein, 802 aa, Debaryomyces hansenii CBS767
MLSARRSIGANRTLNGIRRLATQAKFSSLEVPQDYVSRTPPYAKLIEKLNLVKKIVDNKPLTLAEKILYSHLVDPEESLASCKGQLSNIRGQEYLKLNPDRVAMQDASAQMALLQFMTCGMSKTAVPGSIHCDHLIVGKDGAEDDLTKSIATNKEVFDFLQSCGEKYGIQFWGPGSGIIHQIVLENFSVPGLMMLGTDSHTPNAGGLGAIAIGVGGADAVDALTGTPWELKAPKVLGVKLSGHLSGWSSPKDVITHLAGVLTVRGGTGYIVEYFGDGVESLSCTGMATICNMGAEIGATTSTFPYQDAHRRYLIQTDREPISKAADVANKEFNFLRADEGAEYDKVVEINLSELEPHVNGPFTPDLSTPISEFGETAKKENWPSTVSAGLIGSCTNSSYQDMSRAVSLIKQAEDAGLKPKIPFFVTPGSEQIRATIERDGLIDTFEKNGAIVLANACGPCIGQWDRTDVSKTSTESNAIFTSFNRNFRARNDGNRNTMNFLTSPDMVTAMIYSGDMSFNPVTDSIKLPNGKSFRFQPPIGEELPGSGFIKGRKEFYPEADPQPKADVEVNVSPESDRLQLLDPFQPWSGDEMSTNVLLRVEGKCTTDHISAAGAWLKYKGHLENISYNTLIGAVNKDTGEVNKAYDLNGDQYSIPELMMKWKDEDRPWVVVAEHNYGEGSAREHAALSPRFLGGSIILVKSFARIHETNLKKQGMLPLTFADEADYDKISPCDLLTTVDLKDMIAKDGNNGGVLRMKVTKKDGTEFEILCKHTMSKDQIEFFKAGSAINHIGNLKREQEASI

SEQ ID NO: 66920 - DNA, 2373 bp, Yarrowia lipolytica CLIB122
  CDS (1)..(2373)
atgctgagaagtgctcgattttgccaggcacgattctcggccatcaaggctcgtggtcttgccaccaccgccaacgcctccggcctcagcgtgcccgctgacttcaagacccgaacccctccctacgcggagctcatcaaccgtcttgatcaggtcaagaagattatcaaccgaaatgatttgaccttggctgaaaaaattctgtattcacatcttcacaaccctgaggagactcccagcatcactcgaggtgacacttacctcaagctcaaccccgaccgagtggccatgcaggatgcctctgctcagatggctctgttgcagtttatgacctgtggtcttccttccaccgccgtgcctgcgtccattcactgtgaccatctgattgttggccgagacggtgccgatgatgatctgacccgatctatcgctaccaaccaggaggtgttcgacttcctgcagcaatgtgccgagaagtacggcatccagttctggggccccggatccggtatcatccaccagattgtgctggagaacttctctgttcccggtctcatgatgctcggaaccgactctcacactcccaacgctggtggtctcggtgccattgccatcggtgttggaggagccgacgctgtcgacgctttgaccggaactccctgggaactgaaggcccccaagattctcggagtcaagctgactggaaagctgtccggctgggcttctcccaaggatgttattacccatctggctggcaagctgactgtgcgaggaggaaccggaaacatcatcgagtaccacggcgagggtgttgactccctgtcctgcaccggtatggccacaatttgcaacatgggtgccgaggtcggtgctaccacctctacgttcccctttacggagtccatgcgacgatacttggaggccaccggacgagctcccattgccgcagcagcagctgctgctcgagaccgaggcttcttggctgctgacgagggtgctcagtatgacgaggttgtagaggtcaacctgtccgagctcgagccctgtatcaacggtcccttcactcccgatctggccacccccctctccaagtactccaccaaggtcacctctgagaagtggcccgataccgtgtctgccggtctcattggatcatgcaccaactcctcctacgaggacatgacccgagtcgcctctctggttgagcaggcccgagacaacggtctcgaggccaagattcccttcttcatcacccccggatccgagcagattcgagccaccatcaagaaggacggtctgacagacgtgttcgagtctgctggtgcggtggttctggccaacgcctgtggaccctgtatcggtcagtgggatcgaactgacgagaccaagcccggcgagttcaactccatcttcacctctttcaaccgaaacttccgagcccgaaacgatggtaaccccgaaaccatgaacttcctgacctctcccgagattgtcaccgctatgatctactctggagacgctcacttcaaccccatgaccgactccatcaccaccaaggacggcaaggaattcaagttccagccccctaagggtaccgagctgcccgaggagtttgccaagggccgacccgagttctaccccgaggctgccccccagccccatcccgaggtgaacgtgactgtctcccccgattccgagcgactgcagctccttgagccttttgagccctttaacaaccaggagctcaagctctcggtactcatgaaggttgagggcaagtgcaccaccgaccacatttcggccgctggtgcctggctcaagtacaagggccatcttgagaacatttcctacaacaccctgattggtgctcttaacaaggagacccagaaggtcaaccacactattgatgccgctgacggctccgagcagtctatccccgacctcatgatcaagtggaaggagcagggcaagccctggattgttgttgctgagcacaactacggagagggttccgcccgagagcatgctgctctgtctccccgattcctcggtggacaggccatcctagtcaagtctttcgctcgaattcacgagaccaacctcaagaagcagggtatgcttcctctgacctttgagaacgaggccgactacgacaagatccaggcctgcgacactctggagaccctggacctcctggacatgcttgagaagggtggtgacaacggtggctttgtccagatgcgagctaccaagtctgacggctctacctacgacttccgagcccgacacaccatgtctgccgaccaggttgatttcttcaaggctggttctgccatcaacttcattggagcccagaaggctgccaacaagtaa

SEQ ID NO: 66921 - protein, 790 aa, Yarrowia lipolytica CLIB122
MLRSARFCQARFSAIKARGLATTANASGLSVPADFKTRTPPYAELINRLDQVKKIINRNDLTLAEKILYSHLHNPEETPSITRGDTYLKLNPDRVAMQDASAQMALLQFMTCGLPSTAVPASIHCDHLIVGRDGADDDLTRSIATNQEVFDFLQQCAEKYGIQFWGPGSGIIHQIVLENFSVPGLMMLGTDSHTPNAGGLGAIAIGVGGADAVDALTGTPWELKAPKILGVKLTGKLSGWASPKDVITHLAGKLTVRGGTGNIIEYHGEGVDSLSCTGMATICNMGAEVGATTSTFPFTESMRRYLEATGRAPIAAAAAAARDRGFLAADEGAQYDEVVEVNLSELEPCINGPFTPDLATPLSKYSTKVTSEKWPDTVSAGLIGSCTNSSYEDMTRVASLVEQARDNGLEAKIPFFITPGSEQIRATIKKDGLTDVFESAGAVVLANACGPCIGQWDRTDETKPGEFNSIFTSFNRNFRARNDGNPETMNFLTSPEIVTAMIYSGDAHFNPMTDSITTKDGKEFKFQPPKGTELPEEFAKGRPEFYPEAAPQPHPEVNVTVSPDSERLQLLEPFEPFNNQELKLSVLMKVEGKCTTDHISAAGAWLKYKGHLENISYNTLIGALNKETQKVNHTIDAADGSEQSIPDLMIKWKEQGKPWIVVAEHNYGEGSAREHAALSPRFLGGQAILVKSFARIHETNLKKQGMLPLTFENEADYDKIQACDTLETLDLLDMLEKGGDNGGFVQMRATKSDGSTYDFRARHTMSADQVDFFKAGSAINFIGAQKAANK

SEQ ID NO: 66922 - DNA, 2391 bp, Aspergillus nidulans FGSC A4
  CDS (1)..(2391)
atgttgaggcagatcgtctcgcaacggagcgccgcacgcaggcagctaattgatcagcttgcgccatgcctgcgccgcggcctggccaccgctacagactcgactcccacctcttcgcgcatgcctccctattccaaaatcgtacaaaatcttgaacaagttcgcaaggtgctgggatcatctcgggcccttactctggcggagaagattctgtactctcatcttgacaatgcggaggagtcacttttgactggtacgaacaatggacgcgacatccgcggcaaggcggatctgaagctgaagcctgaccgcgttgcgatgcaggatgcgtctgcacaaatggccttgttgcagttcatgtcttgcggcttgccgtcgaccgcagttccggccagtattcactgtgaccatatgattgtgggtgagcgcggtgccgacaccgatctgccagcgtcgatccaaggaaacaaggaggtgttcgatttcttggagagcgcttcaaagagatacggaattgagttctggcctcccggtgctggtatcatccaccagagcgtcttggagaactattccgcccctggtcttatgatgctgggaacggatagtcatacacctaacgccggtggcctgggtgccattgccatcggtgtcggtggcgctgatgccgttgacgctcttgttgacgctccttgggaactgaaagcccctcgcatcctcggtgtcagactggagggcaagctccaaggctgggccgcgcccaaggatatcatccttcacctcgctggaaagcttaccgttcgcggtggcaccggctttgtcatcgaataccacggccccggagttgaaacactcagcaccaccggtatggcgacgatttgtaacatgggtgcggaagttggcgccacaacttcccttttccccttctcccccaaccatgtgccgtacctgaaggcgacgaaccgcgcagatgtcgccgaggcagcggccaagatcgcctctgcagggtcttcgagcctgctccgagcagacaccagcgccgaatacgatgagctcatcacgatcgacctttctaccctagaaccgcacatcaacggccccttcacgcccgatctctctgttccgctgtcgcgcttcgctgaaaccgtccgcaaaaacaactggccggagactttcaacgccggccttattggcagctgcactaacagctcctatgaagacatgacacgcgccgagcacctcgtcaaacaagccaacgccgccggtctcaagccgaaagcagaccttttcatcacccctggtagcgaacagatccgcgccaccctcgaccgtgaccaaaccctctccaccttctcatctgctggcggcaccgtcctcgccaacgcctgcggtccctgcattggccaatggaagcgcacagacgatgtccccaagggcaccgataatgccatcttcacctcctacaaccgcaacttccccggccgcaatgacggcaaccgccgcacaatgaacttcctcgcttctcccgagctcgtcactgcccttacctacgccggctccaccaccttcaaccctgtcactgactccatcaccactccttccggttcagaattccgctttgaaccccctaccggccaagacttgcccagcaaaggcttcgaggccggaaaccccgccttccagccctccgcccctgtgcctgattccagcgtcgaggtcaaggtctctcctacatctacccgcctcgctcttctcgagcctttcgcccctttccccaactccgacctccagaacctcagcgtcctctacaaagtcaagggccagtgcacaacggataccatttccgctgccggaccttggctcaagtacaagggccacttgcccaacatctccgccaacaccctcattggcgctgtgaatgccgctaccggtgagacgaacgtcgcctacgacgaggctggcaagcagcacaccatccctgatcttgctgcacaatggaaagcccagggccgcgagtggctcgtcgtcgctgaagagaactatggtgaaggttccgctcgtgaacacgccgctcttcagccacgctacctgggtggccgcgtcattctcgccaagtccttcgctcgtatccacgagaccaacctgaagaagcagggtgttgttcctttgaccttcgctgacaaggccgactatgaccgcattgatgcttgcgatgtcgttgctaccgagggcctgtacgagacgctgaagaacggcggcaagggtgaggtcaagcttcgtgttacgaagaagagtggcgaggagattgttattcctgtgaagcacaccttgagtgcggatcagtcttctttcattctggcgggcagtgcgttgaacgtgctttccaagaggtag

SEQ ID NO: 66923 - protein, 796 aa, Aspergillus nidulans FGSC A4
MLRQIVSQRSAARRQLIDQLAPCLRRGLATATDSTPTSSRMPPYSKIVQNLEQVRKVLGSSRALTLAEKILYSHLDNAEESLLTGTNNGRDIRGKADLKLKPDRVAMQDASAQMALLQFMSCGLPSTAVPASIHCDHMIVGERGADTDLPASIQGNKEVFDFLESASKRYGIEFWPPGAGIIHQSVLENYSAPGLMMLGTDSHTPNAGGLGAIAIGVGGADAVDALVDAPWELKAPRILGVRLEGKLQGWAAPKDIILHLAGKLTVRGGTGFVIEYHGPGVETLSTTGMATICNMGAEVGATTSLFPFSPNHVPYLKATNRADVAEAAAKIASAGSSSLLRADTSAEYDELITIDLSTLEPHINGPFTPDLSVPLSRFAETVRKNNWPETFNAGLIGSCTNSSYEDMTRAEHLVKQANAAGLKPKADLFITPGSEQIRATLDRDQTLSTFSSAGGTVLANACGPCIGQWKRTDDVPKGTDNAIFTSYNRNFPGRNDGNRRTMNFLASPELVTALTYAGSTTFNPVTDSITTPSGSEFRFEPPTGQDLPSKGFEAGNPAFQPSAPVPDSSVEVKVSPTSTRLALLEPFAPFPNSDLQNLSVLYKVKGQCTTDTISAAGPWLKYKGHLPNISANTLIGAVNAATGETNVAYDEAGKQHTIPDLAAQWKAQGREWLVVAEENYGEGSAREHAALQPRYLGGRVILAKSFARIHETNLKKQGVVPLTFADKADYDRIDACDVVATEGLYETLKNGGKGEVKLRVTKKSGEEIVIPVKHTLSADQSSFILAGSALNVLSKR

SEQ ID NO: 66924 - DNA, 2397 bp, Aspergillus nidulans FGSC A4
  CDS (1)..(2397)
atgagttggtggtcctcctggattactccgaatgcatctctttcggcgtcgggtcgctccgctcgacgaaaaagtctgctctattcactgaccggtcgtaatgctctacagtttggcgtcaactatgcgcggcagattcgcaatttggaaatcgcgaaacgaggctcttcgcgaccgctaactttgaccgagaaactgttatactctcaccttattacctctgagaaaaacacctgggatgtggagcgcattgaacgagggaagactatcctagagcttcgtccggaccgtgtagcttgtcatgatgccacggcatccatggccttgctccagttcatcagtgcaggccttccgcgagtcgcagtcccaacgacggtacatagcgatcacttgatcatctctaagaagggggctgaagaggatatgcatcgcgcacttggagagcatgctgaagtatacgacttcctcagcagtgcatctaggaagtatggcatcgggttctggaagccaggatcgggtattatacacactgtcattttcgagaactacgcaacacccggtggcctcatcatcggtacagactcacacacgccgaatgctggcggcctgggcatgctcggaattggggtcggtggcgcagatgctgttgatgctatgtccggaatgccttgggagcttgtcgctcctaaagtggtgggggtccgcttgacaggccagctacaaggctggagttctaccaaagacatcatctgcagacttgcaggtctgttgacggtgtcggggggcaaaggccgagtcatcgagttcttcggaccgggaacccagaccttgggagcgacagccatggcgactatctgcaatatgtcggcagaaataggatcgacctcttgcatcttcccatataccgacgcaatgggccgatatctggagaccacgcaacgagcccacgttattgagatggcccagagagcgaggtctgcgcttctcaacgctgatgagggcgctgacaagtactatgatcaagttattgagctagatctcagcacactggaaccgcacgtcaacggaccgttcacccctgacctggcacaccctatctcaaaattgaagactgccgtcgctgcggaagattggcctgtggacttgagccatgctatggtcggcagttgtaccaacagctcatacgaagatctcgataaaactcgtcagatcgttgcacaagcacgagcggccgggatcacaaagctcccgacaccgttccttgtcacaccgggtagtgaacagatccgtgcaacagcagaggcagatggcatactcgacgaacttcgagatgccggagccgttgttctcagcagctcatgcggtccatgcgttggatcgtgggaccgcaaagatgtcgacgtgaagggaaaggaaaagaactcggtgatctccagcttcaatcgcaattttgtcggaagacatgacagtaatccggccacacactcctttgtcaccagcccagaactagtggctgcgttcgcctatgcgggtcgcctcgatttcaaccccctgaccgatccagttaccgtgcccgggggaccgagtaaggagttgtactttagcccacctgttagccaagagctccccatttctttcaaagccggatcagataccttccaagaaccttcgctagagggaacagacctccctgtgcaaattcgcccaggatctgaccggctgcaacttctccagccatttcctccctggcagccggggtgcgctgatggtatggaattgctgatcaaggtaaagggaaaatgcaccaccgaccacatttcccctgctggaccgtggtacaaatatcggggccatcttgagaacatctgtaacaacatgcttacgaccgccaccaatgcgttcgtaggccaaggtgaccctcgtctgcttggccacactcgccatcctataacctcaaaagtggaaggcgctccgcaggtggcacgcgatcttaagcagcggggtgtccggtggtgtatcgtaggtgatcacaactacggtgagggcagctcgcgcgagcacgcagccctcgaaccacgttatttgggcggggtggcagtcattgctcgctcattcgctcggattcacgaaaccaatctgaaaaagcaaggcatgcttcccctgacgttcgccgaccccgccacctatgagcgcattgctgaagctgatcggatcactttgattggtgttgaagaaggtgagctatgcccgggctcgtccgtgacgatgcgagtcgagcccaggcgaggagaggtctgggaagcggaactaaagcatagctaccacagcgggcagattccatggcttcgcgctgggagtgccctgaactacatcaaagccacggctctggctcaatag

SEQ ID NO: 66925 - protein, 798 aa, Aspergillus nidulans FGSC A4
MSWWSSWITPNASLSASGRSARRKSLLYSLTGRNALQFGVNYARQIRNLEIAKRGSSRPLTLTEKLLYSHLITSEKNTWDVERIERGKTILELRPDRVACHDATASMALLQFISAGLPRVAVPTTVHSDHLIISKKGAEEDMHRALGEHAEVYDFLSSASRKYGIGFWKPGSGIIHTVIFENYATPGGLIIGTDSHTPNAGGLGMLGIGVGGADAVDAMSGMPWELVAPKVVGVRLTGQLQGWSSTKDIICRLAGLLTVSGGKGRVIEFFGPGTQTLGATAMATICNMSAEIGSTSCIFPYTDAMGRYLETTQRAHVIEMAQRARSALLNADEGADKYYDQVIELDLSTLEPHVNGPFTPDLAHPISKLKTAVAAEDWPVDLSHAMVGSCTNSSYEDLDKTRQIVAQARAAGITKLPTPFLVTPGSEQIRATAEADGILDELRDAGAVVLSSSCGPCVGSWDRKDVDVKGKEKNSVISSFNRNFVGRHDSNPATHSFVTSPELVAAFAYAGRLDFNPLTDPVTVPGGPSKELYFSPPVSQELPISFKAGSDTFQEPSLEGTDLPVQIRPGSDRLQLLQPFPPWQPGCADGMELLIKVKGKCTTDHISPAGPWYKYRGHLENICNNMLTTATNAFVGQGDPRLLGHTRHPITSKVEGAPQVARDLKQRGVRWCIVGDHNYGEGSSREHAALEPRYLGGVAVIARSFARIHETNLKKQGMLPLTFADPATYERIAEADRITLIGVEEGELCPGSSVTMRVEPRRGEVWEAELKHSYHSGQIPWLRAGSALNYIKATALAQ

SEQ ID NO: 66926 - DNA, 2301 bp, Aspergillus nidulans FGSC A4
  CDS (1)..(2301)
atgctgttcgggactcggggcatggccaccgttgccgacctcgacaagaaggtcgagatgtgcaatctcgaaaagggcaactacatcaactacaagaagatgtccgagaacctggacgttgttcgccgtcgtttgactcgtcctctcacatacgccgagaagattctgtactctcaccttgacgacccccagaaccaggacatcgagcgtggcaagtcctacctcaagctccgccctgaccgtgttgcttgccaggatgccaccgcccagatggccatcctgcagttcatgtcggctggtatgccgtccgtcgctactcccaccaccgtgcactgtgatcacttgattgaggctcagcttggtggtgagaaggatcttgctcgcgcgaacgagatcaacaaggaggtctacgacttccttgcctcttcgactgccaagtacaacattggtttctggaagcctggctctggtatcattcaccagattatccttgagaactacgccttccccggtggtcttatgatcggtaccgattctcacactcctaacgctggtggtcttgctattgctgctattggtgttggtggtgccgatgccgtcgatgtcatggctggccttccttgggaattgaaggctcccaaggtcatcggtgttaggctcactggtgagatgtccggctggaccgctcccaaggatatcatcctcaaggtcgctggtctcctgactgtcaagggtggtactggtgccatcattgaataccacggtcctggtgtcaactccctctctgccactggtatggccaccatctgtaacatgggtgctgagattggtgccaccacctctctcttccccttcaacgaccgtatgtacgactatctgaaggctaccaagcgtcagcagattggtgacttcgcccgctcctacgccaaggacctacgcgaggatgagggtgctgagtacgaccagctgatcgagatcaacctgtccgagctcgagccccacatcaacggtcccttcacccctgacttggctactcccatctctcagttcaaggaggctgtcaaggccaacggctggcccgaggagctcaaggtcggtttgattggctcttgcaccaactcttcttacgaggacatgtctcgtgctgcttccatcgcccaggatgctctcgaccacggtctgaaggccaagtctatcttcactgttactcctggttccgagcagattcgcgctaccattgagcgtgacggtcagctcaagacccttgaggagttcggtggtgtcatcctggccaacgcctgcggtccttgcattggacagtgggaccgcaaggatgtcaagaagggtactcccaactccattgtctcttcttacaaccgtaacttcactggtcgtaacgatgccaaccctgctactcacgctttcgtcacttcccccgaccttgtcgttgctctgagcattgctggtactctcaacttcaaccccctcaccgacactctcaaggacaaggatggcaaggagttcaagcttaaggcccctactggtgacggtctccccagccgtggctacgaccccggccgcgacacctaccaggctcctcccaccgaccgcagcagtgtcgatgttgctgtttccccctccagtgaccgtcttcagctcctcgctggattccagccttgggacggcaaggatgccactggcattcctatcctgatcaagtgccagggcaagactactactgatcacatctccatggctggcccatggctcaagtaccgtggtcaccttgacaacatctctaacaacatgctgatcggtgccgtcaacgctgagaacggcgaggccaacaagatcaagaacgttttcactggcgagtatggtgctgtccccgccacggctcgtgactacaaggctcgtggtgttaagtgggttgttatcggtgactggaactacggtgagggtagctctcgtgagcacgctgcccttgagccccgccaccttggcggtctcgccatcatcacccgcagctttgcccgtattcacgaaaccaaccttaagaagcagggtatgcttcccctcaccttctccgaccctgccgactacgaccgcatcccccccgacgccaccgtcgacctcctctgcacggaactcgccgttgacaagcccatgaccctccgtgttcaccccaaggatggtgcctccttcgacgtcaagctcagccacaccttcaacgagtcccagattgagtggttcaaggacggttccgccctcaacaccatggcccgcaagtctggcaactaa

SEQ ID NO: 66927 - protein, 766 aa, Aspergillus nidulans FGSC A4
MLFGTRGMATVADLDKKVEMCNLEKGNYINYKKMSENLDVVRRRLTRPLTYAEKILYSHLDDPQNQDIERGKSYLKLRPDRVACQDATAQMAILQFMSAGMPSVATPTTVHCDHLIEAQLGGEKDLARANEINKEVYDFLASSTAKYNIGFWKPGSGIIHQIILENYAFPGGLMIGTDSHTPNAGGLAIAAIGVGGADAVDVMAGLPWELKAPKVIGVRLTGEMSGWTAPKDIILKVAGLLTVKGGTGAIIEYHGPGVNSLSATGMATICNMGAEIGATTSLFPFNDRMYDYLKATKRQQIGDFARSYAKDLREDEGAEYDQLIEINLSELEPHINGPFTPDLATPISQFKEAVKANGWPEELKVGLIGSCTNSSYEDMSRAASIAQDALDHGLKAKSIFTVTPGSEQIRATIERDGQLKTLEEFGGVILANACGPCIGQWDRKDVKKGTPNSIVSSYNRNFTGRNDANPATHAFVTSPDLVVALSIAGTLNFNPLTDTLKDKDGKEFKLKAPTGDGLPSRGYDPGRDTYQAPPTDRSSVDVAVSPSSDRLQLLAGFQPWDGKDATGIPILIKCQGKTTTDHISMAGPWLKYRGHLDNISNNMLIGAVNAENGEANKIKNVFTGEYGAVPATARDYKARGVKWVVIGDWNYGEGSSREHAALEPRHLGGLAIITRSFARIHETNLKKQGMLPLTFSDPADYDRIPPDATVDLLCTELAVDKPMTLRVHPKDGASFDVKLSHTFNESQIEWFKDGSALNTMARKSGN

SEQ ID NO: 66928 - DNA, 2376 bp, Candida albicans SC5314
  CDS (1)..(2376): transl_table=12
atgttaagagctagatcagtattaagtgggagtgtgtcgagacgtgcgttagccactcaagcatttaacttttcagttcctccagaatatcaatcgaggactccaccatattctaaattgatcaacaacttatcgacggttaagaaaatattgaaaaaccaaccattgacattagcagagaagatattgtattcacatttatgcaatccagaagaaagtcttacttcatccaatgtaagtgatataaggggccaacaatatttgaagttgcacccagatagagtggccatgcaagatgcttctgcccagatggcattgttacaatttatgacatgtggtatgagttccacagcagttccagcctcaattcactgtgaccatttgattgttggtaaagatggtgctgaggaagatttagttaaatcaatagcaacaaataaagaggtttttgatttcttgcaaagttgtggtgaaaaatacggtattcaattttggggaccaggatctggtatcattcatcaaattgttttagagaactttgccgcacctggtttaatgatgttaggtaccgattcgcatactcctaatgcagggggtttgggtgcaattgccattggtgttggtggtgcagatgctgttgatgcattgacaggtaccccttgggaattgaaagcaccaaagattttgggtgtgaaattaactggcaaattatctggatggagctcgcctaaagatgtaattactactttagcaggtattttgaccgtcagaggaggtactggttatatcgtggaatactttggtgatggtgttaaaacattatcatgtactggtatggctactatctgtaatatgggtgccgaaattggtgccaccacctcgactttcccataccaagaagcccacaagagatatttgattgacacgcatagagcaccaattgccgaagctgctgattcggtgaattccgaattcaaatttttgcaagctgatgaaggtgccgaatacgacaaagtcattgagataaatctttctgaattagaaccacatgtgaacgggcctttcactccagatttgtctactccaatttccaaatttggtgagaccgcccaaaaggaaggttggcctgaaacagtttccgctgggttgattggttcatgtactaattcttcgtaccaagatatgtcccgtgctgtttctatcattaaacaggctgaagcagttggattaaaaccaaaaattccattctttgttacaccaggatccgaacaaatcagagccacaattgaaagagatggtttgataaacacttttgaaagcaatggggccatagtgttggctaatgcatgtggaccatgtattggtcaatgggacagaactgatgttccaaagacatcaacagacttcaacgccattttcacttcattcaacaggaatttccgtgccagaaacgatggtaacagaaacaccatgaactttttaacctctccagatatggttacggccatgatatattccggagatatgaatttcaacccagtgacagattcaatcgaattaccaaatggtaaagagttcagattccaaccaccccaaggtaaagatttgccacaatctggattcatcccaggtcgttctgagttctaccccgaagcaaacccacaaccaaaaccagaggttgaagtcaatgtgtccccaagttcagacagattacaacttttggaacctttccaaccatggtccggtgaagaattgtcaaccacagtattgttgaaagttgaaggaaaatgtactaccgatcatatttcggcagctggtgtctggttgaaatacaaaggtcatttggaaaacatttcatacaatacattaattggtgcagttaacaaagaaacgggtgaagttaacaaggcttatgatttgaacggtgacgcatacggtattcctgaattgatgattaaatggaaggatgaatctagaccgtgggttgtggtagccgaacataactatggtgaaggttctgctagagaacatgctgccttgtcacctcgtttcttgggaggctcagtgattttggtgaaatcttttgctagaatccacgaaaccaacttgaagaaacaaggaatgttgcctttaacttttgcagatgaagctgattatgacaaaatttcatctggcgatttattgacaactatagatttgaaagatatgattgccaaggacggtaacaacggaggtactttacgtgttaaggttaccaaaagagatggttctgaatttgaaattttagctaaacatacaatgtctaaagaccaagttgagttcttcaaagctggttctgccatcaactacatcggtaacacaaaaaagggattgtaa

SEQ ID NO: 66929 - protein, 791 aa, Candida albicans SC5314
MLRARSVLSGSVSRRALATQAFNFSVPPEYQSRTPPYSKLINNLSTVKKILKNQPLTLAEKILYSHLCNPEESLTSSNVSDIRGQQYLKLHPDRVAMQDASAQMALLQFMTCGMSSTAVPASIHCDHLIVGKDGAEEDLVKSIATNKEVFDFLQSCGEKYGIQFWGPGSGIIHQIVLENFAAPGLMMLGTDSHTPNAGGLGAIAIGVGGADAVDALTGTPWELKAPKILGVKLTGKLSGWSSPKDVITTLAGILTVRGGTGYIVEYFGDGVKTLSCTGMATICNMGAEIGATTSTFPYQEAHKRYLIDTHRAPIAEAADSVNSEFKFLQADEGAEYDKVIEINLSELEPHVNGPFTPDLSTPISKFGETAQKEGWPETVSAGLIGSCTNSSYQDMSRAVSIIKQAEAVGLKPKIPFFVTPGSEQIRATIERDGLINTFESNGAIVLANACGPCIGQWDRTDVPKTSTDFNAIFTSFNRNFRARNDGNRNTMNFLTSPDMVTAMIYSGDMNFNPVTDSIELPNGKEFRFQPPQGKDLPQSGFIPGRSEFYPEANPQPKPEVEVNVSPSSDRLQLLEPFQPWSGEELSTTVLLKVEGKCTTDHISAAGVWLKYKGHLENISYNTLIGAVNKETGEVNKAYDLNGDAYGIPELMIKWKDESRPWVVVAEHNYGEGSAREHAALSPRFLGGSVILVKSFARIHETNLKKQGMLPLTFADEADYDKISSGDLLTTIDLKDMIAKDGNNGGTLRVKVTKRDGSEFEILAKHTMSKDQVEFFKAGSAINYIGNTKKGL

SEQ ID NO: 66930 - DNA, 2334 bp, Candida albicans SC5314
  CDS (1)..(2334): transl_table=12
atgttgtctgcttcaagaaccgccttgagagccccacgttcagttcgtggtttggctactgctagtttaaccaaagattctcaagttaaccaaaacttgttggaatcccactccttcatcaactacaaaaagcatctcgaaaatgttgaaatcgtcaagtccagattaaacagaccattgacttatgctgaaaaacttttgtacggtcatttggatgatcctcataaccaagaaattgaaagaggtgtctcttacttgaaattgagaccagacagggttgcttgtcaagatgctaccgcccaaatggccattttgcaatttatgtccgctggtattccacaagttgccactccatctactgtccactgtgaccatttgatccaagctcaagttggtggtccaaaagatttggccagagccattgacttgaacaaggaagtttacgatttcttgtccactgcttgtgccaaatataacttgggtttctggaaaccaggttccggtattatccatcaaattgttttggaaaactatgccttcccaggtgctttattgattggtaccgattcccacactccaaatgctggtggtttgggtcaattggctattggtgttggtggtgctgatgccgtcgatgtcatgtctggtttgccatgggaattgaaagctccaaagatcattggtgttaaattgaccggtaaaatgtctggatggacttctccaaaagatatcatcttgaaattggctggtattactactgtcaaaggtggtactggttctattgtcgaatatttcggttctggtgtcgacaccttctcctgtaccggtatgggtaccatctgtaatatgggtgctgaaattggtgccaccacttctgttttcccattcaacgactcaatggttgactacttgaacgccactggtagatctgaaattgctcaatttgcccaagtttacaagaaggacttcctttctgctgatgaaggtgctgaatatgatcaagttattgaaattgacttgaacaccttggaaccacacattaacggtccattcaccccagatttggccactccagtctccaagatgaaggaaaccgccattgctaacggttggccattggaagttaaagttggtttgatcggttcatgtaccaactcctcatatgaagatatgaccagagctgcctctatcatcaaagatgctggtgctcacggtttgaaatctaaggctctttacactgtttctccaggttccgaacaagtcagagctaccattgccagagacggtcaattgaagaccttcgaagactttggtggtgttgtcatggccaacgcctgtggtccatgtattggtcaatgggacagacaagacatcaaaaagggtgacaaaaacaccattgtctcttcattcaacagaaacttcactgccagaaatgacggtaacccagctactcacgctttcgttgcctctccagaaatggccactgtctatgctatctccggtgacttgggattcaacccaatcactgatactttagttggtgctgacggtaaagaattcaaattgaaagaaccacaaggtgtcggtttgccaccagatggttacgatccaggtgaaaacacctaccaagctccaccagaagaccgtgcttccgttgaagttgtcatctccccaacctccgaccgtttacaaaaattgagcccattcaaaccatgggatggtaaagatgctgagagattgccaattttaatcaaagctgtcggtaaaaccaccaccgatcatatctcaatggccggtccatggttgaaatacagaggtcacttggaaaacatttctaacaactatatgattggtgctatcaatgccgaaaacggtaaggctaacgaagtcagaaaccactacactggtaaatacgacggtgttccacaaactgctgctgcttacagagatgctggtcataaatgggttgttattggtgatgaaaactttggtgaaggttcttccagagaacacgctgccttggaaccaagattcttgggtggttttgctatcattactaaatcatttgcccgtatccacgaaactaacttgaagaaacaaggtttgttgcctcttaactttaagaacccagctgattacgacaagatcaactttgacgatgaagttgatttgattggtttgaccactttggccccaggtaaggatgttatcttgagagttcatccaaaggaaggtgaagcttgggaagctgtcttgacccacactttcaacagtgaacaactcgaatggttcaaacacggttctgctttgaactttatcaagagcaaatattaa

SEQ ID NO: 66931 - protein, 777 aa, Candida albicans SC5314
MLSASRTALRAPRSVRGLATASLTKDSQVNQNLLESHSFINYKKHLENVEIVKSRLNRPLTYAEKLLYGHLDDPHNQEIERGVSYLKLRPDRVACQDATAQMAILQFMSAGIPQVATPSTVHCDHLIQAQVGGPKDLARAIDLNKEVYDFLSTACAKYNLGFWKPGSGIIHQIVLENYAFPGALLIGTDSHTPNAGGLGQLAIGVGGADAVDVMSGLPWELKAPKIIGVKLTGKMSGWTSPKDIILKLAGITTVKGGTGSIVEYFGSGVDTFSCTGMGTICNMGAEIGATTSVFPFNDSMVDYLNATGRSEIAQFAQVYKKDFLSADEGAEYDQVIEIDLNTLEPHINGPFTPDLATPVSKMKETAIANGWPLEVKVGLIGSCTNSSYEDMTRAASIIKDAGAHGLKSKALYTVSPGSEQVRATIARDGQLKTFEDFGGVVMANACGPCIGQWDRQDIKKGDKNTIVSSFNRNFTARNDGNPATHAFVASPEMATVYAISGDLGFNPITDTLVGADGKEFKLKEPQGVGLPPDGYDPGENTYQAPPEDRASVEVVISPTSDRLQKLSPFKPWDGKDAERLPILIKAVGKTTTDHISMAGPWLKYRGHLENISNNYMIGAINAENGKANEVRNHYTGKYDGVPQTAAAYRDAGHKWVVIGDENFGEGSSREHAALEPRFLGGFAIITKSFARIHETNLKKQGLLPLNFKNPADYDKINFDDEVDLIGLTTLAPGKDVILRVHPKEGEAWEAVLTHTFNSEQLEWFKHGSALNFIKSKY

SEQ ID NO: 66932 - DNA, 3126 bp, Ustilago maydis 521
  CDS (1)..(3126)
atgtcgaatcgtttcatcttgagtcgtcgtacacaaccatcaccttctccttctccttctccttctccttctccttctccttctccttgtcctcctcctcttcttcttcttcttcttttccaacttcttccctcgtttcctcctgtatcgatcaactctggagcagctcaaggcaaggctgggacagcacgatatttacagaatccttgcttttacacccatctattcccgagcctcggcaaacaagccgtcaacacccgccgctttgctccacgcggtctctcctacactccgacaccgatacctttgaccacaatgatcgcctcgctcgctcgtgttcaaaggagccgcaatggcctttcggtggctcacaaggccatcggttccacacgcaccttggccacccctgccgccgatggccgcattcctacttttcacccatcgcgtgtcccaccttacacagagctgctcaccaacctggaaacggtgcgagcccaacttaaccgtcccttgaccttgtcggaaaagatcctctactcgcatctacgaaatccagagcatgatcttgccggtgttggtgccgatgtctccgcaattcgtggcaaaaagtacctcaagctcaagatcgaccgtcttgccatgcaggacgcttccgcacagatggctcttctccaattcatgacctgtggcctaccacgcaccgccatcccttccagcgtccactgcgatcatctcatccaggccttcgagggtgccgaagccgatctcaagcgttccatcgcatccaaccaggaggtctttgccttcctcgagtccgcctccaaaaagtatggcatcgagttctggggtcctggctccggtatcattcaccagattgttcttgaaaactacgctgcccccggtctcctcatgcttggcaccgactctcacacgcccaacgcttccggtctcggatgtcttgccatcggcgtaggaggtgctgatgccgtcgacgccatgactaacacgccttgggaactcatggctccaaaggttcttggcgttcacctcaagggcgagctcagcccgtggtgcactcccaaagacgtcatccttcacctcgctggcaagctcaccgtgcgcggcggtacaggcaagattgtggaatattcgggccctggtctgcagacgcttcccgccaccggtctggccaccatgtccaacatgggtgccgaggttggtgctaccacttctgccttccccttcacgcctgctatgggctcgtatctcgaggccactggacgtgccgaggtggcccgcgctgccgaaaaggcagctggtcagggcttcttggccgccgacgagggcgccgagtacgacgagcgcatcgagatcaatctgtccgaccttgagccctgcctcaacggccctttcacccctgatctcagcacgcccctttccgagtttgtcaacaaagccaagtcagacgcccgcgaccatcctgtcgagctgagcgctgcattgatcggcagctgcaccaactcttcctacgccgacatggcgcgttgcgcgtcgctcgcccagcaggctcgtgaccgcggcatgaaggtcaagtcgagcttcgacgttacccccggttcggaacaggtgcgtgctaccgtagagcgcgatggcattcaacaaatcttgaccgatgtaggtggacgcgttctcgccaacgcctgcggtccttgcattggccagtggaatcgaaaggagttgcaaggcgaggataatgtcatcttgacttcgttcaaccgtaactttcgtggacgcaacgacggcaattccaagacctggaacttgctcgcttcgcccgagattgtcaccgccatggccttcgctggtcgtctcgacttcaaccctatgaccgacagtctcactgctcccgatggcaagccgttcaagtttgaagctccacagagtgacgttctgcctgccagcggttttgcccaaggcaacattgactatttgcccacgcccatgcccgagccacagcccaacaccgaggtgctcatcagccccacctcggctcgtctcgagcctctggagcctttctcgagtccgtttgctgccactgcagcccaaggcaaatacgagctgcccagcatgcgctgcttgttgaggatcaagggcaagtgcaccaccgaccacatttctgccgccggcccttggctcaagtacaagggtcatctttccaacctggccgagaacacactgatcggcgctacgaacgacgagtttgatgcggtcaacgtcgcacaggattacgagacgggcaagcaagacacgattcccggtgtcgccaagctctacaagtcacgtcagcagccttggatgatggtcgccgaccacaactacggtgaaggctctgcacgtgagcacgccgcgctgcaaccgcgtttctacggatgcaatcttatcgtggctcgcagcattgcacgtatcgccgagaccaacctgcgcaaacagggtgtgctgacgctgctgttcgagaatgaggacgactacctcaagatcggttcgggcgatctggtcgagacggtcaacctgacggatctcatccgacctggaggagatctgtcgacgcaggtcaagttgaaggtgaccaagttcgagcaggatggcaagacggtgaaggagacgtttgagttggctaccaagcactcgttgagtgcagcccacttggactggattcgagctggttcggcgctcaatctgattcgcgagcaggctgcctcttcgtcttcgtcattgtcgactggcagtgctcgagtgtcgggtgcgtttacggctgcagccaagtcggcagctagcaaggtgtcctctgcacttggtggagtgcgaggctatgccactgctgctaagcctgcgggaggatctcgcaatcccaacgatcccaactatgtggcacctgctgctgatccgcattgtctacccgcccacaccgtcttcctcgaaagaccgggctggcttgtctgccacctcggccgcatccgttctccctttcggacaagactcggaagagatccattcaaccatcacgcgcgcttggttgctctaccaacgcacccaacgcgaatcgctcgccgcctcgctcaatgctaa

SEQ ID NO: 66933 - protein, 1041 aa, Ustilago maydis 521
MSNRFILSRRTQPSPSPSPSPSPSPSPSPCPPPLLLLLLFQLLPSFPPVSINSGAAQGKAGTARYLQNPCFYTHLFPSLGKQAVNTRRFAPRGLSYTPTPIPLTTMIASLARVQRSRNGLSVAHKAIGSTRTLATPAADGRIPTFHPSRVPPYTELLTNLETVRAQLNRPLTLSEKILYSHLRNPEHDLAGVGADVSAIRGKKYLKLKIDRLAMQDASAQMALLQFMTCGLPRTAIPSSVHCDHLIQAFEGAEADLKRSIASNQEVFAFLESASKKYGIEFWGPGSGIIHQIVLENYAAPGLLMLGTDSHTPNASGLGCLAIGVGGADAVDAMTNTPWELMAPKVLGVHLKGELSPWCTPKDVILHLAGKLTVRGGTGKIVEYSGPGLQTLPATGLATMSNMGAEVGATTSAFPFTPAMGSYLEATGRAEVARAAEKAAGQGFLAADEGAEYDERIEINLSDLEPCLNGPFTPDLSTPLSEFVNKAKSDARDHPVELSAALIGSCTNSSYADMARCASLAQQARDRGMKVKSSFDVTPGSEQVRATVERDGIQQILTDVGGRVLANACGPCIGQWNRKELQGEDNVILTSFNRNFRGRNDGNSKTWNLLASPEIVTAMAFAGRLDFNPMTDSLTAPDGKPFKFEAPQSDVLPASGFAQGNIDYLPTPMPEPQPNTEVLISPTSARLEPLEPFSSPFAATAAQGKYELPSMRCLLRIKGKCTTDHISAAGPWLKYKGHLSNLAENTLIGATNDEFDAVNVAQDYETGKQDTIPGVAKLYKSRQQPWMMVADHNYGEGSAREHAALQPRFYGCNLIVARSIARIAETNLRKQGVLTLLFENEDDYLKIGSGDLVETVNLTDLIRPGGDLSTQVKLKVTKFEQDGKTVKETFELATKHSLSAAHLDWIRAGSALNLIREQAASSSSSLSTGSARVSGAFTAAAKSAASKVSSALGGVRGYATAAKPAGGSRNPNDPNYVAPAADPHCLPAHTVFLERPGWLVCHLGRIRSPFRTRLGRDPFNHHARLVALPTHPTRIARRLAQC

SEQ ID NO: 66934 - DNA, 2391 bp, Ustilago maydis 521
  CDS (1)..(2391)
atgcttcctctccgagcattgcgatcttcctccctccgggcggccgccaaggctcccctcgcccgcggttatgccaccaccgtcgccgaggaggctgccgaaatctctccctctctcttcgacaagaaggtcgagatgtccgtcgtcgagaagggcaagggctactacgtcaactacaagcgcatcgaggacaaccttaaggtcgttcgtcagcgtctcaaccgacctctctcgctcgccgagaagatcgtctatggtcacttggacaacccccatgagcaggagatctcgcgtggtaactcgtacctcaagcttcgccctgatcgtgttgcttgccaggatgccaccgcccagatggctctgctccagttcatgtcggctggtctccccaccgtcgctgtccccaccactgttcactgtgaccatcttatcgaggctcaggtcggcggtgccaaggacttggcccgtgctatcgagattaacaaggaggtctacgacttccttgccactgccaccgccaagtatggtattggcttctggaggcccggttccggtattatccaccagatcatcctcgagaactacgccttccccggtggtctcatgattggtactgactcgcacacccccaacgctggtggtctcggcatgatcgcctgtggtgtcggtggtgctgacgctgtcgacgtcatggctgacattccctgggagctcaaggcccccaaggttatcggtgtcgagctcaagggcaagatgtcgggctggacaactcccaaggatgtcatcctcaaggtggccggtgagcttaccgtcaagggtggtaccggtgccatcatcgagtacaagggtcccggtgtcgagtcgctctcgtgcactggtatggccaccatctgcaacatgggtgccgagattggtgccactacctccgtcttcccctacaacgagcgcatgggcgactacctgcgggccaccaaccgatccgagatcgccgacctcgccaagggcttccaccgcaacctcctcccagacacgggcgctgagtacgactcgcatctcgagatcaacctcgacactcttgagccccacatcaacggtcccttcacccccgatcttgccacgcctctctccaagtttgccgaggaggtcaagaagaacgactggcccgaggagctcaaggtctcgctcatcggctcgtgcaccaactcgtcctacgaggacatgagccgatccgcctcgatcgccgaggaggctgccgctcacggcctcaaggtcaagtcgaagttcaccatcacccccggttccgagcagatccgtgccacgatcgagcgtgacggccagatggagatcctcgagaaggcgggcggtatggttcttgccaacgcctgtggtccttgcatcggtcagtgggaccgaaaggacatcaagaagggtgacaagaactcgatcatcacctcgtacaaccgtaactttaccggacgtaacgacgctaaccctgccacacacgctttcgtcgcctcgcccgatctcgtcaccgccatggcctttgctggtcgcctcacctttaaccccatgaccgacagcctcaagggcgctgacggcaaggagttcaagttctcggctcccaccggcaaggagcttcctcctcgcggctacgaccctggcaacaacacctaccaggaccctcccaaggacggctcgtctgtccaggtcgccatcgaccctaagtcggatcgtctacagaggctcgagcccttcaagccgtggaacggcaagaaccccaccgactgccccgttctcatcaaggcgcagggcaagtgcaccaccgaccacatctcagccggtggtccatggctcaagtaccgtggtcaccttgagaacatctcgaacaactgtctcattggtgccatcaacgccgccaacggtaaggccaacgagattcagaacgtcttcaccggcgagtggggcccggtccccgccactgccatccagtaccgcgaggccggtaagccttgggttgttatcggtgacgagaactacggtgagggttcgtcgcgagagcacgccgctcttgagccccgtttcctcggtggttgcgccgtcattgcccgatcgttcgctcgtatccaccagaccaaccttcgtaagcagggtatgctcgcctttgagtttgccgacccggctgactatgacaaggtccgccccgatgacctggttgacatccttggcgttaccgagcttgcccccggctccaaggtttcactcgtctgcaagcacaaggacggttccaaggacgagcttccgcttacgcacaccatgaacgacaaccagatttcgtggttcaagcacggttcggctctcaacaagatggcttctcaggccaagtctgcttaa

SEQ ID NO: 66935 - protein, 796 aa, Ustilago maydis 521
MLPLRALRSSSLRAAAKAPLARGYATTVAEEAAEISPSLFDKKVEMSVVEKGKGYYVNYKRIEDNLKVVRQRLNRPLSLAEKIVYGHLDNPHEQEISRGNSYLKLRPDRVACQDATAQMALLQFMSAGLPTVAVPTTVHCDHLIEAQVGGAKDLARAIEINKEVYDFLATATAKYGIGFWRPGSGIIHQIILENYAFPGGLMIGTDSHTPNAGGLGMIACGVGGADAVDVMADIPWELKAPKVIGVELKGKMSGWTTPKDVILKVAGELTVKGGTGAIIEYKGPGVESLSCTGMATICNMGAEIGATTSVFPYNERMGDYLRATNRSEIADLAKGFHRNLLPDTGAEYDSHLEINLDTLEPHINGPFTPDLATPLSKFAEEVKKNDWPEELKVSLIGSCTNSSYEDMSRSASIAEEAAAHGLKVKSKFTITPGSEQIRATIERDGQMEILEKAGGMVLANACGPCIGQWDRKDIKKGDKNSIITSYNRNFTGRNDANPATHAFVASPDLVTAMAFAGRLTFNPMTDSLKGADGKEFKFSAPTGKELPPRGYDPGNNTYQDPPKDGSSVQVAIDPKSDRLQRLEPFKPWNGKNPTDCPVLIKAQGKCTTDHISAGGPWLKYRGHLENISNNCLIGAINAANGKANEIQNVFTGEWGPVPATAIQYREAGKPWVVIGDENYGEGSSREHAALEPRFLGGCAVIARSFARIHQTNLRKQGMLAFEFADPADYDKVRPDDLVDILGVTELAPGSKVSLVCKHKDGSKDELPLTHTMNDNQISWFKHGSALNKMASQAKSA

SEQ ID NO: 66936 - DNA, 2373 bp, Tribolium castaneum
  CDS (1)..(2373)
atggcgcactgtatgcgagttttgcatcgccagggtggcaaggccagcagtgctttgctgaccgaaatccaaataagatgtttccacgtttcgccactggcagcggccgcctccaaagtggctatgagcaaattcgacaaggacggacttccctatgataagctaatcaaaaatctagaaattgtcaaaaagaggctcaaccgccccttgactctttcggaaaaagtgctctactcccatctggacgacccccaaaatcaggatgtccaacgtggcacgtcttatttgcgcttacgcccggaccgtgtggctatgcaagacgccaccgcccagatggccatgttacaatttatttccagcggtttgaaacgtgtcgctgtcccatcaaccattcactgcgaccacttgatcgaagcccaagtgggcggcgaaaaggacttggcccgcgctaaagacctcaaccaggaggtttacagtttcctaagcagcgccggtaacaaatacggcgtcggtttctggaaaccgggctccggaatcatccaccaaatcatcctcgaaaattatgccttccctggccttctcatgatcggcaccgactcgcacacccccaatgggggcggtctgggcggcctgtgcatcggtgtcggcggcgccgacgccgtggacgtcatggccaacatcccctgggagctgaaatgtcccaacgtgatcggtgtcaaactcaccgggaaattgggcggttggacgtcccccaaggacatcatcctgaaagtggccgatattttgaccgttaaagggggcactggcgctatcgttgagtacttcgggcctggggttgattccatttcgtgcaccgggatggcaaccatttgcaacatgggggctgaaattggggccacaacttccattttcccgtacaatagtcgcatgagcgactacttgaaggccaccaagcgaggggagatcgccggagaggctgataaagttaaaagtgcgcttttgaaccgtgatgaagactgcacgtacgatcaagtgattgagattaatcttgatacgcttgaaccgcatgttaatgggccgtttacgcccgatttggcgaatccgatcagtaagttgggagaagcggcgaagaaaaatgggtggccggttgatatcaaagtcgggttgattgggtcgtgtactaatagctcgtacgaggatatgggcaggtgtgcgagtatcgtcaaagaggcgatgaatcatgggttgaaatcgaagattccgttcaatgtcacgccgggatcggagcagatcagggcgacgattgaaagggatggaattgccaagactttgagggatttcggaggcacggtattggccaacgcttgtggcccgtgcatcgggcaatgggaccgcaaagacgtgaaaaagggcgaaaagaacaccattgtaacctcatacaatcgtaacttcaccggtcgtaacgacgccaatccggcgacacattctttcgtcacatcaccggagctggtcacagctctaagtattgcgggccgattggacttcgaccccactaaagatgaactgaccggaaaagacggcaagaaattcaaattgagttcgcccttcggggacgaactccctaccaaaggtttcgaccccggtcaagacacctacgaagcccccgtggctgacggaagcaccgtcaaggttgacgtcagccccacgtcacagcggttgcaactgttggaacctttcgacaagtggaacgggaaggatttggaggatttggtcgttttgatcaaagtcaaggggaaatgcacgactgatcacatttcggcagctgggccgtggctgaagtacagagggcatctcgataatatttccaacaacatgtttattggcgcgacaaatgcggaaaacggcgaaatgaacaagatcaagaaccagctgacgggcgagtggggcgcagtccccgacgttgcgcgccactacaaggccaacaaaatagggtgggtggccatcggcgacgataattacggggagggaagttcgcgggagcatgccgccttggagccccgacatctcggcggtcgggccattattgttaaatctttcgcgcgtatccacgaaaccaatctcaaaaaacaggggctcttgcctttgacgttctcaaatcccagcgattacgataagattcaacctaccgataaaattagtcttaaaggtctcgcgagtttaactccagggaagcccgttgagtgtgagattaaacatgccgatggaaaggtcgagaaaattttacttaatcattcgcttaatgagctacaaattgggtggtttaaggccggaagcgcgctcaacaggatgaaggagttggcggcgtcggcgtaa

SEQ ID NO: 66937 - protein, 790 aa, Tribolium castaneum
MAHCMRVLHRQGGKASSALLTEIQIRCFHVSPLAAAASKVAMSKFDKDGLPYDKLIKNLEIVKKRLNRPLTLSEKVLYSHLDDPQNQDVQRGTSYLRLRPDRVAMQDATAQMAMLQFISSGLKRVAVPSTIHCDHLIEAQVGGEKDLARAKDLNQEVYSFLSSAGNKYGVGFWKPGSGIIHQIILENYAFPGLLMIGTDSHTPNGGGLGGLCIGVGGADAVDVMANIPWELKCPNVIGVKLTGKLGGWTSPKDIILKVADILTVKGGTGAIVEYFGPGVDSISCTGMATICNMGAEIGATTSIFPYNSRMSDYLKATKRGEIAGEADKVKSALLNRDEDCTYDQVIEINLDTLEPHVNGPFTPDLANPISKLGEAAKKNGWPVDIKVGLIGSCTNSSYEDMGRCASIVKEAMNHGLKSKIPFNVTPGSEQIRATIERDGIAKTLRDFGGTVLANACGPCIGQWDRKDVKKGEKNTIVTSYNRNFTGRNDANPATHSFVTSPELVTALSIAGRLDFDPTKDELTGKDGKKFKLSSPFGDELPTKGFDPGQDTYEAPVADGSTVKVDVSPTSQRLQLLEPFDKWNGKDLEDLVVLIKVKGKCTTDHISAAGPWLKYRGHLDNISNNMFIGATNAENGEMNKIKNQLTGEWGAVPDVARHYKANKIGWVAIGDDNYGEGSSREHAALEPRHLGGRAIIVKSFARIHETNLKKQGLLPLTFSNPSDYDKIQPTDKISLKGLASLTPGKPVECEIKHADGKVEKILLNHSLNELQIGWFKAGSALNRMKELAASA

SEQ ID NO: 66938 - DNA, 2274 bp, Leptospira interrogans serovar Copenhageni str. Fiocruz L1-130
  CDS (1)..(2274): transl_table=11
atggcattcgatatagaaatgattcgcgcccgatacgataagatcggggttcttgttacaaaagcaagaaacgtcgttggaagacctcttactcttaccgaaaaaattctttattcccatctctgggaaggcgaaccgaagacggcttacgaaaaaggaaagtcttatgtggattttgcgccggacagagttgcgatgcaggacgctacggctcagatggctcttttgcagtttatgtctgcgggtagaagtaaggtagcagttccgtccaccgttcactgtgatcacctaatccaagcgaaagacggtgcgacagaagacttaaaaacggcaaacacagtaaacaaggaagtttatgattttctttcctccgtttctaataaatacggaatcggcttttggaagccgggtgctggaattattcatcaagtagttttagaaaattacgccttccctggtggaatgatgatcggaaccgattctcacactgtaaacgcgggtggtttaggtatgatcgcaatcggagtcggtggggccgatgctgtagacgttatggctggcatggcttgggaattaaaatttccaaaactcatcggcgtaaaactcacaggtaagctttccggttgggcttctgcaaaagatattattttaaaagttgctgggattcttaccgtaaaaggtgggaccggtgcgatcgtggaatattttggagaaggagcagatagtctttcttgtactggcaaaggaacgatctgtaatatgggcgcggaaataggagccactacttctgtgttcggttatgatcggaacatgagagaataccttttaaaaacaaatcgtaaagaagtcgctgatctggcagataaaatcgcagagcatttgactggagataaggaggtatatgccaatccttctcaatattttgatcaggttatagagatcaatttgtcggaacttgaaccttatattaacggaccttttactcctgaccttgcgactcctctttctaagtttaaggaagcggttcaacaaaacggttggcctaccaacttggaagtaggtttgatcggttcttgcacgaattcttcttatgaagatattactcgtgccgcttctgtagcaaaacaagcggcggataaaaatttagaagtaaaagcggaatacactgtgactcccggttcagagatgatacgttatacgatcgaaagagatggtctgataaaaacattctctgatataggaggagtggttcttgcaaacgcttgtggtccttgtatcggtcagtggagtcgtcatacaaaagatccggaaagaaaaaattcgatcattacttcgtttaacagaaattttgcgaaacgtaacgacggtcttgcggggactcacgcgtttgttgcgtcacccgaaatcgtgaccgcttttgcaattgctggtaaattggattttaatccgattacagattccttaaaaaccaaggatggaaaagaagtaaaactagatccaccaactggtcttgatttccctccgaacggttttgacgtaaaagacgctggttttatcgcacctgctgcggacggttctaaagtgaccgttgcggtagatcctaaatcggatcgtcttcaacttctttctccgtttattccttgggaaaaaacggacttaaaaggtttgaaacttctcattaaggccaaaggcaaatgtactacggatcatatttctatggcgggtccttggttaaaatatagagggcatttagataatatttctaataaccttttgattggagcggtgaattcgtttaacgataagaccaacgaagttaaaaatcaactttcaggagcttacgaaccagttcctcaaacagcaagggcttacaaagccaaaggaatcgggtctatcgtagtcggagacgagaattatggagaaggttcttctagagagcacgcggcgatggaacctaggcatcttggagtaagggcggtgattgtaaaatcgtttgctagaattcatgaaacaaatttgaaaaaacaaggaatgctcgctcttacatttgcggataagtcagactatgataaaattcaagaagaggattctattgatattttgggtctgacttcttttcaagagggagttcctttgactctcgtattacaccacaaagacggttcttctcaagaaattaaggccaaccatactttcaactcacaacagattgcttggttcaaagcgggtagtgcgctcaatttaatcagcgaagaacaaaataaaaaaggataa

SEQ ID NO: 66939 - protein, 757 aa, Leptospira interrogans serovar Copenhageni str. Fiocruz L1-130
MAFDIEMIRARYDKIGVLVTKARNVVGRPLTLTEKILYSHLWEGEPKTAYEKGKSYVDFAPDRVAMQDATAQMALLQFMSAGRSKVAVPSTVHCDHLIQAKDGATEDLKTANTVNKEVYDFLSSVSNKYGIGFWKPGAGIIHQVVLENYAFPGGMMIGTDSHTVNAGGLGMIAIGVGGADAVDVMAGMAWELKFPKLIGVKLTGKLSGWASAKDIILKVAGILTVKGGTGAIVEYFGEGADSLSCTGKGTICNMGAEIGATTSVFGYDRNMREYLLKTNRKEVADLADKIAEHLTGDKEVYANPSQYFDQVIEINLSELEPYINGPFTPDLATPLSKFKEAVQQNGWPTNLEVGLIGSCTNSSYEDITRAASVAKQAADKNLEVKAEYTVTPGSEMIRYTIERDGLIKTFSDIGGVVLANACGPCIGQWSRHTKDPERKNSIITSFNRNFAKRNDGLAGTHAFVASPEIVTAFAIAGKLDFNPITDSLKTKDGKEVKLDPPTGLDFPPNGFDVKDAGFIAPAADGSKVTVAVDPKSDRLQLLSPFIPWEKTDLKGLKLLIKAKGKCTTDHISMAGPWLKYRGHLDNISNNLLIGAVNSFNDKTNEVKNQLSGAYEPVPQTARAYKAKGIGSIVVGDENYGEGSSREHAAMEPRHLGVRAVIVKSFARIHETNLKKQGMLALTFADKSDYDKIQEEDSIDILGLTSFQEGVPLTLVLHHKDGSSQEIKANHTFNSQQIAWFKAGSALNLISEEQNKKG

SEQ ID NO: 66940 - DNA, 2709 bp, Thermus thermophilus HB27
  CDS (1)..(2709): transl_table=11
atgaaggacagcttccaaaccctaaagaccctgaccacgaaaagcggcacctacggctactacgacctccaggagctggaaaggaagggcgtggcggaggtctcccgcctccccttctccattcgcgtgatgctggaaagcctcctccgcaacgaggacggctaccaggtcacccgagaagacatcgaggccctggcccgctggcggcccgaccccggggagatcaacgtgcccctgaagctcgcccgggtcatcctccaggacttcaccggggtcccggcggtggtggacctcgccgccatgcgggacgccatcaaggccaagggcggcgaccccaagcgcatcaaccccgtggtgcccgccgacctggtcattgaccactcggtccaggtggacgccttcggcaccgcctacgccttcttctacaacgtggagaaggagtacgagaggaaccgggagcgctacctcctcctcaagtgggcccagaacgccctggagaacttccgggtggtgcccccgggcacgggcatcgtccaccaggtgaacattgagtacctcaccaaggtggtgatgaccgggaagcgggacgggctcaccctggccttccccgactccttggtgggcaccgacagccacaccaccatggtgaacggcctgggcgtcctgggctggggcgtgggggggattgaggccgaggcggtgatgctgggccagccctactacatgctcgccccccgggtggtgggcttcaagctctacggggagctccccgagggggccacggccacggacctggtcctcaccgtcaccgagatgctgcgcaagcacggggtggtgggcaagttcgtggagttctacggccccggggtggccaagctctccacccccgaccgggccaccatcgccaacatggcccccgagtacggggccaccatgggcttcttccccgtggacgaggagaccctgaactacctccgccagacgggccgccccgaggagctcgtggagctggtggaggcctacaccaaggcggtgggcctcttccgcaccccggaggcggaggagaaggtccagtactccgagtacctggagcttgacctctccacggtggagccctccctggcgggccccaagcgcccccaggaccgggtgcccctgaaggaggttaagaagagcttcctcgcccacctcaccaagcccgtgaaggagcggggcttcgggctctccgaggaccagctccagaggaaggtcctggtcaagcgccgcgacgaggagtttgagctcacccacggctccgtggtcatcgccgccatcacgagctgcaccaacacctccaacccctcggtgatgctcggggcggggcttctcgccaagaaggcggtggaggcgggcctggaccggaagccctgggtcaagacctccctcgcccccggctccaaggtggtgacggactacctggagatgagcgggctcatgcccttcctcgaggccctgggcttccacctggtgggctacggctgcaccacctgcatcggcaactccgggcccctccctgaggacatcgccaaggccgtggaggaagggaacctggtggtggccgccgtcctctccgggaaccgcaactttgagggccgcatcaacccccacgtgaaggccaactacctggcgagccccatgctggtggtggcctacgccctggcgggccggatggacattgacttcaccacggagcccttgggctttgaccccaacggcaagcccatctacctcaaggacatctggccctccatggaggagatccgggaggccatccggaagaccctggaccccgagctcttcaagaaggagtacagcaaggtctttgaaggggacgagcgctggcaggccctccccgcccccaccggggagctctaccagtgggacccggagagcacctacatccagaacccgcccttctttgaggacctgggcgagcggaaggtggaggacatccggggggcgagggtcctcctcgtcctcggcgactccgtgaccacggaccacatctcccccgcgggggccatccccgtgaagagccccgccggccagtacctgatcagcaagggggtgaagccggaggacttcaactcctacggctcccggcgcggcaaccacgaggtgatgatgcggggcaccttcgccaacatccgcatcaagaacctcatgctggacgggattgagggcggttacgccaagaagctgcccgagggggacgtggacttcgtctacaacgtcgccatgcgctacaaggccgagggcacgcccctcctcgtcatcgccgggaaggagtacgggaccggctctagccgcgactgggccgccaagggcacctacctcctcggcatcaaggcggtgctcgcggaaagctttgaaaggatccaccgctccaacctcgtgggcatgggcgtcctgcccctggagttcctgccgggagagaaccggaagaccctgggcctcacggggtacgaggtctacgacatcctgggcctcgaggacctgaagcccaggaagctcgtggacatcgtggcgaggcgggaggacgggagcgaggtccgcttccaggccatcgcccgcctggacacccccgtggaggtggactactacaagaacgggggcatcctccagaccgtgctcctcaacatgctgaaggaggccaaggccacggagtaa

SEQ ID NO: 66941 - protein, 902 aa, Thermus thermophilus HB27
MKDSFQTLKTLTTKSGTYGYYDLQELERKGVAEVSRLPFSIRVMLESLLRNEDGYQVTREDIEALARWRPDPGEINVPLKLARVILQDFTGVPAVVDLAAMRDAIKAKGGDPKRINPVVPADLVIDHSVQVDAFGTAYAFFYNVEKEYERNRERYLLLKWAQNALENFRVVPPGTGIVHQVNIEYLTKVVMTGKRDGLTLAFPDSLVGTDSHTTMVNGLGVLGWGVGGIEAEAVMLGQPYYMLAPRVVGFKLYGELPEGATATDLVLTVTEMLRKHGVVGKFVEFYGPGVAKLSTPDRATIANMAPEYGATMGFFPVDEETLNYLRQTGRPEELVELVEAYTKAVGLFRTPEAEEKVQYSEYLELDLSTVEPSLAGPKRPQDRVPLKEVKKSFLAHLTKPVKERGFGLSEDQLQRKVLVKRRDEEFELTHGSVVIAAITSCTNTSNPSVMLGAGLLAKKAVEAGLDRKPWVKTSLAPGSKVVTDYLEMSGLMPFLEALGFHLVGYGCTTCIGNSGPLPEDIAKAVEEGNLVVAAVLSGNRNFEGRINPHVKANYLASPMLVVAYALAGRMDIDFTTEPLGFDPNGKPIYLKDIWPSMEEIREAIRKTLDPELFKKEYSKVFEGDERWQALPAPTGELYQWDPESTYIQNPPFFEDLGERKVEDIRGARVLLVLGDSVTTDHISPAGAIPVKSPAGQYLISKGVKPEDFNSYGSRRGNHEVMMRGTFANIRIKNLMLDGIEGGYAKKLPEGDVDFVYNVAMRYKAEGTPLLVIAGKEYGTGSSRDWAAKGTYLLGIKAVLAESFERIHRSNLVGMGVLPLEFLPGENRKTLGLTGYEVYDILGLEDLKPRKLVDIVARREDGSEVRFQAIARLDTPVEVDYYKNGGILQTVLLNMLKEAKATE

SEQ ID NO: 66942 - DNA, 1929 bp, Desulfovibrio vulgaris subsp. vulgaris str. Hildenborough
  CDS (1)..(1929): transl_table=11
atgcccctgaaccagacccagaagatcatcaaggcccatctcgtgcacggcgacatggcacccggtgcccccattgccctgcgcatcgaccagaccctcacgcaggacgccacggggaccatggcgtaccttcagttcgaggccatgggggtggacagggtgcgcaccgacctttcggtgagctacgtcgatcacaacaccctgcagatgggcttccgcaatgcggacgaccatcgctttctgcgcacagtggcggcccggcacggcatcgtcttctccgcccccggcaacggcatctgtcaccagttgcatctcgagaacttcggccgtcccggcgcgacccttgtcggttccgacagccatacgcccacagccggtggcatcggcgccctagccatgggtgccggtggcctttccgtcgctctctccatggcgggcgagccctacaccatcaccatgcccaaggtcgtcaacgttcggcttgaaggccgcctgacgggatgggccgccgccaaggacgtgatcctgcatctgcttggtctgctcaccgtcaagggtggcgtggggcgcgtgttcgaatacaccggccccggtgtggcgaccctcagcgtccccgaacgggcgaccatcaccaacatgggggctgaactgggagccacgacatccatcttccccagcgatgaaagcacccgcgccttcctcgcggccatggggcgcgaggccgactggcagccgctcgccgccgacgccggtgccgtctacgacgaggaggtcgtcatcgacctctcgcaactggagcctctggtcgccacgccgcacatgcccgacagggtcgtcaccgtggcatcgctggcggggctcaaggtcgatcaggtggccataggttcctgcaccaactcgtcctatgccgacctcaagagcgtagcgcaggtcgtcgccggacggcgcgtcgactccaccaccgactgcatgatctcgcccggctccaagcaggtgctgcggatgctcgccaccgaaggcttgctcgaacccctgctcgacgccggtatccgcatgctggagtgcacctgcggtccctgtatcggcatgggcggttcgccggtatccgggggcgtgagcgtacgtaccttcaaccgcaatttcgaagggcgcagcggcaccaaggatgcaggcgtgtacctagccagccccctcacggcggcgatggtggccctgcatggcgggttcaccgaccccgccacatggggagaagccccggcggtgcccgaacttcccgccgatgtgccctccatccggcatctcttcgtctttcccccggaggacggttcgcaggtcgaggtgcagcgcggccccaacatcgtggccctgcaaacctttgaggggctgcccgacaggcttgacgccgaagtggtcatcaggcttggggatgacatcaccaccgaccacatcatgcctgccggtgcggagataacggccctgcggtccaatgtgcctgccatctcgcgccatgtcttcggacgtgtggatgcggacttcgtgaagcgcgccgaagcggcggccaacggcgtcatcgtcgccggagagaactacgggcagggctccagccgcgaacacgcggccctcgccccccgtcatctcggcatcagggctgtcatcgccaagtcgcttgcccgcatccatcgcgccaatctcgtgaacttcggtattctcccgctcatcctcgtggacaagggggattatgaacgccttgagcagggcggcaacgtgaccattcccgttgcggacatcatcgccggaggcgaatgcgcggttgcgctggcagacggcggttccgtccgtgtccggaacgatttgacggtggacgaattggagattattcgagcgggcggactcctcaactacgtccgcaatgcgagaacgcgcggctag

SEQ ID NO: 66943 - protein, 642 aa, Desulfovibrio vulgaris subsp. vulgaris str. Hildenborough
MPLNQTQKIIKAHLVHGDMAPGAPIALRIDQTLTQDATGTMAYLQFEAMGVDRVRTDLSVSYVDHNTLQMGFRNADDHRFLRTVAARHGIVFSAPGNGICHQLHLENFGRPGATLVGSDSHTPTAGGIGALAMGAGGLSVALSMAGEPYTITMPKVVNVRLEGRLTGWAAAKDVILHLLGLLTVKGGVGRVFEYTGPGVATLSVPERATITNMGAELGATTSIFPSDESTRAFLAAMGREADWQPLAADAGAVYDEEVVIDLSQLEPLVATPHMPDRVVTVASLAGLKVDQVAIGSCTNSSYADLKSVAQVVAGRRVDSTTDCMISPGSKQVLRMLATEGLLEPLLDAGIRMLECTCGPCIGMGGSPVSGGVSVRTFNRNFEGRSGTKDAGVYLASPLTAAMVALHGGFTDPATWGEAPAVPELPADVPSIRHLFVFPPEDGSQVEVQRGPNIVALQTFEGLPDRLDAEVVIRLGDDITTDHIMPAGAEITALRSNVPAISRHVFGRVDADFVKRAEAAANGVIVAGENYGQGSSREHAALAPRHLGIRAVIAKSLARIHRANLVNFGILPLILVDKGDYERLEQGGNVTIPVADIIAGGECAVALADGGSVRVRNDLTVDELEIIRAGGLLNYVRNARTRG

SEQ ID NO: 66944 - DNA, 2703 bp, Listeria monocytogenes str. 4b F2365
  CDS (1)..(2703): transl_table=11
atgactaattggaaagaaaaagcaaaagcatcatttcaactaaacgacaaaacgtatcattattacaaacttaaaaccttagaagaggacaagcttacaaacatcgagaaattaccttattctgtacgtgttttacttgaatccgttttaagacaagcagatggcagagtaattaaggactcacatgtagaagatttagcccattggtctaaagatggaaacgaaggcgaagtaccattcaaaccagcccgtgttattttacaagatttcacaggtgttcctgcagtggttgatttagcttctttacgtaaagccatggcagatcttggcggcgaccctgaaaaaatcaatccggaaatcccggtcgatttagtcgtcgatcactcggtgcaagtagacagctatgcgaatccagaagcactgaaaatcaatatggaactcgaattcaagcgcaacatggaacgttaccagtttttaaattgggcgcaaaaagcatttgataactatcgcgcagtaccacctgcaacaggtatcgttcaccaagttaacttagagtatttagcaaacgtcgttattgcgaatgaagtagcagacggcgaatttgtagcgtttccagattcccttgtcggaacagatagccatacgacgatgattaacggtattggtgtattaggttggggcgtgggcggtattgaagcagaagccggcatgctcggtcaaccatcttacttcccaattccagaagttatcggtgtgaaattgctaggtgctttaccaaacggcgcaacagcaactgattttgctttaaaagtaacccaagtcttacgggaacaaaaagtagtaggtaaatttgttgaattttatggtccgggtgttgcgacacttccgcttgctgaccgtgcaaccgttgcgaatatggctccagaatacggtgcaacttgtgggttcttcccagtagataaagaagcccttaattatttaaaactaactggtcgtgacaaagaacaaattgagctagtagaagcttatttagaagcaaacgatttattcttcacacctgaaaaagtagaaccaaactacacgcaaatcgtggaaatcgatctttccgcgattgaaccaaacttggcggggccaaaacgtccccaagatttgatccctctttcgaaaatgaaagaaacattccgggaatcgattactgccaaagcaggcaaccaaggtttcggactagataaatcagccttagacaaagaagtaaccgttacttttggcaatggcgatcaatccactatgaaaactggttcggttgcaatcgcggcgattacaagttgtacgaacacttctaacccatatgttatgttaagcgctggtttagttgctaaaaaagcagtcgaaaaaggcttagaagtaccaaaattcgtaaaaacatccttggcgccaggctctaaagttgtaacaggttacttggaaaaagccggcttacttccatatttagaaaaacttgggtttgaccttgttggctatggttgtacgacgtgtatcggtaattctggtccgttaaaagaagaaattgaagaagcaatacaagacagtgatttgcttgtttctgcggtattaagtggtaaccgtaactttgaagggcgtattcatgcacttgtgaaagcaaacttcctagcttcaccaccactagtcgttgcctatgcgctcgctgggacaacaaatgtcgacatgctaacagaaccaattggacgcggtaataatggcgaagaagtcttcttagacgatatttggccaagttcagaagaagtgaaggcattagtagaagaaacggtaacaccagaacttttccgtgaacaatatgctcatgtatttgatgaaaacgaagcttggaatgcgattgaaacaacagaagatgccctatacaaatgggatgaaaactctacgtatattgcgaacccaccattctttgataatttagcgaaagaagctggcaaagtagaaagcttatctggcctccgcgttattggtaaatttggtgattctgttacaaccgatcatatttcaccagccggagcaatcggcaaagataccccagctgggaaattccttcaagaagaaggcgtggcaattcgtgatttcaactcatacggttctcgtcgtggtcatcatgatgtgatgatgcgcgggacatttgcgaatattcgtattaaaaatcaaatcgcaccaggtacagaaggtggctatacgacttactggccaactggcgaagtgatgtcaatttatgatgcttctagaaaatatatcgaaaataatactggtttagtcattcttgctggtgacgattatggaatgggatcctctcgtgactgggctgccaaaggaacgaacttgctaggaattaaaacagttatcgcgaaaagctatgaacggattcatcgttctaaccttgttatgatgggtgttttaccacttcagttccaaccaggtgaagacgcagaaacgcttggtttaacaggttcagaaagcttgcaagtggaaatcggtgaagaggtagcgccaagagaccttgtaaaagtaaccgctgttcgtgaagacggctcaagcttcacttttgaagcacttgcacgttttgactctgaagtagaaattgactattaccgtcacggcggaattttaccaatggttcttcgtggcaaattgaaataa

SEQ ID NO: 66945 - protein, 900 aa, Listeria monocytogenes str. 4b F2365
MTNWKEKAKASFQLNDKTYHYYKLKTLEEDKLTNIEKLPYSVRVLLESVLRQADGRVIKDSHVEDLAHWSKDGNEGEVPFKPARVILQDFTGVPAVVDLASLRKAMADLGGDPEKINPEIPVDLVVDHSVQVDSYANPEALKINMELEFKRNMERYQFLNWAQKAFDNYRAVPPATGIVHQVNLEYLANVVIANEVADGEFVAFPDSLVGTDSHTTMINGIGVLGWGVGGIEAEAGMLGQPSYFPIPEVIGVKLLGALPNGATATDFALKVTQVLREQKVVGKFVEFYGPGVATLPLADRATVANMAPEYGATCGFFPVDKEALNYLKLTGRDKEQIELVEAYLEANDLFFTPEKVEPNYTQIVEIDLSAIEPNLAGPKRPQDLIPLSKMKETFRESITAKAGNQGFGLDKSALDKEVTVTFGNGDQSTMKTGSVAIAAITSCTNTSNPYVMLSAGLVAKKAVEKGLEVPKFVKTSLAPGSKVVTGYLEKAGLLPYLEKLGFDLVGYGCTTCIGNSGPLKEEIEEAIQDSDLLVSAVLSGNRNFEGRIHALVKANFLASPPLVVAYALAGTTNVDMLTEPIGRGNNGEEVFLDDIWPSSEEVKALVEETVTPELFREQYAHVFDENEAWNAIETTEDALYKWDENSTYIANPPFFDNLAKEAGKVESLSGLRVIGKFGDSVTTDHISPAGAIGKDTPAGKFLQEEGVAIRDFNSYGSRRGHHDVMMRGTFANIRIKNQIAPGTEGGYTTYWPTGEVMSIYDASRKYIENNTGLVILAGDDYGMGSSRDWAAKGTNLLGIKTVIAKSYERIHRSNLVMMGVLPLQFQPGEDAETLGLTGSESLQVEIGEEVAPRDLVKVTAVREDGSSFTFEALARFDSEVEIDYYRHGGILPMVLRGKLK

SEQ ID NO: 66946 - DNA, 2502 bp, Picrophilus torridus DSM 9790
  CDS (1)..(2502): transl_table=11
atggaaatcagaagagagaaggtaacaataaatggaaatgaatacatatactatccattgagccagcttggtcctgaggttaataatcttccatactcaataaaaatattattagaaaacgtgctaaaaaactacgataattcagaaattaacgataaaacaatagagaatatattaaaattaaggtatggttcagatatagcgtttaagccctcaagagttgtccttcaggactataccggcataccattaattgttgatcttgcagcattaagggagtattacaagaagaaatcacttgatccagaaaaaataaatcctgtaacaaaatcagatttaattatagatcattcaataatagttgattcattcggaaacggcgattccatagtaataaacatgaaggatgagttctcaaggaacatagaaaggtacaaatttttaaaatgggcaatggaatcatttaaaaaccttagcattgtgcctccaggtcacggaataatacaccagataaaccttgaatatctttcaagagttgcattttcagagaacaatgtaatgacagctgaaagtttaataggaacggattcgcatacaacaatgataggcggcataggcgtccttggctggggcgttggcggccttgaggcagaagcctccatgcttggagagccatattacatggtgcttccggaggtaatcggtgtaaaaattattggagatattaaagagggtgtaaccccaacagacattgttctttacataacaaataagttaagggcaagaaacgttgttggcaaattcgttgagttcttcggggatattaataaattaacagttcaggatcgtgcaacgatatcaaacatggcacctgaatacggtgcaacaataggctatttccctgttgatgacgaaaccataaaatatataaataatacaaaccgcgacggtgaaactgttaaggaattctttaaacttcaggggctattctacgatggcccaaaaaattacagcgatgttgttgaaatagaccttggtgacattgttccatccatggccggtccaaagaatccggatgagcttgttacactggatcatttaaaggaaaatgtggaaaagattatcgagggcgggcatgacggcgacgttgtaaaaaatggttctgttgtaatatccgcgataacaagctgcacaaacacatccaatccaacggttttgcttggcgcaggcatacttgcaaagaaggcatacaatctcgggcttttcccgccggattatgttaagacaagcctggcccccggatcacaggttgtcacagagtatttaaaaaataccggcctgcttgaataccttgaaaaattaaacttctacgttgttggctatggctgcacaacatgcataggcaacgccggtcccttaatacctgcagttgagaacgatataaaaaagaacaatgtaaagacattcgcggtgttaagcggaaacaggaactttgaaggcaggataaatccatacatagcgggcgcctacctggcatctccaatacttgttgcggccatggcaattgcaggaagattaaatttcgatccatataaagagccaatagcaaaggataaaaatggaaataatgtatatttaaaggatatatggccaacactggatgagatcaaggaatacataaacatggcaaacgatccaaagctttataaagaacgctataaggatgtcttctcaggggatagtaactggaactcattgtcttcagtaaatgacgttttatacaattttgatgataaatccacatatataaagatacccccatggctctaccttgagcccgtaaaggatataaaaaatggcagaattcttgcaatcttcggagacaaggtaacaacggatcatatatcaccggcaggcccaatattaaaggaatccgttgcgggaaaatatttaatgagccttggtgcaactgaaatgaacacctttggtgccagacgtggaaatcatgaggttatgctccgtggtggtttctcaaacccaaagctcagaaatttaatgagcgatgagaacggttatacaatacattatccggatggcaaaaagatgacaatatacgatgccgcaatgaaatacagggatgaaaatgtaccacttgtcatctttgcaggaaaacagtacggttctggcagttccagggactgggcggccaaggttacagcattaatgaatatcaaggccgttatagcagagagctttgaaaggatacaccgcagcaacctcgttgacatgggcgttgttccaatacaaatagataaaaagcccgagcttaagggcgatgaaatcatagaaataaatggccttgaggatctaaaaccaggaatggatataacaataaaaataaatggaatggcattaaacgggaaggtccgtgttgataccgagcaggaggtaaagtacattaaaagcggtaatattttgaaatatatagcagaaaaaaattaa

SEQ ID NO: 66947 - protein, 833 aa, Picrophilus torridus DSM 9790
MEIRREKVTINGNEYIYYPLSQLGPEVNNLPYSIKILLENVLKNYDNSEINDKTIENILKLRYGSDIAFKPSRVVLQDYTGIPLIVDLAALREYYKKKSLDPEKINPVTKSDLIIDHSIIVDSFGNGDSIVINMKDEFSRNIERYKFLKWAMESFKNLSIVPPGHGIIHQINLEYLSRVAFSENNVMTAESLIGTDSHTTMIGGIGVLGWGVGGLEAEASMLGEPYYMVLPEVIGVKIIGDIKEGVTPTDIVLYITNKLRARNVVGKFVEFFGDINKLTVQDRATISNMAPEYGATIGYFPVDDETIKYINNTNRDGETVKEFFKLQGLFYDGPKNYSDVVEIDLGDIVPSMAGPKNPDELVTLDHLKENVEKIIEGGHDGDVVKNGSVVISAITSCTNTSNPTVLLGAGILAKKAYNLGLFPPDYVKTSLAPGSQVVTEYLKNTGLLEYLEKLNFYVVGYGCTTCIGNAGPLIPAVENDIKKNNVKTFAVLSGNRNFEGRINPYIAGAYLASPILVAAMAIAGRLNFDPYKEPIAKDKNGNNVYLKDIWPTLDEIKEYINMANDPKLYKERYKDVFSGDSNWNSLSSVNDVLYNFDDKSTYIKIPPWLYLEPVKDIKNGRILAIFGDKVTTDHISPAGPILKESVAGKYLMSLGATEMNTFGARRGNHEVMLRGGFSNPKLRNLMSDENGYTIHYPDGKKMTIYDAAMKYRDENVPLVIFAGKQYGSGSSRDWAAKVTALMNIKAVIAESFERIHRSNLVDMGVVPIQIDKKPELKGDEIIEINGLEDLKPGMDITIKINGMALNGKVRVDTEQEVKYIKSGNILKYIAEKN

SEQ ID NO: 66948 - DNA, 2688 bp, Bartonella henselae str. Houston-1
  CDS (1)..(2688): transl_table=11
atgactcaaattgatagctttaattgtcgcagaactttagatgtgagtggtaaagaatatacttattatagtttgattgaagcagagaaaaatggacttaaaggcatttctcatttgccgttttcgatgaaagttattcttgaaaatttattacggtttgaagatggccgcacagttaataaagaggatattttaaacgttgcaaaatggctaaaagacaagggtagtgctggtgcagaaattgcttatcgtcctgcgcgtgttcttatgcaagattttactggtgttcctgcagttgttgacttgtctgcgatgcgcgacgctatggtcaaacttggaggaaatgctgaaaaaatcaatcctctcattcctgttgatcttatcattgatcactcaattatcgttgatgcttttggtaatcctatggcatttaaagaaaatgttgagcatgagtatgaacgtaatagtgaacgctatcgtttccttaagtgggggcagcaagcttttcaaaattttcgcgttgttcctccaggaacagggatttgtcatcaagttaacctagaatatttagcacagtgcgtgtggatgaagggtgatgaaaaatatcagacggtttatcctgatacctgtgtaggaactgattctcatacaactatggtgaatggtttgggtgttttgggttggggggtcggtggtattgaagcagaagcggcaatgttaggtcagcccgtttctatgttgttgcctgaagtgattggtttccatttaaccggtaaacttaaagaaggtgtaacggctactgatctagttttgatggtgacacaaattttacgtaaaaagggtgttgtcggtaaatttgttgagttttttggtcctggtctggagcacatgacgcttgctgatcgggcgacaattgcaaatatggcacctgaatatggggcaacatgtggttttttcccaattgatagggaaacagtgcgttatcttaatatgacaggacgcaatgaaaatcggatcgcgttagtggaagcttatgccaaagcacaagggatgtggcatgacgaaatgggaaccgatccggtttttagtgatacaattgaattagatatgggaagcgttgtgccttctatggctggtcctaaacgtcctgagggacgtattgcgttggaaactgttgggcagggttttgaaaaagcattggttgaggattataagaaggcttttggtcaagatgaccgttatcgtgttgagggagagaaatacacgcttcgacatggcgatgtggtcattgctgcaattacttcctgtacaaatacatcaaatccgagtgttcttattgcagcaggtcttttggcgcgtaatgctgtggcgaaaggtctcaagagtaaaccatgggttaagacttctcttgcgcctggttcgcaagttgtggcagcctatcttcacaattcaggtctgcaaaaagatttggatgtactaggatttaacttagtagggtttggttgcacgacatgtattgggaattctggtcctttatacccatctatttctaaagcgattaatgataatggtctcatcgcagctgcggttctttcaggaaatcgtaattttgaaggccgtgtttcacctgatgtgcaggcgaattatttagcttcaccacctttggttgttgcacatgctctggctggaacagtacgtaaagatttaaccaaggagcctcttggcgaaggttcagacggtcagccagtttatttaagagatatttggccaacttctaaagaaatacaggagtttatcgaaaagaatgtcacacgtaagatttttactgaaaaatacgcagatgtttttaagggagatgaaaattggcaaaaagttcgagttcctacggaggctacctattcctgggatgagcaatcaacatatgtgcgtaatccaccttatttcgataatatgcggaaagttcctgatgccttgtcagacattaaaaacgcacgaatcttaggtttgtttggtgataaaatcacaacggatcatatttctcctgctggttccattaaggttgattctcctgctggaaaatatttgactaatcatggtgttaaagtagctgattttaaccaatatggaacgcgtcgtgggaaccatgaagttatgatgcgtggaacctttgcaaatattcgtattcgtaacttcatgctaggagaaaatggtcgtgaaggaggctatacagttcattatccatcagggacagaacaagcgatttacgatgcagcaatggcatataaacgggaaggtattccgcttgttgtttttgctggtattgaatatggtaatggatcatctcgtgattgggcggctaagggcaccaatcttcttggtgtaaaagcagttattgctcagtcttttgagcggattcatcgttctaatcttgttggtatgggaattgttccctttgtgtttgaagagggtgaaagctggcagtctttgggcttaaaaggagatgaaaaggtaacgattgaagggattcataatttaaaacctcgtcaaaagattgtcgccacaattactttttctgatggaacggtaaaaactgttccattattatgccgtgtcgatactgaagatgaattggactatctgcatcacggtggtattttgcaatatgttttgcgtaatctggcagtttaa

SEQ ID NO: 66949 - protein, 895 aa, Bartonella henselae str. Houston-1
MTQIDSFNCRRTLDVSGKEYTYYSLIEAEKNGLKGISHLPFSMKVILENLLRFEDGRTVNKEDILNVAKWLKDKGSAGAEIAYRPARVLMQDFTGVPAVVDLSAMRDAMVKLGGNAEKINPLIPVDLIIDHSIIVDAFGNPMAFKENVEHEYERNSERYRFLKWGQQAFQNFRVVPPGTGICHQVNLEYLAQCVWMKGDEKYQTVYPDTCVGTDSHTTMVNGLGVLGWGVGGIEAEAAMLGQPVSMLLPEVIGFHLTGKLKEGVTATDLVLMVTQILRKKGVVGKFVEFFGPGLEHMTLADRATIANMAPEYGATCGFFPIDRETVRYLNMTGRNENRIALVEAYAKAQGMWHDEMGTDPVFSDTIELDMGSVVPSMAGPKRPEGRIALETVGQGFEKALVEDYKKAFGQDDRYRVEGEKYTLRHGDVVIAAITSCTNTSNPSVLIAAGLLARNAVAKGLKSKPWVKTSLAPGSQVVAAYLHNSGLQKDLDVLGFNLVGFGCTTCIGNSGPLYPSISKAINDNGLIAAAVLSGNRNFEGRVSPDVQANYLASPPLVVAHALAGTVRKDLTKEPLGEGSDGQPVYLRDIWPTSKEIQEFIEKNVTRKIFTEKYADVFKGDENWQKVRVPTEATYSWDEQSTYVRNPPYFDNMRKVPDALSDIKNARILGLFGDKITTDHISPAGSIKVDSPAGKYLTNHGVKVADFNQYGTRRGNHEVMMRGTFANIRIRNFMLGENGREGGYTVHYPSGTEQAIYDAAMAYKREGIPLVVFAGIEYGNGSSRDWAAKGTNLLGVKAVIAQSFERIHRSNLVGMGIVPFVFEEGESWQSLGLKGDEKVTIEGIHNLKPRQKIVATITFSDGTVKTVPLLCRVDTEDELDYLHHGGILQYVLRNLAV

SEQ ID NO: 66950 - DNA, 2724 bp, Bacillus thuringiensis serovar konkukian str. 97-27
  CDS (1)..(2724): transl_table=11
atggtcaaacataatccatttcaatcacgtgcaacttttgaagtagatggaaaaacgtatcattattatgatttgaaagcgcttgaaaatgcaggggttggcaacgtatctcaattaccatattccgtgaaagttttacttgaatcagtacttcgtcaagtagacggacgtgtaatcacagaagagcatgttacaaatttagcgaaatggggaacgaaagatgtgcaagatatcgatgttccatttaaaccatctcgtgtaattttacaagatttcactggtgttccagctgttgttgatttggcttcgcttcgtaaagcaatggcagacatgggtggggatcctgataaaattaatccggaaattactgtagaccttgtaattgatcactctgtacaggttgatagagcgggtacggcagacgcgcttgcattcaacatggacttagagtttaaacgtaatgaagaacgttataaatttttaagctgggcacaaaaatcatttgataactaccgtgcagttccaccagctacaggtattgtacaccaagtaaaccttgaatatttagcaccagttgttcacgctgtgaaaaatgctgaaggtgacttagttgcatacccagattcattagttggaacagactcacatacaacaatgattaacggtatcggcgttcttggatggggcgttggtggtattgaagcagaagcaggaatgcttggacagccttcatacttcccagtacctgaagtaatcggtgtgaaattaacgggtacacttccaagtggtactacagcaactgacgttgcattaaaagtaacacaagtattacgtcaaaaaggtgtagttggtaaattcgttgagttcttcggtaatggcttaaagagcatgcctttagctgaccgtgcgacaatttcaaatatggcgccagaatacggcgcaacttgtggattcttcccaatcgacgaaatttcattagaatacttgcgtttaacaggtagagatgaagaacaaattcgcgttgttgaagaatactgtaaagcgaacggcctattctatacagcagacagcaaagatccaatttacactgatcttgttgaaattgatttaaatacaatcgaatctaacctttctggaccgaaacgcccacaagatttaattccactttcagatatgaaagatgcgttccacaaagctgttgtagcaccagttggaacacaaggacttggatttaatgagcaagagttcgataaagaagtgaaggttacattagaagataaagaagtaacgatgaaaacaggtgcaattgcaatcgctgcaattacaagctgtacaaatacatcaaacccatacgtattaattggggcaggtttagttgcgaagaaagcaattgaaaaaggacttaaagtacctgagtacgtaaaaacatcattagcaccaggatctaaagttgttactgaatacttagataaatcaggtttaacaacatatttagaccaattaggtttccaaacagttggttacggctgtacgacttgtatcggtaactctggtccattagcaccggaattagaagaagcaatcgcagcaaacgatttattagtaacatctgttttatctggtaaccgtaactttgaaggtcgtattcacccgcttgtaaaagcgaactacttagcatcaccaccacttgttgtggcttatgcacttgcaggtactgttgatattgacctgaaaaatgatgaaatcggtaaagatgcaaatggcaatgctgtttacttcaatgacatttggccatcagctaaagaaattgaagatgtagtccaaagtgttgttacatctgaactgttcaagaaagaatatgcacaagtatttaacagcaatgagcgttggaatgaaatccaaacttcaaacgaagctttatatacttgggataatgattcaacatacattcaaaacccaccattctttgaaggtttatctaaagagccaggtgaagttgaaacgttatcgggcttacgcgtagttggtaaatttggtgactctgtaacgacagaccacatttcaccagcaggttcaatcggtaagcacacaccagctggacgctacttattagaaaacggcgtacaaccagttgactttaactcttacggttctcgtcgtggtaaccatgaagttatgatgcgtggtacattcgcgaacatccgtattaaaaaccaaatcgcaccaggaacagaaggcggatatacaacatactggccaactggtgaagtaacatctatctatgatgctgctatgaaatataaagaagatggcacaggccttttagttgttgctggtaaagattacggtatgggaagttctcgtgactgggctgcaaaaggtacaaacttattaggtattaaagcagtaatcgcagaaagcttcgagcgtattcaccgcagtaacttagtgttaatgggcgtattaccacttcaatttaaagatggcgaaagcgctgaaacattaggtcttgttggtaacgagtcatttgaaattcaaattgacaaaacagttagaccgcgcgatcttgtaaaagtagttgcaactgatctagatggcaacgaaaaacaatttgaagtagtagctcgtttcgatagtgaagttgaaattgactactaccgtcacggtggtattctgcaaatggttcttcgtgagaaaattgaagagtctaaagtgtcgaactaa

SEQ ID NO: 66951 - protein, 907 aa, Bacillus thuringiensis serovar konkukian str. 97-27
MVKHNPFQSRATFEVDGKTYHYYDLKALENAGVGNVSQLPYSVKVLLESVLRQVDGRVITEEHVTNLAKWGTKDVQDIDVPFKPSRVILQDFTGVPAVVDLASLRKAMADMGGDPDKINPEITVDLVIDHSVQVDRAGTADALAFNMDLEFKRNEERYKFLSWAQKSFDNYRAVPPATGIVHQVNLEYLAPVVHAVKNAEGDLVAYPDSLVGTDSHTTMINGIGVLGWGVGGIEAEAGMLGQPSYFPVPEVIGVKLTGTLPSGTTATDVALKVTQVLRQKGVVGKFVEFFGNGLKSMPLADRATISNMAPEYGATCGFFPIDEISLEYLRLTGRDEEQIRVVEEYCKANGLFYTADSKDPIYTDLVEIDLNTIESNLSGPKRPQDLIPLSDMKDAFHKAVVAPVGTQGLGFNEQEFDKEVKVTLEDKEVTMKTGAIAIAAITSCTNTSNPYVLIGAGLVAKKAIEKGLKVPEYVKTSLAPGSKVVTEYLDKSGLTTYLDQLGFQTVGYGCTTCIGNSGPLAPELEEAIAANDLLVTSVLSGNRNFEGRIHPLVKANYLASPPLVVAYALAGTVDIDLKNDEIGKDANGNAVYFNDIWPSAKEIEDVVQSVVTSELFKKEYAQVFNSNERWNEIQTSNEALYTWDNDSTYIQNPPFFEGLSKEPGEVETLSGLRVVGKFGDSVTTDHISPAGSIGKHTPAGRYLLENGVQPVDFNSYGSRRGNHEVMMRGTFANIRIKNQIAPGTEGGYTTYWPTGEVTSIYDAAMKYKEDGTGLLVVAGKDYGMGSSRDWAAKGTNLLGIKAVIAESFERIHRSNLVLMGVLPLQFKDGESAETLGLVGNESFEIQIDKTVRPRDLVKVVATDLDGNEKQFEVVARFDSEVEIDYYRHGGILQMVLREKIEESKVSN

SEQ ID NO: 66952 - DNA, 2634 bp, Acinetobacter sp. ADP1
  CDS (1)..(2634): transl_table=11
atgtcaaatccatatcgtaaaacgttgccgaatgctgcacttggcgataccccgctggactattacgacgtgcgtcaagccgttgaagatattctgcctggcgcttaccagacattgccttatacctcaaaagtgctggccgagcagttggttcgtaaagcagatcctgcgcatctgactgattatttaaagcagttgatcgaacgtcgtcaggatctagattttccttggtatccggcgcgtgtggtctgtcatgatattttaggtcaaaccgcgctggttgatcttgcgggcctacgggatgccattgcagataaaggtggcgatccgtctaaagtgaatccagtggtgccgacacaactgattgtcgaccattcgcttgcggtcgaatatggcggattcgatcccgatgcctttgagaaaaaccgcgcgattgaagaccgtcgtaacgaagaccgttttcattttatcgaatggaccaaaacggcatttaaaaatgtcgatgtcattcctgccggaaacggcatcatgcaccagatcaatctggaaaaaatgtcgccagtagttcaggcacgtgatggtgtagcttatccagatacctgtgtcggcaccgattcacatactccgcataccgatgcattgggtgttatttcgataggtgtcggtggcttagaagcagagaacgtgatgctgggccgtgcttcttggatgcgtttgcccgatatcattggcgtcgagctggtcgggcagcgtcaggccggcattaccgcgaccgatatcgtactggctttaactgaatttttacgaaaagaacgcgtggtcggggcatatctggagttttttggcgagggagccgacagcatgtcggtgggtgaccgtgccaccatttcaaacatgacaccagaatatggcgccaccgcagccatgttttatatcgaccagaacaccatcgactatttgcgcctgacaggccgtgaagatgctcaagtggtattggttgagcaatatgcaaaagaaatcggtctttgggcatctgaaatgactcaagccgagtacccgcgcgtactgcgttttgatttatccactgttacacgcaacattgcaggcccatctaatccgcatgcccgtgtttcaaccgccgacttggcagcaaaaggcattgctggcaacttagatgcagccaaagcacaagaagcagaaggcttgatgccagatggcgccgtcatcattgcggcgattacctcttgtaccaatacctcaaacccacgtaataccgtggccgcagggctactcgcacgtaaggccaacgagttaggtttagttcgtaagccttgggtaaaatcttcttttgcaccggggtcaaaggcggcagcgctttacctagaagaagcgggcgtacttaaagacttagaacaactcggttttggtattgtggcctatgcctgtaccacgtgtaatgggatgtctggcgcgcttgatcctgccattcagcaagaaattatcgaccgtgatttgtatgcaacggctgtactttcgggcaaccgtaacttcgacgggcgtattcatccatatgcaaagcaggcctttttggcatctccaccacttgttgtggcatatgcaattgccggcactattcgttttgacatcgaaaaagatgcactcggcaccgatcaaaacggcaaagccatttacctcaaagacatctggccatccgatgccgaaatagatgcactggtcaaagaagcggtgaagcctgaacagttccgtaaagtgtatattcccatgtttgatctgggtgaggttgaacaggccgaaagcccactatacaactggcgcccacaaagtacctatattcgccgtccgccatattgggaaggcgcgctggctgcaccacgcactttgaccaatatgcgtccactggcgattttaggagataacatcaccactgaccatttatcaccttcaaatgcgattatgatggattcggcagcaggtgaatacttgcataaaatgggcgtaccagaagaagacttcaactcttatgcaacccaccgcggtgaccacttaaccgcacaacgtgccactttcgccaacccgaaattgtttaatgaaatggtggtacgctccgacggtaccattaagcaaggttcaaaagcgcgcgtcgagccagaaggcgaagtgatgcggatgtgggaagccattgaaacctacatgaaccgtaagcaaccgttgatcattgttgcgggtgcagattatggtcaggggtctagtcgtgactgggctgcaaaaggtgtacgccttgccggtgtagaagccattgtagccgaaggctttgagcgtattcaccgtactaaccttgtaggtatgggcgtgttaccgcttgagtttaaagcaggtgtcaaccgtaaaaccttaaaactcgatggtactgagctatatagcgtgattgggaatattgcaccgcgttcgacgttaactttggtgattgagcgtgctacagcggatggtaaagacgagattctggaagtgcctgtgacttgccgtttagataccgaagaagaagtgtctgtatatgaggcgggtggggtgttacagcgttttgcacaggactttttagaaggccaagtggcttga

SEQ ID NO: 66953 - protein, 877 aa, Acinetobacter sp. ADP1
MSNPYRKTLPNAALGDTPLDYYDVRQAVEDILPGAYQTLPYTSKVLAEQLVRKADPAHLTDYLKQLIERRQDLDFPWYPARVVCHDILGQTALVDLAGLRDAIADKGGDPSKVNPVVPTQLIVDHSLAVEYGGFDPDAFEKNRAIEDRRNEDRFHFIEWTKTAFKNVDVIPAGNGIMHQINLEKMSPVVQARDGVAYPDTCVGTDSHTPHTDALGVISIGVGGLEAENVMLGRASWMRLPDIIGVELVGQRQAGITATDIVLALTEFLRKERVVGAYLEFFGEGADSMSVGDRATISNMTPEYGATAAMFYIDQNTIDYLRLTGREDAQVVLVEQYAKEIGLWASEMTQAEYPRVLRFDLSTVTRNIAGPSNPHARVSTADLAAKGIAGNLDAAKAQEAEGLMPDGAVIIAAITSCTNTSNPRNTVAAGLLARKANELGLVRKPWVKSSFAPGSKAAALYLEEAGVLKDLEQLGFGIVAYACTTCNGMSGALDPAIQQEIIDRDLYATAVLSGNRNFDGRIHPYAKQAFLASPPLVVAYAIAGTIRFDIEKDALGTDQNGKAIYLKDIWPSDAEIDALVKEAVKPEQFRKVYIPMFDLGEVEQAESPLYNWRPQSTYIRRPPYWEGALAAPRTLTNMRPLAILGDNITTDHLSPSNAIMMDSAAGEYLHKMGVPEEDFNSYATHRGDHLTAQRATFANPKLFNEMVVRSDGTIKQGSKARVEPEGEVMRMWEAIETYMNRKQPLIIVAGADYGQGSSRDWAAKGVRLAGVEAIVAEGFERIHRTNLVGMGVLPLEFKAGVNRKTLKLDGTELYSVIGNIAPRSTLTLVIERATADGKDEILEVPVTCRLDTEEEVSVYEAGGVLQRFAQDFLEGQVA

SEQ ID NO: 66954 - DNA, 2673 bp, Erwinia carotovora subsp. atroseptica SCRI1043
  CDS (1)..(2673): transl_table=11
atgtcatcacaccttcgcgacacttgtctggacacactgacggttcgacagcagatttaccattactacagcctgccgaaggcggcgaaaacgcttggcaatatcgataaattaccgaagtcactcaaggtattgctggaaaatttattgcgtcatcaggacggcgacacggtcgagcaggacgatcttcaggcggtcgtggactggctgaaaatcggtcacgccgatcgggaaatcgcctatcggccagcgcgcgtactgatgcaggactttaccggcgtgcccgccgtggtcgatctggcggcgatgcgtgcagcggtgaaacggttgggcggcgatgttaataaggtcaacccgctgtcgccggtcgatctggttattgaccactcggttacggttgatcacttcggcgatcgtcaggcgctagcggataacacgcagttggaaatggcgcgtaaccgtgaacgttatgagtttttgcgctggggacaaaatgcctttagccacttcagcgtcgtgccgccgggaaccgggatctgccatcaggtgaatctggagtatctcgccaaggccatctggtacgaaaaacagggcgacaaacagtttgcctaccctgatacgctggtaggaaccgattcgcacaccaccatgattaacggtttgggcgtgctcggctggggtgtcggtgggatagaagcagaagccgcgatgttggggcaacctgtttcgatgctgattcccgatgtggttggcgtcaaattaagcggcaaaatgcaagaagggatcacggcaaccgatttggttctgacggtaacgcagatgctgcgtaaacacggcgttgtcggcaaatttgtggaattttacggtgatgggctggattctctaccgttggcagatcgcgcgactatcgccaacatggcaccggaatatggtgcaacctgtggctttttccctatcgatcacatcacgctggattacatgcggttgaccaaccgcgccgaagaacagattgcactggtggaagcctacagtaagcaacaggggctgtggcgcaatgctggagatgagccggtattcaccagccagctagcgctggatttggcaacggtggaaaccagtctggcagggccgaaacgcccacaggatcgcgtgcctttagcgggtgtgccggaagcctttaaagccagccgggaactggatgtcagctcggtgaagaaccgctctgactatgaagagttcacgttggaaggtgagacgcatcgcttgcatcagggggcggtcgtgatcgcggcgatcacctcttgtactaatacctccaaccctagcgtgctgatgacggctgggctactggcaaaaaatgccgtagagcgtggtcttaaaaccaagccgtgggtcaaaacctcgttggcaccgggctcacgggtcgtcacggattactatgctaaagcggaattaacgccatacctcgacgagttggggttcaatctggtggggtacggctgtaccacctgtatcggtaactccggcccgctgccggatgcgattgaagccgcgataaaagaaggcgacttgacggtcggcgccgtgttgtcaggtaaccgtaactttgaaggccgtattcatccgctggtgaagactaactggctggcgtcaccgccgctggtggtcgcctacgcgctggcgggaaatatgaatgtcgatctgacgcaacaaccgctgggtgaagatcgtgacggaaaagccgtttatctgaaagacatctggccctcgacgaaagcggtggcggacgcggtattgaatgtcaacgctggcatgttccacaaacaatatgccgcagtgtttgaaggtacgcaggagtggcaagatatcgaggtcgacgataatcctacctatcagtggccggaagaatcgacctatattcgccagacgcctttctttctggatatggggaaagaaccggagccggttcaggatatccacaaggcgcgcattctggcgatgctgggcgattcggttacaaccgaccacatctcgccagcaggcaacatcaagcgtgatagccctgcagggaaatatttgctggaacgcggcgttgaaaccacggagttcaactcttacggttcacggcggggcaaccacgaagtgatgatgcgcgggacgtttgccaacatccgtatccgtaatgaaatggtgccgggtaaagagggcggttatacccgtcacattccgtcgcagaatgagatgacgatctatgacgcggcaatgcgctacaaggaagaaggtgtctcactggcgctgtttgctgggaaagagtacggttcgggttctagccgagactgggccgcgaaaggcccacgtttgctgggtgttcgcgtggtgatcgccgaatcgttcgagcgtattcaccgctctaacctgattgggatggggattctgccgctggaatttcccgacggtgtgacgcgtaaaacgctgcaattaaccggggatgagcagatttcgattacgggattaaatcaactggcacctggcgccacggttgaggtaaatatcacggatgctgatggtaatacgcaggtgatcaacacccgctgccgcatcgacacccgtaatgaactgacctattaccagaacgacggtatccttcattacgttatccgtaatatgttgtaa

SEQ ID NO: 66955 - protein, 890 aa, Erwinia carotovora subsp. atroseptica SCRI1043
MSSHLRDTCLDTLTVRQQIYHYYSLPKAAKTLGNIDKLPKSLKVLLENLLRHQDGDTVEQDDLQAVVDWLKIGHADREIAYRPARVLMQDFTGVPAVVDLAAMRAAVKRLGGDVNKVNPLSPVDLVIDHSVTVDHFGDRQALADNTQLEMARNRERYEFLRWGQNAFSHFSVVPPGTGICHQVNLEYLAKAIWYEKQGDKQFAYPDTLVGTDSHTTMINGLGVLGWGVGGIEAEAAMLGQPVSMLIPDVVGVKLSGKMQEGITATDLVLTVTQMLRKHGVVGKFVEFYGDGLDSLPLADRATIANMAPEYGATCGFFPIDHITLDYMRLTNRAEEQIALVEAYSKQQGLWRNAGDEPVFTSQLALDLATVETSLAGPKRPQDRVPLAGVPEAFKASRELDVSSVKNRSDYEEFTLEGETHRLHQGAVVIAAITSCTNTSNPSVLMTAGLLAKNAVERGLKTKPWVKTSLAPGSRVVTDYYAKAELTPYLDELGFNLVGYGCTTCIGNSGPLPDAIEAAIKEGDLTVGAVLSGNRNFEGRIHPLVKTNWLASPPLVVAYALAGNMNVDLTQQPLGEDRDGKAVYLKDIWPSTKAVADAVLNVNAGMFHKQYAAVFEGTQEWQDIEVDDNPTYQWPEESTYIRQTPFFLDMGKEPEPVQDIHKARILAMLGDSVTTDHISPAGNIKRDSPAGKYLLERGVETTEFNSYGSRRGNHEVMMRGTFANIRIRNEMVPGKEGGYTRHIPSQNEMTIYDAAMRYKEEGVSLALFAGKEYGSGSSRDWAAKGPRLLGVRVVIAESFERIHRSNLIGMGILPLEFPDGVTRKTLQLTGDEQISITGLNQLAPGATVEVNITDADGNTQVINTRCRIDTRNELTYYQNDGILHYVIRNML

SEQ ID NO: 66956 - DNA, 2667 bp, Propionibacterium acnes KPA171202
  CDS (1)..(2667): transl_table=11
atgagtgtcaacagcttcaacgcgaggcgaatcctcgacgtcgacggccagtcttacgagatctacgacatcaccaaggttgatggttccgacaaccttccgtatagcctcaaggttctgcttgagaacctgttacgcaccgaggatggcgccaacatcacggccgagcagatcactgaactaggtcattgggacgccgacgcccagccgtccaaggagatccagttcactccggcccgcgttattatgcaggacttcaccggcgtgccttgtatcgtcgacttggccaccatgcgcgaggctgttgccgacctcggtggtgatccccgcaaggtcaacccactgtcaccagcagagatggtcattgaccactccgtcatcgttgagcgctttggcactccggaagccttcgagcagaacaaggacatcgagtaccagcgcaaccgtgagcgttaccagttcctacgttggggccagagcgcgttcgagaacttccgcgtcgttccgccgggcactggcatcgttcaccaggtcaacatcgaacaccttgcccgggtgaccttcatccgtgacgacgacggcaccaaagtcgcctacccagatacctgtgtgggcaccgactcccacaccaccatggtcaacgggctaggcgtcgttggctggggtgttggcggcatcgaggccgaggccgccatgctcggtcagccagtctccatgttggttccgcgcgtcgttggcttcaagctctccggtgagctgtccgatggcgtcaccgccaccgacctcgtcttgacgatcacccagatgctgcgtgagcataaggtcgtcggtaaattcgtcgagttttacggtcctggcgttgctgctgtgccgctagctaaccgcgctacgttgggcaatatgagccccgaatacgggtcgactattgctgtctttccgatcgacgatgtcaccctggactacctgcgtcttaccggtcgcgacgagtcccaggtcaagctcgtcgaggcctatgctaaggcccagggtatgtggcacgatccgcagcatgaggcccgctattccgaatacatagagctcgacctctcaacggtcaagccctccatcgctggcccgaagcgcccgcaggatcgcatccttatctctgaggccaaggaatctttcgaaaagactgttggtgactacaccaccaaccctggtgcggccgttcccgttaccctcgctgacggtcgctccttcgagctacgcaacggtgccgtgacggtcgccgctatcacctcgtgtaccaatacttcgaacccgagcgtcatgatcgctgccggtctcgttgccaagaaggcccacgagttgggcttggctccgaagccgtgggtcaagacgtcgctggctccgggctcccaagtcgtcactgactactttgagcgtgcggggctttctgaacatcttgctgcgatgggttttgacctcgttggctatggctgcactacctgtattggcaacaccggcccgcttattcctgaagtctcggctgccatcaatgagaacgatctggccgtcacggccgtcctgtctggcaaccgcaacttcgagggtcgcatcagccccgacgtcacgatgaactacctagccagccctccgctggttgtcatctactcgattgccggcactatggacatcgacctcaacaatgacgttctcgccaccaccccggatggtcgtgaggttcgtttggttgatctgtggccctctaccgaggagattgaggagatcgtcgggtcgtctatctccgccgagatgtactcagagcgttacgctgacgtcttcgatggcggtccgcgctggaaggagctcgatacccccgagggtgagaccttcgcttgggacccggcttctacctatgtacgcaagctaccgatctttgacggtatgaaggctgagccggagccggttggtgacatcactggcgctcgcgtgctgctcaagctgggtgactcggtaaccactgaccacatttccccggcgggcaacattaagtctgattctccggccggccagtggttggccggcaatggcgtcgagtgccgcgacttcaactcctatggttcccggcgtgggaatcacgaggtcatgatgcgtggtaccttcgctaatatccggctgcgcaatcagcttgcctcaggaactgagggtggcttcacccgtgatttcaccaaggctgacgggcctgtcacgacggtgtacgacgcctcggtgaattaccgcgagcaaggcatcccgttggtcgtcttgggtggtaaggagtacggttctggttcctcgcgcgactgggctgccaaaggcacccagctgctcggtgtcaaggcggttatcgctgagagttacgagcgcatccaccgctccaacctcatcggaatgggcgtcctgccgctgcagttcccggagggccaatcagccgcttccctcggtctgactggcgaggaaaccttcgagattaccggtgttgacaagattaacgagatgatcccggaggcggtccacgtcaaggccgtcaacgatgaggtcgtcgagtttgacgcggtcgtgcgcattgacacccctggagaacggctgtactacctcaacggtggcatcttgcagtatgtgctgaggaacatggcacgtagttga

SEQ ID NO: 66957 - protein, 888 aa, Propionibacterium acnes KPA171202
MSVNSFNARRILDVDGQSYEIYDITKVDGSDNLPYSLKVLLENLLRTEDGANITAEQITELGHWDADAQPSKEIQFTPARVIMQDFTGVPCIVDLATMREAVADLGGDPRKVNPLSPAEMVIDHSVIVERFGTPEAFEQNKDIEYQRNRERYQFLRWGQSAFENFRVVPPGTGIVHQVNIEHLARVTFIRDDDGTKVAYPDTCVGTDSHTTMVNGLGVVGWGVGGIEAEAAMLGQPVSMLVPRVVGFKLSGELSDGVTATDLVLTITQMLREHKVVGKFVEFYGPGVAAVPLANRATLGNMSPEYGSTIAVFPIDDVTLDYLRLTGRDESQVKLVEAYAKAQGMWHDPQHEARYSEYIELDLSTVKPSIAGPKRPQDRILISEAKESFEKTVGDYTTNPGAAVPVTLADGRSFELRNGAVTVAAITSCTNTSNPSVMIAAGLVAKKAHELGLAPKPWVKTSLAPGSQVVTDYFERAGLSEHLAAMGFDLVGYGCTTCIGNTGPLIPEVSAAINENDLAVTAVLSGNRNFEGRISPDVTMNYLASPPLVVIYSIAGTMDIDLNNDVLATTPDGREVRLVDLWPSTEEIEEIVGSSISAEMYSERYADVFDGGPRWKELDTPEGETFAWDPASTYVRKLPIFDGMKAEPEPVGDITGARVLLKLGDSVTTDHISPAGNIKSDSPAGQWLAGNGVECRDFNSYGSRRGNHEVMMRGTFANIRLRNQLASGTEGGFTRDFTKADGPVTTVYDASVNYREQGIPLVVLGGKEYGSGSSRDWAAKGTQLLGVKAVIAESYERIHRSNLIGMGVLPLQFPEGQSAASLGLTGEETFEITGVDKINEMIPEAVHVKAVNDEVVEFDAVVRIDTPGERLYYLNGGILQYVLRNMARS

SEQ ID NO: 66958 - DNA, 2883 bp, Leifsonia xyli subsp. xyli str. CTCB07
  CDS (1)..(2883): transl_table=11
gtgcgacgtttttcgcctgccgaagaaggagagggcaacgtgtcagctgtcaatagcttaggtgccaagagcaccctgagcgtcggcgacaaggactatacgatcttcgcgatcgacactgtcgacggatacaagagactcccgttcagcctcaaggtgctgctggagaaccttctccgcaccgaggacggcgcgaacatcaccgcggaccacatccgtgcgctgggctcgtgggacccggccgccgagccagacaccgagattcagttcacgcctgcccgcgtcatcatgcaggacttcaccggcgtcccctgcatcgtcgacctcgccaccatgcgcgaggccgtctccgccctgggcggcgacccccagaagatcaacccgctcgcaccggccgagatggtcatcgaccactccgtcatcgccgacctgttcggccaggaagatgcgctggagcgcaacaccgacctcgagtacgagcgcaacggcgagcgctaccagttcctgcgctggggccagaccgccttcgacgactttaaggtcgtcccgccgggaaccggcatcgtccaccaggtgaacatcgagtacctggcgcgcgtcaccatgacccgcgagggcagcactccggagactcggggcgagctgctcgcgtacccggacacctgcgtcggcaccgactcgcacaccacgatggtcaacggcctcggcgtgctcggctggggcgtcggcggcatcgaggccgaggcggccatgctggggcagccggtctccatgctcatccccaaggtggtcggcttcaagctgaccggcgccatcccgaccggtgtgacggcgacggatgtcgtgctcaccatcacccagatgctgcgccagcacggcgtggtcggcaagttcgtggagttctacggcgcgggcgtcgcccaggtgccgctcgcgaaccgcgccaccatcggcaacatgagccccgagttcggctccaccgcggcgatgttccccatcgacgatgtgaccctcgactacctgcgcctcaccggccgcagcgcggagcaggtcgcgctggtcgaggagtactcgaaggcccagagcctatggcacgacccggccagcgagccggtgttctccgagtacctggaactcgacctctccacggtggtgccttcgatcgccggcccgaagcgcccgcaggaccgcatcgagctgagcgccgcgaaggaccagttcgagaaggacctcaccaactacgcggacatctcgcacgacctggtcgacctgaccgtcgcggagtccttcccggcctccgacccgggcgagctccagccggaggacgcgcgcagcatccaccagcactcgcaccacagccacgctccccaggcagcgtcgaacccgaccccggtgaagctggaggacggcacggacttcgtgatcgaccacggcgcggtcgccatcgcagcgatcacctcctgcaccaacacctccaacccgtcggtgatgctggctgccgggctcctcgcccgcaacgcggcgaagaagtgtttgaaggccaagccgtgggtcaagaccaccctggcccccgggtccaaggtcgtcacggactactacgagaaggccggtctcaccaaggacctggaggcgctcggcttctacaccgtcggctacggctgtaccacctgcatcggcaactcgggcccgctgctcgacgagatctcgcaggcggtcaacgacagcgacctcgccgtgacggctgtgctctcgggcaaccgcaacttcgagggccgcatcaaccccgacgtgaagatgaactacctggcgagcccgccgctggtcatcgcctacgccctggccgggtcgatgaacttcgacttcgaggtcgacccgctcggcaccgaccaggacggcaacgacgtgttcctccaggacatctggccggacgccgccgaggtgcagcagacgatcgactcctccatcaacgaggggatgttcgtcacccagtacgcctcggtgttcgagggcgacgagcgctggaagtcgctcgccaccccgaccggctcggtgttcgagtgggatgagaagtcgacctacgtgcgcaagcccccgtacttcgaggggatgacgctggagaccaccccggtgaccgacatcgccggcgcccgcgtgctcgcccgtctcggcgactcggtcacgaccgaccatatctcgcccgccggctccatcaaggcggacagcccggccggtcagtacctcaccgagaacggcatcgaccgcaaggacttcaactcctacggctcgcgccgaggcaaccacgaggtcatgatacgcggcacgttcgcgaacatccgcctgcggaaccagctgctcagctccgccaacgagggcgccggtgtggagggcggctacacccgcgacttcacccagcccgacgctccgcagtcgttcatctacgacgcctcgcagaactaccaggccgcgggcaccccgctcgtcgtcctcggcggcaaggagtacggatcggggtcctcgcgcgactgggcggccaagggcacgagcctgctgggcgtgcgcgcggtcatcaccgagagcttcgagcgcatccaccgctccaacctcatcggcatgggcgtggtgcccctgcagttcccggccggtgagaacgccgactcgctgggcctcgacggcaccgagtcgttcacgatcaccgggctgaccgaactcaacgaaggccgcaccccgaagacattgcacgtggtcgccgagccgaccgagcactcgcccgcgggcaagcagccggtcgcgttcgacgcggtggtgcggatcgacacccccggtgaggcggactactaccgcaacggcggcatcctgcagtacgtgctgcggagcctcgtgtag

SEQ ID NO: 66959 - protein, 960 aa, Leifsonia xyli subsp. xyli str. CTCB07
MRRFSPAEEGEGNVSAVNSLGAKSTLSVGDKDYTIFAIDTVDGYKRLPFSLKVLLENLLRTEDGANITADHIRALGSWDPAAEPDTEIQFTPARVIMQDFTGVPCIVDLATMREAVSALGGDPQKINPLAPAEMVIDHSVIADLFGQEDALERNTDLEYERNGERYQFLRWGQTAFDDFKVVPPGTGIVHQVNIEYLARVTMTREGSTPETRGELLAYPDTCVGTDSHTTMVNGLGVLGWGVGGIEAEAAMLGQPVSMLIPKVVGFKLTGAIPTGVTATDVVLTITQMLRQHGVVGKFVEFYGAGVAQVPLANRATIGNMSPEFGSTAAMFPIDDVTLDYLRLTGRSAEQVALVEEYSKAQSLWHDPASEPVFSEYLELDLSTVVPSIAGPKRPQDRIELSAAKDQFEKDLTNYADISHDLVDLTVAESFPASDPGELQPEDARSIHQHSHHSHAPQAASNPTPVKLEDGTDFVIDHGAVAIAAITSCTNTSNPSVMLAAGLLARNAAKKCLKAKPWVKTTLAPGSKVVTDYYEKAGLTKDLEALGFYTVGYGCTTCIGNSGPLLDEISQAVNDSDLAVTAVLSGNRNFEGRINPDVKMNYLASPPLVIAYALAGSMNFDFEVDPLGTDQDGNDVFLQDIWPDAAEVQQTIDSSINEGMFVTQYASVFEGDERWKSLATPTGSVFEWDEKSTYVRKPPYFEGMTLETTPVTDIAGARVLARLGDSVTTDHISPAGSIKADSPAGQYLTENGIDRKDFNSYGSRRGNHEVMIRGTFANIRLRNQLLSSANEGAGVEGGYTRDFTQPDAPQSFIYDASQNYQAAGTPLVVLGGKEYGSGSSRDWAAKGTSLLGVRAVITESFERIHRSNLIGMGVVPLQFPAGENADSLGLDGTESFTITGLTELNEGRTPKTLHVVAEPTEHSPAGKQPVAFDAVVRIDTPGEADYYRNGGILQYVLRSLV

SEQ ID NO: 66960 - DNA, 2283 bp, Desulfotalea psychrophila LSv54
  CDS (1)..(2283): transl_table=11
atgaagacatccgttgactctactgccacatttattgaaaaggtttaccagagaaccaccgaacagctcaaaacagttcgtgctcgccttaaccgacctctgacctacaccgaaaaaataatgtatggtcaccttgatgatgcagataatgcagagctcatcgccggcaagagttatatcaagacaaggcctgaccgcatcgccttgcaagatgcaaccgcccagatggcagtactccagtttatgttggctgaaaaggatgaagctgcagtacccgtcaccatccactgcgaccaccttatccaagcatacaagggcgcggagactgatttacccatagccaaaaccgagaacaacgaggtctataattttctctcatcggcctcgaaacgatacggctttggctattggcatcccggggcaggaattattcaccaggtggtactggaaagatacgcctttcctggtctcatgatgcttggcacagattcccacaccccaaacgcaggaggaatgggagtctttgcctcgggtgttggcggcgctgatgccgtagatgttatggttgatatgccctgggaggtacttcacccacaggttgtcggagtccacctgaaaggaaagctgcaggagtggagttcccccaaggatattatcctcaaactcttggaagtactcacctgctccggcggcaccaaccgggtatttgaatattttggcgaaggggccgcaagcatttccgccaccggcaagagtaccatttgcaacatgggtgctgaactgggggcaaccacctccctcttcccctacgaccagtccatggcaacctatctccaggcctgtggtcgtggcgaggtagcagatctggctaaccaataccagactatacttcaggcagatgacgaggtactgacaaatcccgagtcctactacgataaggttgtggtcattgatcttgataagctcgtgccctatatcgtcggcccgcattccccggataaggccgctaccgtagcagctcttgccgaacaggtgacaattaacggctacccggagaagatctccgccacccttattggctcctgcaccaactcttcctacgaagatatgggacgcattgcagccattgccgaccagattatagaagagggcgctcagctgaagaccccactctatataactccaggatcggaacaggttcgggcaaccattgaaagggacggtattctggaaaaactcctccagattggagcaatagttctcaccaatgcctgtggcccatgtattggccagtggcgacgagatgatcaggttcccaataccccaaatacaattgtcagctcctacaatagaaatttccctaaacgaaacgatggcaatcccgaaacatgcagtttccttaccagtcctgaaacatgtatggcctatgccctgcatggcagcctggcggttaacccctataccaccccgatagagggcaagaatggcccctttctcctcaagacaccgggaagagttgccgaggtgcccgcccagggctttgtctgcgaccaagagggatttcaggcaccgatcgccaaggaggagagggcaggaataagtgtggaaatctcccctgattctaaacgcctggccaaactcatcccctttcctgcttgggatggcaagaactttaaagatctacgtctcctcctcaaggcaaagggaaaatgtaccaccgatcatatctcgcccgctggcccatggttacgctttcgaggacatcttgataatatttcagataatatgtttagtggtgctatcaatagttttaccggtatggcgggcagtggcatcaaccagctagacggcaaggtggaaggatttaatcagattgcccgggcctaccaagcggcaggtgatagctggctggtagtaggggacaataattacggcgaagggagctctcgggaacatgctgccatgagccctcgacatatgggtgccaaggtcgtcatctgtaaagcctttgcccgtatccatgagaccaacctgaaaaaacaaggggttctgcccctcacctttaccagtagcaatgattaccaactggtccaagacggcgacagaattgatgtcttaggggtaaaagagatagctcctgccagcgcactccaggccgtactcaaacatagcgatggcagcagcgacagagtcgaactccagcattcactgaaccaggagcagataagctggtttaaggcgggatctgccctcaactacctgcgtcacgagctgaacgaatag

SEQ ID NO: 66961 - protein, 760 aa, Desulfotalea psychrophila LSv54
MKTSVDSTATFIEKVYQRTTEQLKTVRARLNRPLTYTEKIMYGHLDDADNAELIAGKSYIKTRPDRIALQDATAQMAVLQFMLAEKDEAAVPVTIHCDHLIQAYKGAETDLPIAKTENNEVYNFLSSASKRYGFGYWHPGAGIIHQVVLERYAFPGLMMLGTDSHTPNAGGMGVFASGVGGADAVDVMVDMPWEVLHPQVVGVHLKGKLQEWSSPKDIILKLLEVLTCSGGTNRVFEYFGEGAASISATGKSTICNMGAELGATTSLFPYDQSMATYLQACGRGEVADLANQYQTILQADDEVLTNPESYYDKVVVIDLDKLVPYIVGPHSPDKAATVAALAEQVTINGYPEKISATLIGSCTNSSYEDMGRIAAIADQIIEEGAQLKTPLYITPGSEQVRATIERDGILEKLLQIGAIVLTNACGPCIGQWRRDDQVPNTPNTIVSSYNRNFPKRNDGNPETCSFLTSPETCMAYALHGSLAVNPYTTPIEGKNGPFLLKTPGRVAEVPAQGFVCDQEGFQAPIAKEERAGISVEISPDSKRLAKLIPFPAWDGKNFKDLRLLLKAKGKCTTDHISPAGPWLRFRGHLDNISDNMFSGAINSFTGMAGSGINQLDGKVEGFNQIARAYQAAGDSWLVVGDNNYGEGSSREHAAMSPRHMGAKVVICKAFARIHETNLKKQGVLPLTFTSSNDYQLVQDGDRIDVLGVKEIAPASALQAVLKHSDGSSDRVELQHSLNQEQISWFKAGSALNYLRHELNE

SEQ ID NO: 66962 - DNA, 2673 bp, Yersinia pseudotuberculosis IP 32953
  CDS (1)..(2673): transl_table=11
atgtcgttggatctgtgtaaaacgagcatggccaagttggtcgcccttaaccacgagtatgactactacagcctgccgcaattggcggcagtgttgggtgatatcaaccggttacctaaatcgttgaaagtgctgcttgagaacttactacgccacttggatggggtgcaagttcaggaagcggatttaaaagccattgtcgcctggcagcaaaccgggcatgccgatagagaaattgcctaccgtcctgccagggtattaatgcaagattttacgggtgtgcccgcagtggtggatctggctgccatgcgtgaggcagtccaacggctaggcggtgatgtggcacaagttaacccgttgtcacctgtggatttggttatcgaccattccgtgacggtggatgagtttggcgataaatcagcgtttggtgaaaacgtacgcttagagatggaacgtaaccacgaacgttatatctttttacgctgggggcaaaaagcatttagccgttttcgcgtagtcccaccaggaacgggtatttgtcatcaggttaatcttgaatatctgggacaaaccgtttggcatgaacagcaaggtgataagcaggttgcctatccggatacgttggttggcacggactcccataccaccatgatcaatggcttggggatactcggctggggcgttggtggtatcgaagctgaggctgccatgttaggtcagcccatatcaatgcttatccctgatgtcgtcgggtttaaaatgaccggtaaaatgcgcgaggggatcacggcgactgacctggtattgacggtcacacaaatgctacgtaagcacggagtcgttggtaagtttgtcgagttctacggtgatgggttagctgatttaccattggccgatcgcgcgaccattgccaacatgtctcctgagtttggtgcgacctgcggtttcttccccgtagatgaggtgaccctgaattatatgcgccttagtggccgcagcaatgagcaaatagcgctagttgaaacctacagtaaagcacaggggttatggcgttatcccggtgatgagccggtctttaccagtcaattatctctggacctaagttcggtagaacccagtctggcagggccaaaacgcccacaagacagggtcgcattacctaaagtgccatcggcatttaaagcgtttgaggaactggagttcaacaataagagagataaagctgacctcgttgctttctctcttaatggcaaaacccacgaactggcatctggcgcggtggtgattgcagccattacatcttgtacaaacacgtcaaaccccagtgtattaatggcggctggattattggcaaaaaaagcgactgaaaaagggttgaaaaccaagccatgggtaaaaacctcgttggcgccaggttctaaagtggtgaccgagtatcttaattcggccggtctaacccgctatctggataatctgggtttcaatttagtcggctatggctgtacgacttgtattggtaactcggggccattgcctgagccaatagaaaacgccatcaaagcaggggatttaacagtcagtgcggtgctctccggtaaccgtaattttgaaggtcgcatccatccgctggtcaaaaccaactggttggcatctccgccactggtggtcgcttatgcgctggcggggaatatgaatatcgatttaactcaggatgcgctgggtcatgacccttcaggtaagccggttttcctgaaagacatctggcctaccgggcttgagatcgccaaagctgtcgaggaagttaaaacggagatgtttcgcaaggagtatgctgaagtctttaatggcgatgaaaactggcaagccattcaaatagaaagtactcctacttacgcgtggcagaaagattccacttatattcgcctccctcctttcttcacggatatgaaggcagtgccggatcccgtgcaagatattcatgatgcgcgcattctggcaattttggctgactcggtgacgactgaccatatttcgccagcgggcaacatcaagctcgacagccctgcgggccgttatcttcgtgatcacggtgtggaaattaaagagttcaactcttatggttcccgtaggggtaaccataaagtgatgatgcgcggaacgtttgctaatattcgtattcgaaatgaaatggtccccggtattgaagggggcataacgcgtcatattccatcgcaaaatgagatgcctatctatgatgcagctatgcgttatcaacaagaaaacgtgcctctggcggtgatcgccggtaaagagtatggctcaggatccagccgtgattgggctgcgaaagggccacgtttactcggtgttagggttgttatcgctgaatcatttgaacgtattcaccgctcaaatctaattggaatggggattttacccttagagtttccacagggggttgatcgtaaaacattagggctgactggtgatgaatctatcagtgtcagtgggctacaaaatcttgctccagggcaaatggtgccagtgacgataacttatgcggatgggcatcagcaagtggtcaatacccggtgccgtatcgatacagggaacgaactgatttattttgagaatggtggaattttgcactatgtgatccgcaaaatgctgtag

SEQ ID NO: 66963 - protein, 890 aa, Yersinia pseudotuberculosis IP 32953
MSLDLCKTSMAKLVALNHEYDYYSLPQLAAVLGDINRLPKSLKVLLENLLRHLDGVQVQEADLKAIVAWQQTGHADREIAYRPARVLMQDFTGVPAVVDLAAMREAVQRLGGDVAQVNPLSPVDLVIDHSVTVDEFGDKSAFGENVRLEMERNHERYIFLRWGQKAFSRFRVVPPGTGICHQVNLEYLGQTVWHEQQGDKQVAYPDTLVGTDSHTTMINGLGILGWGVGGIEAEAAMLGQPISMLIPDVVGFKMTGKMREGITATDLVLTVTQMLRKHGVVGKFVEFYGDGLADLPLADRATIANMSPEFGATCGFFPVDEVTLNYMRLSGRSNEQIALVETYSKAQGLWRYPGDEPVFTSQLSLDLSSVEPSLAGPKRPQDRVALPKVPSAFKAFEELEFNNKRDKADLVAFSLNGKTHELASGAVVIAAITSCTNTSNPSVLMAAGLLAKKATEKGLKTKPWVKTSLAPGSKVVTEYLNSAGLTRYLDNLGFNLVGYGCTTCIGNSGPLPEPIENAIKAGDLTVSAVLSGNRNFEGRIHPLVKTNWLASPPLVVAYALAGNMNIDLTQDALGHDPSGKPVFLKDIWPTGLEIAKAVEEVKTEMFRKEYAEVFNGDENWQAIQIESTPTYAWQKDSTYIRLPPFFTDMKAVPDPVQDIHDARILAILADSVTTDHISPAGNIKLDSPAGRYLRDHGVEIKEFNSYGSRRGNHKVMMRGTFANIRIRNEMVPGIEGGITRHIPSQNEMPIYDAAMRYQQENVPLAVIAGKEYGSGSSRDWAAKGPRLLGVRVVIAESFERIHRSNLIGMGILPLEFPQGVDRKTLGLTGDESISVSGLQNLAPGQMVPVTITYADGHQQVVNTRCRIDTGNELIYFENGGILHYVIRKML

SEQ ID NO: 66964 - DNA, 2673 bp, Symbiobacterium thermophilum IAM 14863
  CDS (1)..(2673): transl_table=11
atgtctcgcacggatccgttcaaggccaagtcgaccttcgacaccggttcggggacggcggtcatctaccgtctgtcggcgctggagcaggcggggctcgtgaagctcgaccggctgcccttctcggtgcgcatcctgctggagaacctgctgcgcaacctggacggctacctggtcacggaggaagacgtgcggacgctcgccgcctggaacccccgcgagctgccccggaaggagatcccgttcatcccctcccgggtcgtgctgcaggacttcaccggcgtgccggtggtcgcggacctcgccgcgatgcgggacgccatggtgaagctgggcggccgccccgaacagatcaacccgctggtcccggtggacctggtcatcgaccactcggtgcaggtcgacgccttcgccgtggactgggcctacaagttcaacgtcgagctggagttcaagcggaaccgggagcgctacgtcttcctgaagtgggcgcagaaggccttccgcaacttccgcgccgtgccgccgggcatgggcatcgtccaccaggtgaacctggagtacctctccccctgcgtcgccctgcgcgagatcgacggcgagctggtcgccctgcccgacaccgtggtaggcaccgactcccacaccacgatgatcaacggcctgggcgtgctgggctggggcgtgggcggcatcgaggccgaggcggccatgctgggccagccctcctacatgctggtgcccgaggtcgtcggctttaagctgaccggccgcctgcccgaaggggccacggccaccgacctggtgctgaccgtcacccagatgctgcggcagaagggcgtcgtcgagaagttcgtcgagttctacggcccgggcctgtccagcctctcgctggccgaccgggcgaccatcgccaacatggcccccgagtacggcgcaaccatgggcttcttcccggtcgacgagatcaccctggactacctgcgccagaccggccgcgacgagaagcacgtggagatggtccgtcgctacctgcaggagcaggggctcttccgcactgacgcgacgcccgaccccgagttcaccgacaccctggagctggacctctcgacggtggagccctcgctggccggcccgcggcgcccgcaggaccgggtgcagctgagcggcgtccggaccaccttccacaagaacttcgacgagcagatcaagaagggcggcggggtcgcggtggccaccaagaccggcgtccagcacggttccgtggtgattgccgccatcacgtcctgcaccaacacctccaaccccgccgtgatgatcggcgcgggcctggtcgcccagaaggccgtcgccaaggggcttgcgcgcaagccctgggtgaagacctcgctggcccccggctcccgcgtggtaaccgactacctgaaggcctccggcctgatggagccgctggaggcgctgggcttccacgtggtgggctacggctgcaccacctgcatcggcaactccggcagcctgcctgaagacgtcgcgaaggacgtcaccgagaacgacctggtggtcgcggccgtcatctcgggcaaccgcaacttcgagggccgcgtcaacccgctggtcaaggccaacttcctggcctcgcccatgctggtcgtcgcctacgcgctggccggcacggtggacatcgacctcaggaccgatcccgtcggccacgaccccgagggcaacccggtctacctgaaggacatctggcctaccaacgcggagattcaggccgcgatcgccaaggccatcacgccggagatgttcaagcaggagtacgccagggtctttgacggcgatgagaactggcagcagttggaagcccccgaaggcgagctgttccagtgggatcctgactccacctacatccagcagccgccgtacttcaaggacatgcagctgaccccgccgccggtgaaggacatcgagggggcccgggtgctcgcgctgctgggcgactccatcaccaccgaccacatctccccggccggcgccattgccatgggcagccctgcggccaagtacctgatggagcacggcgtcgatcccgtcgacttcaactcgtacggctcccgccgcggcaaccacgaggtgatgcagcgcggcaccttcgccaacatccggctgcgcaacgccctggcggacggcaaggagggcggctacaccaagtacctgcccacaggcgagatcatgcccatctgggacgcggccgtcaagtacatggaggcgggcacgccgctggtggtcatcgccggcaaggactacggcatgggctcctcccgcgactgggcggccaagggcgtgatgctccagggcgtgaaggccgtcatcgccgagagcttcgagcgcatccaccgctccaacctgatcggcatgggcgtgctcccgctgcagttccaggagggcgagaacgccgcctcccttggcctcgacggcacggaggagtacacgatcaccggcatcagcggcgagctgaccccgcgccagaccttcgcggtgactgcccgcaaggccgacggccgggagatccggttcgacgtcacctcccgcctcgacaccgccgtcgagatcgagtactacaagaacggcggcgtgttgcagacggtgctgcggcgcctcgcgacggagaagtag

SEQ ID NO: 66965 - protein, 890 aa, Symbiobacterium thermophilum IAM 14863
MSRTDPFKAKSTFDTGSGTAVIYRLSALEQAGLVKLDRLPFSVRILLENLLRNLDGYLVTEEDVRTLAAWNPRELPRKEIPFIPSRVVLQDFTGVPVVADLAAMRDAMVKLGGRPEQINPLVPVDLVIDHSVQVDAFAVDWAYKFNVELEFKRNRERYVFLKWAQKAFRNFRAVPPGMGIVHQVNLEYLSPCVALREIDGELVALPDTVVGTDSHTTMINGLGVLGWGVGGIEAEAAMLGQPSYMLVPEVVGFKLTGRLPEGATATDLVLTVTQMLRQKGVVEKFVEFYGPGLSSLSLADRATIANMAPEYGATMGFFPVDEITLDYLRQTGRDEKHVEMVRRYLQEQGLFRTDATPDPEFTDTLELDLSTVEPSLAGPRRPQDRVQLSGVRTTFHKNFDEQIKKGGGVAVATKTGVQHGSVVIAAITSCTNTSNPAVMIGAGLVAQKAVAKGLARKPWVKTSLAPGSRVVTDYLKASGLMEPLEALGFHVVGYGCTTCIGNSGSLPEDVAKDVTENDLVVAAVISGNRNFEGRVNPLVKANFLASPMLVVAYALAGTVDIDLRTDPVGHDPEGNPVYLKDIWPTNAEIQAAIAKAITPEMFKQEYARVFDGDENWQQLEAPEGELFQWDPDSTYIQQPPYFKDMQLTPPPVKDIEGARVLALLGDSITTDHISPAGAIAMGSPAAKYLMEHGVDPVDFNSYGSRRGNHEVMQRGTFANIRLRNALADGKEGGYTKYLPTGEIMPIWDAAVKYMEAGTPLVVIAGKDYGMGSSRDWAAKGVMLQGVKAVIAESFERIHRSNLIGMGVLPLQFQEGENAASLGLDGTEEYTITGISGELTPRQTFAVTARKADGREIRFDVTSRLDTAVEIEYYKNGGVLQTVLRRLATEK

SEQ ID NO: 66966 - DNA, 2727 bp, Bacillus licheniformis ATCC 14580
  CDS (1)..(2727): transl_table=11
atggcgaatcagcaacaaatcgcaaaaaaagacgcttttcaatcaagaaaaacgtttacagtacaaggcaaaacgtacagctattattctttaaaagcattagaggatcaaggaatcggaaacgtatcaaaacttccttattccattaaagttttgctcgaatccgttcttcgtcaagtagacgggagagtcattactgaggaacacgttgaaaacttggcaaaatggggcactgccgaattaaaagatattgacgttcctttcaaaccatcccgcgttattttgcaggactttaccggcgttccagccgttgtagaccttgcttcattaagaaaagcgatggcttcagtcggcggagatccggataaaatcaatcctgaaataccggtagaccttgtcatcgaccactccgtacaagttgacaaagcgggtacggaagatgcattgaccgttaatatggaccttgaattccaacgaaatgcagagcgttacaaatttttaagctgggctaagaaagcgtttaataactatcaagctgttccccctgctacaggtattgttcaccaggtgaaccttgagtatttggcaaacgttgtccatgcagtggaagaagacggcgagattgtcacttatcctgacacgcttgtcggtactgactcccatacaacgatgatcaacggaatcggcgttctcggctggggcgtcggcggaattgaagctgaagcaggcatgctcggccagccttcatatttccctgtacctgaagtaatcggtgcgaagcttgtcggaaagctgccgaacggtacgacagcgacggaccttgcgcttaaagtgacacaggtgctgcgtgaaaaaggcgtagtcggaaagttcgtcgaattcttcggtccgggtgttgcggaactaccgcttgcagaccgtgcgacaatcgcaaatatggctcctgaatacggcgcgacttgcggtttcttccctgttgatgaggaagcattggaatacatgcgtttaacaggccgtgatgaagaacatatcaatgtggtgaaagaatattgccgtcaaaacggactgttctacacgcctgatcaggaagatcctgtatttaccgatatcgttgaaatcgacttgtcaaaagttgaagcgaacctttcaggtccgaagcgtcctcaggatctcattccgctgactgacatgaaagaaacgttccacaagcatttggcaagccctgcgggcaaccagggattcggtttaaacgcgagcgaggctgacaaagaaatcaaatttaagcttgaaaacggcgaagaagccgtcatgaaaacgggtgcgatcgcaattgcggcgattaccagctgtacaaatacatcaaacccttatgtcttaatcggtgcgggcctcgtcgccaaaaaagcggttgaactgggattgaaagtaccgaactatgtgaaaacatctctcgctccgggttcaaaagtcgtaacaggctacttggttaattcaggcctgctgccgtatatgcgcgagcttggatttaacatcgtcggctacggctgtacgacatgtatcgggaactccggaccgcttgcgcctgaaatcgaaaaagcggttgccgaaaacgacctgctgattacgtctgtcctttccggtaaccgtaactttgaaggccggattcatccgcttgtcaaaggaaactacttggcgtctccgcctctagtcgtggcctatgcattggcaggtacggtagatatcgacctgaaaaacgaaccgatcggcgtcggcaaagacggtcaaaatgtgtacttcaacgatatttggccgacgatggacgaaatcaattccgtcgtgaagcaaaccgttactcctgagctgttcagaaaagaatacgagcgcgtgtttgatgacaatgaacgctggaatgcgattgaaacaacggatgaagccctgtataaatgggatgaagagtccacttacattcagaacccgccattctttgaaaacatgtcagttgagccaggtacagttgaaccgcttaaaggcttgcgcattgtcggcaaattcggagactctgtcacgacagaccatatctctcctgcgggagcgatcggcaaagacacgccggccggaaaatatttgcaggaaaaaggcgtttctcctagagacttcaactcatatggttcaagacgcggaaaccatgaagtcatgatgaggggaacattcgccaacatcagaatcaaaaaccagatcgctccgggcactgaaggcggttatacaacgtattggccgaccggagaagtgatgtccatttatgatgcctgcatgaagtataaagaagacggcacaggtctggtcgtcattgccggaaaagactacggaatgggttcttcccgcgactgggcggcaaaaggaacaaatctgctcggcatcaaaaccgtcattgcagaaagctttgaaagaattcacagaagcaaccttgtgctgatgggcgttcttccgctgcaatttaaagagggagaaaacgctgaaacgctcggtttgaccgggaaagaaacaattgaagtagacgtgagtgagtcggtgcgcccgcgcgatctcgtccaagtcaaagcgattgccgaagacggcacggtcaagtcgtttgaagctgttgtccgctttgacagcgaagtggaaatcgattattaccgtcacggcggaatcctgcaaatggtgctccgcaataaaatgaaacagtaa

SEQ ID NO: 66967 - protein, 908 aa, Bacillus licheniformis ATCC 14580
MANQQQIAKKDAFQSRKTFTVQGKTYSYYSLKALEDQGIGNVSKLPYSIKVLLESVLRQVDGRVITEEHVENLAKWGTAELKDIDVPFKPSRVILQDFTGVPAVVDLASLRKAMASVGGDPDKINPEIPVDLVIDHSVQVDKAGTEDALTVNMDLEFQRNAERYKFLSWAKKAFNNYQAVPPATGIVHQVNLEYLANVVHAVEEDGEIVTYPDTLVGTDSHTTMINGIGVLGWGVGGIEAEAGMLGQPSYFPVPEVIGAKLVGKLPNGTTATDLALKVTQVLREKGVVGKFVEFFGPGVAELPLADRATIANMAPEYGATCGFFPVDEEALEYMRLTGRDEEHINVVKEYCRQNGLFYTPDQEDPVFTDIVEIDLSKVEANLSGPKRPQDLIPLTDMKETFHKHLASPAGNQGFGLNASEADKEIKFKLENGEEAVMKTGAIAIAAITSCTNTSNPYVLIGAGLVAKKAVELGLKVPNYVKTSLAPGSKVVTGYLVNSGLLPYMRELGFNIVGYGCTTCIGNSGPLAPEIEKAVAENDLLITSVLSGNRNFEGRIHPLVKGNYLASPPLVVAYALAGTVDIDLKNEPIGVGKDGQNVYFNDIWPTMDEINSVVKQTVTPELFRKEYERVFDDNERWNAIETTDEALYKWDEESTYIQNPPFFENMSVEPGTVEPLKGLRIVGKFGDSVTTDHISPAGAIGKDTPAGKYLQEKGVSPRDFNSYGSRRGNHEVMMRGTFANIRIKNQIAPGTEGGYTTYWPTGEVMSIYDACMKYKEDGTGLVVIAGKDYGMGSSRDWAAKGTNLLGIKTVIAESFERIHRSNLVLMGVLPLQFKEGENAETLGLTGKETIEVDVSESVRPRDLVQVKAIAEDGTVKSFEAVVRFDSEVEIDYYRHGGILQMVLRNKMKQ

SEQ ID NO: 66968 - DNA, 2595 bp, Burkholderia mallei ATCC 23344
  CDS (1)..(2595): transl_table=11
atgaacactgccaaccgcaaacccctgcccggcacgtcgctcgactacttcgacgcgcgcgccgccgtcgacgcgatccgcccgggcgcgtacgacgcgttgccgtacacgtcgcgcgtgctcgccgagaacctcgtgcgccgctgcgatccggcgatcctcgccgattcgctgacgcagctcgtcgagcgcaagcgcgagcgcgatttcccgtggttcccggcgcgcgtcgtctgccacgacatcctcggccagaccgcgctcgtcgatctcgcgggcctgcgcgacgcgatcgccgaacgcggcggcgatccggcgaaggtgaatccggtcgtgccggtgcaactgatcgtcgatcattcgctcgccgtcgaatgcggcggcttcgatcccgacgcgttcgcgaagaaccgcgcgatcgaggatcgccgcaacgaggatcgcttccacttcatcgaatggacgaagaaggcgttcgagaacgtcgacgtgattccgcccggcaacggcatcatgcaccagatcaatctggagaagatgtcgcccgtgatccaggcgcaggacggcgtcgcgtacccggacacctgcgtcggcaccgacagccacacgccgcacgtcgacgcgctcggcgtgatcgcgatcggcgtgggcgggctggaggcggagaacgtgatgctcggccgcgcatcgtggatgcggctgcccgacatcgtcggcgtcgagctgaccggcaagcgccagcccggcatcaccgcgaccgacgtcgtgctcgcgctgaccgaattcctgcgccgcgagaaagtggtcggcgcgtatctggaattccgcggcgagggcgcgaagagcctcacgctcggcgatcgcgcgacgatctcgaacatggcgcccgagtacggcgcgaccgccgcgatgttcttcatcgacgagcagacgatcgattacctgcgcttgacgggccgcagcgacgagcaggtgaagctcgtcgaaacctacgcgaaggcggcgggcctgtgggccgacagcctcgcgcacgcgcagtacgagcgcacgctgacgttcgacctgtcgagcgtcgtgcgcaacatggccggcccgtcgaatccgcacaagcggctgccgacgtccgatctcgccgcgcgcgggatcgccggcaaatgggaggagaaaccgggcgagatgcccgacggcgcggtgatcatcgccgcgatcacgagctgcacgaacacgagcaacccgcgcaacgtgatcgccgcggcgctgctcgcgcgcaacgcgaacgcgcgcggcctcgcgcgcaagccgtgggtgaagagctcgctcgcgcccggctcgaaggcggtcgagctgtacctgaaggcggcgaacctgctgcccgagctggagaagctcggcttcggcatcgtcgcgttcgcgtgcacgacctgcaacgggatgtccggcgcgctcgacccgaagatccagcgggagatcgtcgatcgcgacctgtacgcgacggccgtgctgtccggcaaccgcaacttcgacgggcgcatccatccgtatgcgaagcaggcgttcctcgcgtcgccgccgctcgtcgtcgcgtacgcgatcgcgggcacgatccgcttcgacatcgagaaggacgcgcttggccacgacaaggacggcaagcccgtcacgctgaaggacatctggccgaccgacgaggagatcgacgcgatcgtcgcgtcgagcgtgaagcccgagcagttccgcaccgtctacgagccgatgttcgcgcgcgcggccgacgccggcgagcgcgcggcgccgctgtacgactggcggccgcggagcacgtacattcgccgcccgccgtactgggaaggcgcgctcgcgggcgagcgcacgctcaagggcatgcgcgcgctcgccgtgctcggcgacaacatcacgaccgatcacctgtcgccgtcgaacgcgatcctgccgacgagcgcggcgggcgaatacctcgcgaagatgggcctgcccgaagaggacttcaactcgtacgcgacgcaccgcggcgatcacctgaccgcgcagcgcgcgacgttcgcgaacccgacgctcgtcaacgagatggcgatcgtcgacggcgaggtgaagaagggctcgctcgcgcgcgtcgagccggacggcaaggtgatgcgcatgtgggaggcgatcgagacctacatgtcccgcaagcagccgctcgtcgtgatcgccggcgccgattacggccagggctcgtcgcgcgactgggcggccaagggcgtgcggctcgcgggcgtcgaggcgatcgtcgcggaaggcttcgagcggattcaccgcacgaacctgatcggcatgggcgtgctgccgctcgagttcaagcccggcacgaaccgcgcgacgctcgcgatcgacggcaccgagacgttcgacgtgatcggcgagcgcacgccgcgggccgatctcacgctcgtgattcaccgcagcagcggcgagcgcgtggcggtgcccgtcacgtgccggctcgatacggccgaggaagtgtcgatctacgacgcgggcggcgtgctgcagcgcttcgcgcaggacttcctcgaatcgtcgagggcggcgtga

SEQ ID NO: 66969 - protein, 864 aa, Burkholderia mallei ATCC 23344
MNTANRKPLPGTSLDYFDARAAVDAIRPGAYDALPYTSRVLAENLVRRCDPAILADSLTQLVERKRERDFPWFPARVVCHDILGQTALVDLAGLRDAIAERGGDPAKVNPVVPVQLIVDHSLAVECGGFDPDAFAKNRAIEDRRNEDRFHFIEWTKKAFENVDVIPPGNGIMHQINLEKMSPVIQAQDGVAYPDTCVGTDSHTPHVDALGVIAIGVGGLEAENVMLGRASWMRLPDIVGVELTGKRQPGITATDVVLALTEFLRREKVVGAYLEFRGEGAKSLTLGDRATISNMAPEYGATAAMFFIDEQTIDYLRLTGRSDEQVKLVETYAKAAGLWADSLAHAQYERTLTFDLSSVVRNMAGPSNPHKRLPTSDLAARGIAGKWEEKPGEMPDGAVIIAAITSCTNTSNPRNVIAAALLARNANARGLARKPWVKSSLAPGSKAVELYLKAANLLPELEKLGFGIVAFACTTCNGMSGALDPKIQREIVDRDLYATAVLSGNRNFDGRIHPYAKQAFLASPPLVVAYAIAGTIRFDIEKDALGHDKDGKPVTLKDIWPTDEEIDAIVASSVKPEQFRTVYEPMFARAADAGERAAPLYDWRPRSTYIRRPPYWEGALAGERTLKGMRALAVLGDNITTDHLSPSNAILPTSAAGEYLAKMGLPEEDFNSYATHRGDHLTAQRATFANPTLVNEMAIVDGEVKKGSLARVEPDGKVMRMWEAIETYMSRKQPLVVIAGADYGQGSSRDWAAKGVRLAGVEAIVAEGFERIHRTNLIGMGVLPLEFKPGTNRATLAIDGTETFDVIGERTPRADLTLVIHRSSGERVAVPVTCRLDTAEEVSIYDAGGVLQRFAQDFLESSRAA

SEQ ID NO: 66970 - DNA, 2595 bp, Burkholderia pseudomallei K96243
  CDS (1)..(2595): transl_table=11
atgaacactgccaaccgcaaacccctgcccggcacgtcgctcgactacttcgacgcgcgcgccgccgtcgacgcgatccgcccgggcgcgtacgacgcgttgccgtacacgtcgcgcgtgctcgccgagaacctcgtgcgccgctgcgatccggcgatcctcgccgattcgctgacgcagctcgtcgagcgcaagcgcgagcgcgatttcccgtggttcccggcgcgcgtcgtctgccacgacatcctcggccagaccgcgctcgtcgatctcgcgggcctgcgcgacgcgatcgccgaacgcggcggcgatccggcgaaggtgaatccggtcgtgccggtgcaactgatcgtcgatcattcgctcgccgtcgaatgcggcggcttcgatcccggcgcgttcgcgaagaaccgcgcgatcgaggatcgccgcaacgaggatcgcttccacttcatcgaatggacgaagaaggcgttcgagaacgtcgacgtgattccgcccggcaacggcatcatgcaccagatcaatctggagaagatgtcgcccgtgatccaggcgcaggacggcgtcgcgtacccggacacctgcgtcggcaccgacagccacacgccgcacgtcgacgcgctcggcgtgatcgcgatcggcgtgggcgggctggaggcggagaacgtgatgctcggccgcgcatcgtggatgcggctgcccgacatcgtcggcgtcgagctgaccggcaagcgccagcccggcatcaccgcgaccgacgtcgtgctcgcgctgaccgaattcctgcgccgcgagaaagtggtcggcgcgtatctggaattccgcggcgagggcgcgaagagcctcacgctcggcgatcgcgcgacgatctcgaacatggcgcccgagtacggcgcgaccgccgcgatgttcttcatcgacgagcagacgatcgattacctgcgcttgacgggccgcagcgacgagcaggtgaagctcgtcgaaacctacgcgaaggcggcgggcctgtgggccgacagcctcgcgcacgcgcagtacgagcgcacgctgacgttcgacctgtcgagcgtcgtgcgcaacatggccggcccgtcgaatccgcacaagcggctgccgacgtccgatctcgccgcgcgcgggatcgccggcaaatgggaggagaaaccgggcgagatgcccgacggcgcggtgatcatcgccgcgatcacgagctgcacgaacacgagcaacccgcgcaacgtgatcgccgcggcgctgctcgcgcgcaacgcgaacgcgcgcggcctcgcgcgcaagccgtgggtgaagagctcgctcgcgcccggctcgaaggcggtcgagctgtacctgaaggcggcgaacctgctgcccgagctggagaagctcggcttcggcatcgtcgcgttcgcgtgcacgacctgcaacgggatgtccggcgcgctcgacccgaagatccagcgggagatcgtcgatcgcgacctgtacgcgacggccgtgctgtccggcaaccgcaacttcgacgggcgcatccatccgtatgcgaagcaggcgttcctcgcgtcgccgccgctcgtcgtcgcatacgcgatcgcgggcacgatccgcttcgacatcgagaaggacgcgcttggccacgacaaggacggcaagcccgtcacgctgaaggacatctggccgaccgacgaggagatcgacgcgatcgtcgcgtcgagcgtgaagcccgagcagttccgcaccgtctacgagccgatgttcgcgcgcgcggccgacgccggcgagcgcgcggcgccgctgtacgactggcggccgcggagcacgtacattcgccgcccgccgtactgggaaggcgcgctcgcgggcgagcgcacgctcaagggcatgcgcgcgctcgccgtgctcggcgacaacatcacgaccgatcacctgtcgccgtcgaacgcgatcctgccgacgagcgcggcgggcgaatacctcgcgaagatgggcctgcccgaagaggacttcaactcgtacgcgacgcaccgcggcgatcacctgaccgcgcagcgcgcgacgttcgcgaacccgacgctcgtcaacgagatggcgatcgtcgacggcgaggtgaagaagggctcgctcgcgcgcgtcgagccggacggcaaggtgatgcgcatgtgggaggcgatcgagacctacatgtcccgcaagcagccgctcgtcgtgatcgccggcgccgattacggccagggctcgtcgcgcgactgggcggccaagggcgtgcggctcgcgggcgtcgaggcgatcgtcgcggaaggcttcgagcggattcaccgcacgaacctgatcggcatgggcgtgctgccgctcgagttcaagcccggcacgaaccgcgcgacgctcgcgatcgacggcaccgagacgttcgacgtgatcggcgagcgcacgccgcgggccgatctcacgctcgtgattcaccgcagcagcggcgagcgcgtggcggtgcccgtcacgtgccggctcgatacggccgaggaagtgtcgatctacgacgcgggcggcgtgctgcagcgcttcgcgcaggacttcctcgaatcgtcgagggcggcgtga

SEQ ID NO: 66971 - protein, 864 aa, Burkholderia pseudomallei K96243
MNTANRKPLPGTSLDYFDARAAVDAIRPGAYDALPYTSRVLAENLVRRCDPAILADSLTQLVERKRERDFPWFPARVVCHDILGQTALVDLAGLRDAIAERGGDPAKVNPVVPVQLIVDHSLAVECGGFDPGAFAKNRAIEDRRNEDRFHFIEWTKKAFENVDVIPPGNGIMHQINLEKMSPVIQAQDGVAYPDTCVGTDSHTPHVDALGVIAIGVGGLEAENVMLGRASWMRLPDIVGVELTGKRQPGITATDVVLALTEFLRREKVVGAYLEFRGEGAKSLTLGDRATISNMAPEYGATAAMFFIDEQTIDYLRLTGRSDEQVKLVETYAKAAGLWADSLAHAQYERTLTFDLSSVVRNMAGPSNPHKRLPTSDLAARGIAGKWEEKPGEMPDGAVIIAAITSCTNTSNPRNVIAAALLARNANARGLARKPWVKSSLAPGSKAVELYLKAANLLPELEKLGFGIVAFACTTCNGMSGALDPKIQREIVDRDLYATAVLSGNRNFDGRIHPYAKQAFLASPPLVVAYAIAGTIRFDIEKDALGHDKDGKPVTLKDIWPTDEEIDAIVASSVKPEQFRTVYEPMFARAADAGERAAPLYDWRPRSTYIRRPPYWEGALAGERTLKGMRALAVLGDNITTDHLSPSNAILPTSAAGEYLAKMGLPEEDFNSYATHRGDHLTAQRATFANPTLVNEMAIVDGEVKKGSLARVEPDGKVMRMWEAIETYMSRKQPLVVIAGADYGQGSSRDWAAKGVRLAGVEAIVAEGFERIHRTNLIGMGVLPLEFKPGTNRATLAIDGTETFDVIGERTPRADLTLVIHRSSGERVAVPVTCRLDTAEEVSIYDAGGVLQRFAQDFLESSRAA

SEQ ID NO: 66972 - DNA, 2718 bp, Burkholderia pseudomallei K96243
  CDS (1)..(2718): transl_table=11
atggcccacaatctccacaaaacactcaaggaattcgacagcggttccggcaaaggcaagttctactcgctgccgaagctcggcaaggaactgaagacgaagatcgagcggctgcccgtgtcgatccgcatcgtgctcgagtccgtgctgcgcaactacgacggcaagaagatcaccgaagagcacatcgagcagctcgcgaactggaagccgaatgcgaagcgcgtcgacgagatcccgttcgtcgtgtcgcgcgtcgtgctgcaggacttcacgggcgtgccgctgctcgccgacatcgcggccatgcgcggcgtcgcgaagcgcgcgggcaagaacccgaagaagatcgagccgctcgtgccggtcgatctcgtcgtcgaccactcggtgcagatcgattacttccgccagaaggacgcgctcgacctgaacatgaagctggagttccagcgcaacaacgagcgctaccagttcatgaagtggggcatgcaggcgttcgacacgttcaaggtcgtgccgcccggcgtcggcatcgtccaccaggtgaacctcgagtacctcgcgcgcggcgtccacaagaagaaggacgacggcgacaccgtctactaccccgacacgctcgtcggcaccgacagccatacgacgatgatcaacggcatcggcgtggtgggctggggcgtgggcggcatcgaggctgaagcgggcatgctcggccagccggtgtacttcctcacgccggacgtcgtcggcgtcgagctcaagggcaagctgcgcgaaggcgtgacggccaccgacctcgtgctgacgatcaccgaaatgctgcgcaaggaaaaggtcgtcggcaagttcgtcgaattcttcggcgaaggcacgaagacgctcgcgctgccggaccgcgcgacgatcgcgaacatggcgccggaatacggcgcgacgatgggcttcttcccggtcgacgagaagaccatcgactacttcaagggcacgggccgcacgaaggcggaaatcgccgcgttcgagaactacttcaaggcgcaggaactgttcggcatcccgaaggcgggcgaaatcgattacacgaagacgctgacgctggatctctcgacggtcgcgccgtcgctcgcgggcccgaagcgtccgcaggaccgcatcgagatcggcaacgtgaagtcgacgttcaccgatctgttctcgaagcccgtcgcggaaaacggcttcgcgaagaaggccgacgatctgacggccgagtaccggacgagcaacggcgtggccgtgaagaacggcgacgtgctgatcgccgcgatcacgtcatgcacgaacacgtcgaacccgagcgtgctgctcgccgccggcctgctcgcgaagaaggccgtcgaagccggcctcaccgtcgcgccgcacatcaagacctcgctcgccccgggatcgcgcatcgtcaccgaatacctgacgaagacgggcctgctgccctacctcgccaagctcggcttcgaagtcgccgcctacggctgcaccacctgcatcggcaacgcgggcgatctcacgcccgagctgaacgaagcgatcacgaagaacgacatcgtcgcggcggccgtgctgtcgggcaaccgcaacttcgaggcgcgcattcatccgaacatccgcgcgaacttcctcgcgtcgccgccgctcgtcgtcgcgtacgcgatcgccggcaacatcacgaaggatctgatgaccgagccggtcggccagggcaagggcggccgcgacgtctacctcggcgacatctggccgtcgagcgacgaagtgcaggcgctgctgaagttcgcgctggatccggagaagttcgagaagaactactcgcacctcaccaagaagggcgacctctggagcaagatcgagggcgaatcgggccaggtctacgactggccgaaatcgacgtacatcgccgagccgccgttcttcggcagcgatttctcgatggagccggccgcgtcgatcgcgacggtcaagggcgcgcgcgcgctcggcatcttcggcgattcggtgacgaccgaccacatcagcccggcgggctcgatcaaggaagattcgccggcgggcaagtggctgaaggccaacggcgtgcagaaggccgacttcaacagctacggctcgcgccgcggcaaccatgacgtgatgatgcgcggcacgttcgcgaacgtgcggatcaagaacctgatgatcccggcgaaggccgacggcacgcgcgtcgaaggcggcctcacgatccaccagccgagcggcgaacagctgtcgatctacgacgcggcgatgaagtacatcgacgccgacacgccgaccgtcgtgttcgcgggcgaagagtacggcacgggctcgtcgcgcgactgggcggccaagggcacgcaactgctcggcgtgaaggccgtgatcgcacgcagcttcgagcggatccaccgctcgaacctcgtcggcatgggcgtgctgccgctgcagttcaagggctcggacagcatccagtcgctcggcatcacgggcgacgagacgtacgacatcgaaggcctcggcgacgacttcaagccgcagcaggacgtcacgctcgtgatccatcgcaagaacggcgaaacgaagcgcgtgccggtgctgctgcgcatcgatacgccgatcgaagtcgactactacaagcacggcggtatcctgccgttcgtgctgcgctcgctgctcgcggcttaa

SEQ ID NO: 66973 - protein, 905 aa, Burkholderia pseudomallei K96243
MAHNLHKTLKEFDSGSGKGKFYSLPKLGKELKTKIERLPVSIRIVLESVLRNYDGKKITEEHIEQLANWKPNAKRVDEIPFVVSRVVLQDFTGVPLLADIAAMRGVAKRAGKNPKKIEPLVPVDLVVDHSVQIDYFRQKDALDLNMKLEFQRNNERYQFMKWGMQAFDTFKVVPPGVGIVHQVNLEYLARGVHKKKDDGDTVYYPDTLVGTDSHTTMINGIGVVGWGVGGIEAEAGMLGQPVYFLTPDVVGVELKGKLREGVTATDLVLTITEMLRKEKVVGKFVEFFGEGTKTLALPDRATIANMAPEYGATMGFFPVDEKTIDYFKGTGRTKAEIAAFENYFKAQELFGIPKAGEIDYTKTLTLDLSTVAPSLAGPKRPQDRIEIGNVKSTFTDLFSKPVAENGFAKKADDLTAEYRTSNGVAVKNGDVLIAAITSCTNTSNPSVLLAAGLLAKKAVEAGLTVAPHIKTSLAPGSRIVTEYLTKTGLLPYLAKLGFEVAAYGCTTCIGNAGDLTPELNEAITKNDIVAAAVLSGNRNFEARIHPNIRANFLASPPLVVAYAIAGNITKDLMTEPVGQGKGGRDVYLGDIWPSSDEVQALLKFALDPEKFEKNYSHLTKKGDLWSKIEGESGQVYDWPKSTYIAEPPFFGSDFSMEPAASIATVKGARALGIFGDSVTTDHISPAGSIKEDSPAGKWLKANGVQKADFNSYGSRRGNHDVMMRGTFANVRIKNLMIPAKADGTRVEGGLTIHQPSGEQLSIYDAAMKYIDADTPTVVFAGEEYGTGSSRDWAAKGTQLLGVKAVIARSFERIHRSNLVGMGVLPLQFKGSDSIQSLGITGDETYDIEGLGDDFKPQQDVTLVIHRKNGETKRVPVLLRIDTPIEVDYYKHGGILPFVLRSLLAA

SEQ ID NO: 66974 - DNA, 2706 bp, Anaplasma marginale str. St. Maries
  CDS (1)..(2706): transl_table=11
gtgacggcgcggcggacatctgctatcctacaagagaggactgcgctaggttgctgtacggaggttggtgtgacgtgcttggattctctacaaacacgcaggcagttacgtgtaggcggaagttctcatgactacttcgcgttagatgcggcctaccaggggctgggtctggatggtgccagactgccgtttgtgctcaagattttgctagagaatctgttgcgcaacgaggatggcgtccatgttacgcttggtgacctaaaaaggctagctaaccgtataaacacgggcgtagagtgtgaagtgagtttcatgcccgccagggttatcatgcaagattttacgggagtgcccgcgcttgtggacctggcagctatgcgcgattatgtgcgggaaaaggggcgtgacccgagcctaataaatccgaaaattcctgtggatctggtaatagaccattccgtgcaggttgatttctacggcacgcaagatgcactggcaaaaaatgtcgggctggagatgtcacggaatttggagcgctataaattcctcaaatgggggcagtccgcatttagcaactttcgtgtgataccacctggcgttggcatatgccaccaggttaatctcgaacatttggccaaaattgtgtggaaccgcggcggagttttgtgcccagacactgttgttgggaccgatagccataccacaatggtaaacgggattgcggtgttgggatggggcgttggaggaatagaggccgaagccgttatgcttgggcagccgatagtcatggtagcacctgaagtgttaggggtagagttacatggcaagttgcgcgagggtgtgaccgcgacagacacggtgctgacaatcactaacattctcagaaagaagtgtgtggtggggaaatttgttgagttttacggagatggactcaagaatttatctgtgtttgaccgagccactgttgcaaatatggcgccggaatacggcgcaacctgcggatttttcccatttgaccagggtacgctagactatctagacgtcaccggacgctcgaaagaagagatagacgttgttgaggcatatctgcgtgcgcagggtttgtggtacaacaatggcagccaggcagtttattcagataagctcatcgtggatttggccgatgtacaacctgttgttgctgggcctaaaatgccgcaggagcgggttttgctgtctcaagttcctaacactctggcagggtgtgcaacacataaaaaaactgagcacaattccgttgtgaaaaacggagatgtagttatcgcggcgattaccagctgcactaacacctctaatccacatgtgatggttgcagcggggctggttgcgcgtaaggcaaaacagctcgggatcaagcccaagccctgggttaaaacttccctcacacccggttctagggttgttgaggcatacttacaatcttcgggcctgcaggagtgcttggatttcattggattcaatatcgccgggtacgggtgtgcgacctgcataggaaattccggcccgcttgctaaggaaatcgaaagcctgatcaaagagcaggatttgctagtcgcatctgttctgtctggcaaccggaattttgagggaaggatacacccatgcgttaaggccaatttcctcgcttcgccgcctcttgtggtcatttacgccctggcgggcacagttctcttagatctaacgcgcgatcctgtgtgccaggattctcgcggtaatgacattttcttgcgtgacctatggccttcaagcggtgaaattgaggaggtgattgcaaaatttgtatccagggaggtctttgcggaaaagtataaggatgtcttcagtggggatgacatttggaaaaacgtcgaatataggggtgatgcaacctacaattgggagcctggtagcacatacgtgcaaagcccgccctattttatgggtgagaccagcggcagggtggttggcaggaaatttaacataagtggcgcaagaatattgatgttgcttggcagcgggatcactactgaccatatttctcctgccggcaatattcctttgaaaagccccgcaggcgagtttcttatgcataatggcgtcaaagaacgggatttcaattcgtacggtgccagaaggggcaaccatcacgtaatgttgcgaggtacctttgccaacatcagaataaaaaatgagatgctcaatgaagtgcagggtgggttcacgaagcacgtcccaacggagagagttatgacggtgtttgaggccgctatgctctatagggaggccaatgtgccgctggtgattattgcgaaacagggatacggtgcagggtctagtagagactgggcggcaaaaggcacgctgctgcttggagtcagggcggtaatagcggaggattttgaacgcatacacaggtccaacctagtgagcatgggggtgttgccgctaacttttaaacgggccagcgacaacgtgttttccggcaatgaagtgataacattaagcggtaatgttggtgtcggcgaggagattgtgtgcaaaattcgcgaagcggatggctctgagagggaaattctcctattgtgtgcgatcaacaccgaagttgaggaggagtatcttgcctctggaggtgtgctacactacgttttgaagaaggtggtgggagagagcgttgccggcaatgcgtga

SEQ ID NO: 66975 - protein, 901 aa, Anaplasma marginale str. St. Maries
MTARRTSAILQERTALGCCTEVGVTCLDSLQTRRQLRVGGSSHDYFALDAAYQGLGLDGARLPFVLKILLENLLRNEDGVHVTLGDLKRLANRINTGVECEVSFMPARVIMQDFTGVPALVDLAAMRDYVREKGRDPSLINPKIPVDLVIDHSVQVDFYGTQDALAKNVGLEMSRNLERYKFLKWGQSAFSNFRVIPPGVGICHQVNLEHLAKIVWNRGGVLCPDTVVGTDSHTTMVNGIAVLGWGVGGIEAEAVMLGQPIVMVAPEVLGVELHGKLREGVTATDTVLTITNILRKKCVVGKFVEFYGDGLKNLSVFDRATVANMAPEYGATCGFFPFDQGTLDYLDVTGRSKEEIDVVEAYLRAQGLWYNNGSQAVYSDKLIVDLADVQPVVAGPKMPQERVLLSQVPNTLAGCATHKKTEHNSVVKNGDVVIAAITSCTNTSNPHVMVAAGLVARKAKQLGIKPKPWVKTSLTPGSRVVEAYLQSSGLQECLDFIGFNIAGYGCATCIGNSGPLAKEIESLIKEQDLLVASVLSGNRNFEGRIHPCVKANFLASPPLVVIYALAGTVLLDLTRDPVCQDSRGNDIFLRDLWPSSGEIEEVIAKFVSREVFAEKYKDVFSGDDIWKNVEYRGDATYNWEPGSTYVQSPPYFMGETSGRVVGRKFNISGARILMLLGSGITTDHISPAGNIPLKSPAGEFLMHNGVKERDFNSYGARRGNHHVMLRGTFANIRIKNEMLNEVQGGFTKHVPTERVMTVFEAAMLYREANVPLVIIAKQGYGAGSSRDWAAKGTLLLGVRAVIAEDFERIHRSNLVSMGVLPLTFKRASDNVFSGNEVITLSGNVGVGEEIVCKIREADGSEREILLLCAINTEVEEEYLASGGVLHYVLKKVVGESVAGNA

SEQ ID NO: 66976 - DNA, 2718 bp, Azoarcus sp. EbN1
  CDS (1)..(2718): transl_table=11
atgctccatactctgttcgacacgctccagaccttctccacccccaccgggcgcagcggccgctattactcgttgccggcactggagaccgccggcgtcgcgacggtctcgcgcctgccggtgtcgatccgcatcgtcctggaagccgtgctgcgccattgcgacggcaggaaaatcaccgaagaccacgtgcgccagctcgccggctggactgcgaacgcgccgcgtaccgccgagattccgttcgtcgtcgcccgcgtcgtgctgcaggactttaccggcgtgccgctgctgtgcgatctggcggcgatgcgcaacgtcgcggccgacatgggcaaggacccgaagctgatcgaaccgctcgtgccggtggatctggtcgtcgaccattccgtgcaggtcgatcactacggctcgccgctcgcgctgcggcagaacatggaactcgaattccagcgcaaccgcgagcgctaccagttcatgaaatgggggatgcaggcattcgacacgttccgcgtcgtgccgccgggcatcggcatcgtccaccaggtcaatctcgaatatctgttccgcggcgtgcgcgggcacgacaccggcgatggcatgctgtattacccggacacgctggtcggcaccgactcgcacacgacgatgatcaacggcctcggcgtcgtcggctggggtgtcggcgggatcgaagccgaagccggcatgctgggccagccggtctacctgctgacgccggacgtcgtcggcgtcgaactgaaggggcgactgaacgaaggcgtcacggcgaccgacctcgtgctgaccgtcaccgaactgctgcgccggcacaaggtcgtcggcaagttcgtcgagttcttcggcgaaggcaccgccagcctgaccgtcaccgaccgggcgacgctcgccaacatggcccctgaatatggcgcgacgatgggcttcttcccgatcgatgacaagactgtcgcctacatgcgcggcaccggtcgcagcgacgccgagtgcgaactgttcgaagcctatttccgggcgcagcagctgttcggcgtgccgcaggcgggcgagatcgactactcggagacggtgacgctcgatctggcatcgatcgtcccgtcgctcgccggtccgaagcggccgcaagaccgcatcccgctgtccgacatggaagacatgttcgaccggctgttctcccggccggcgagcgaaaacggcttcggccagccggaagctgcactcggcacgcgttttccgacgaagctgccgggcgtcgacctcggccatggcgacatcctcatcgccgcgatcacgtcctgcacgaacaccagcaacccggccgtgctgatcgccgccggcctgctggcgaagaaagcggtggcgaaagggttgcgcgtgaaacctcacgtcaagacttcgctcgcgccgggctcgcgcgtcgtcaccgactacctgcagaaggccgggttgctcgagccgctcgccgagctcggctttgcgctggccggctacggctgcacgacctgcatcggcaactcgggcgatctcgcgccggagctcaacgaggcgatcggcgagcataacgtcgtcgccgccgcagtgctgtccggcaaccgcaatttcgaagcgcgcattcatccgaacatccgcgccaactttctcgcgtcgccgccgctcgtggtcgcgttcgcgatcgcggggcgggccaacgtcgatctcaccgagaacccgctgggcaccggagtggacggccaccatgtgtacctgaaggacatctggccgacgtccgacgagatcgccgcagtgatgccttatgcgatggatccggcgactttcaagcgcctgtattccgacttcacgaaagaccacgacctgtggaacgagatctcggcgccggcgggacaggtgtacgcgtggccggagtcgacctacatcgcgcgtccgccgttcttcgaaggtttctcgcctcaacccggcgccgtcgccgacatcaagggcgcgcgcgtgctgctgatgctcggcgactcggtcacgaccgaccacatctcgccggccggttcgttcagggagacaactccggcagggcagtggctgatcgccaagggcgtcgcgaagcaggatttcaactcttacggctcgcggcgaggcaatcacgacgtgatggtgcgcggcacttttgccaacgtgcggatcaggaacatgatgctgccgccgaaacaggacggctcgcgcgtcgaagggggctacacgcttctcgacgaccggcagatgacggtgttcgacgccgcgatggcctacatggcgaccggcacgccgacggtgatcttcgccggcgaggagtacggcaccggctcgagccgcgactgggccgcgaaaggcacgcagctgctcggcgtcagggccgtcatcgccagaagtttcgagcgcatccatcgctcgaatctcgttggcatgggcgtgctgccgctgcagttcaagggccaggactcgtgggagagcctcggtttcgtcggcgacgagacgttcgacgtcctcggcatcgatgcgacgctcaaaccccagcaggatctgtcgctggtcgcgcaccggcgcaatggcgagaggatcgaggtcccggtgttgtgccgcatcgacacgccggtcgaggtcgattactaccgtcatggtggcatcctgtcgtatgtactgcgggagattctcgggcgcgtgcaatag

SEQ ID NO: 66977 - protein, 905 aa, Azoarcus sp. EbN1
MLHTLFDTLQTFSTPTGRSGRYYSLPALETAGVATVSRLPVSIRIVLEAVLRHCDGRKITEDHVRQLAGWTANAPRTAEIPFVVARVVLQDFTGVPLLCDLAAMRNVAADMGKDPKLIEPLVPVDLVVDHSVQVDHYGSPLALRQNMELEFQRNRERYQFMKWGMQAFDTFRVVPPGIGIVHQVNLEYLFRGVRGHDTGDGMLYYPDTLVGTDSHTTMINGLGVVGWGVGGIEAEAGMLGQPVYLLTPDVVGVELKGRLNEGVTATDLVLTVTELLRRHKVVGKFVEFFGEGTASLTVTDRATLANMAPEYGATMGFFPIDDKTVAYMRGTGRSDAECELFEAYFRAQQLFGVPQAGEIDYSETVTLDLASIVPSLAGPKRPQDRIPLSDMEDMFDRLFSRPASENGFGQPEAALGTRFPTKLPGVDLGHGDILIAAITSCTNTSNPAVLIAAGLLAKKAVAKGLRVKPHVKTSLAPGSRVVTDYLQKAGLLEPLAELGFALAGYGCTTCIGNSGDLAPELNEAIGEHNVVAAAVLSGNRNFEARIHPNIRANFLASPPLVVAFAIAGRANVDLTENPLGTGVDGHHVYLKDIWPTSDEIAAVMPYAMDPATFKRLYSDFTKDHDLWNEISAPAGQVYAWPESTYIARPPFFEGFSPQPGAVADIKGARVLLMLGDSVTTDHISPAGSFRETTPAGQWLIAKGVAKQDFNSYGSRRGNHDVMVRGTFANVRIRNMMLPPKQDGSRVEGGYTLLDDRQMTVFDAAMAYMATGTPTVIFAGEEYGTGSSRDWAAKGTQLLGVRAVIARSFERIHRSNLVGMGVLPLQFKGQDSWESLGFVGDETFDVLGIDATLKPQQDLSLVAHRRNGERIEVPVLCRIDTPVEVDYYRHGGILSYVLREILGRVQ

SEQ ID NO: 66978 - DNA, 2814 bp, Azoarcus sp. EbN1
  CDS (1)..(2814): transl_table=11
atgacaagcaagaacagcttcggggcccgtggaacgttgcaggtgggagcgaaaacctacgaaatctaccggctcgacgcggtcagcggcgagggggccgacgtcgcaagccttccgtatgcgctgaagatactgctcgagaacctgctgcgcaccgaggacggaggcaacgtcaccgcggacgacatccgggcgctggccgcgtgggatgcgggcgggaagtccgaccgggagatcgcgttcacccccgcccgcgtgatcttgcaggacttcaccggcgtgcccgccgtcgtcgacctggctgcgatgcgcgaagccatgggctcgctcgccggcgatccggggctgatcaatccgctggcgccggtcgagctggtcatcgaccactcggtgatcgtcgatgtattcggcaagccggaggcactcgagcgcaacgtcgagatcgagtaccagcgcaacctggagcggtatcagttcctgcgctgggggcaggacgccttcaacgacttcaaggttgttcctcccgacaccggcatcgtccaccaggtcaacctggagcacctcgcccgggtggtcttcacgcgcgaggagaacggggccacggtcgcctatcccgacacctgcgtcggcaccgactcccacaccccgatggtcaacggcctcggcgtggtcgcctggggcgtgggtggcatcgaggcggaggccgcgatgctcggccagccggtgtcgatgctgatcccgcaggtgctcggcttcaagctgaccggcaagctgcccgaaggctccaccgctaccgacctcgtgctcaccatcaccgagatgcttcgccgccaccgcgtggtcggcaagttcgtcgagttctacggccccggtgtgagcgccgtcccgctagccaatcgtgccacgatcggcaacatgagccccgagtacggctcgacgatttcgatctttccgatcgacgacgaaacgctgcgttatctcgaactgaccgggcgctcgcccgagcagatcgaactcgtgcaggcgtacgccagggcgcaaggcctctggcacgacccgcaggccgagccgcgctactccgagctgctcgaactcgacctgtccacggtgatgccctcgatcgccggacccaagcgcccgcaggaccgcgtccccctgtccgaagcgaaggaagcctttcacggcgcgctggcgacattcattcaccagccggagcagaagcagcagggatacgataatgcggtcgccgagtcgtttccggcttccgatccaccggcctacgaagactcgacggtccactcgccttccccgagcgatcacctcgccgaggcgcccgccgggggctaccgctcgcgcgacccggtaccggtcacgctggccgacggcaccgagtgcgagatcgatcacgggtcagtggccatcgccgccatcacctcctgcaccaacacctcgaatccggcggtgatgcttgccgccgccctgcttgcgaagaaggcggtcgagaaggggctgacccgcaagccgtgggtgaagaccagcctcgctcccggctccagggtggtgacggactactacgagcgcgccggcctcacccgctacctcgatgcgctcggcttcaacctggtcggctacggctgcacgacctgcatcggcaactcgggaccgctgattcccgaggtgagcgaggcggtcagggcgcacgacctgtccgtcgtgtcggtgctctcgggcaaccgcaacttcgagggccgcatccacgccgaagtcaagatgaactacctgatgtcgccgccgctggtggtcgcctacgcgctcgcggggacgatggacatcgatctgttccgggagccgctcggcaagggccgcgacggccgggatgtgttcctgaaggacgtctggccgacggcgagcgaggtccaggcggtggtggaatcgtccatcgtcccggacatgttcaaagccggctatgccgacgtgttcgcgggcgacgaacgctggaagtccctgtccacgccgcacggcgatctcttcgcctgggacacggcctcgacctacgtgcgcaagccgccgtatttcgagaacatgccgcgccagcccgtgccggtcgccgacatcaccggcgcccgcgtgctggcgctcctgggcgactcggtgaccaccgaccacatcagccccgccggctccatcgcgaaaaattccccggccgcggcctacctgctctcgcacggcgtggcgcaacgcgacttcaactcctacggctcgcgccggggcaatcatgaagtgatgatccgcggcacgttcgccaacgtgcgcctgcgcaatcagctcgcaccgggcaccgagggcggctacacgcgcgacttcacgaagcgcgatgcaccggtcacgaccatcttcgacgcctcgcaatcctatatcgctgccggcaccccgctggtcatcctcgccggcaaggagtacggctcggggtcctcgcgcgactgggccgccaagggcaccttgctgctgggcgtgcacgcggtgatcgccgaatcctacgagcgcatccaccgctcgaacctgctcggcatgggcgtgctgccgctgcagttccccgaaggcgagaacgccggctcgctcggcctgaccggagaggaaaccttcgacatcgtcggggtcaccgcgctcaacgaaggccgcactccggccacggtgaaagtgaaggccggagacgtcgagttcgacgcgaccgtccgcatcgaaacgcccagcgaggcggattactaccgccatggcggaatcatgcagtacgtgctgcgcaacctgctgcggtag

SEQ ID NO: 66979 - protein, 937 aa, Azoarcus sp. EbN1
MTSKNSFGARGTLQVGAKTYEIYRLDAVSGEGADVASLPYALKILLENLLRTEDGGNVTADDIRALAAWDAGGKSDREIAFTPARVILQDFTGVPAVVDLAAMREAMGSLAGDPGLINPLAPVELVIDHSVIVDVFGKPEALERNVEIEYQRNLERYQFLRWGQDAFNDFKVVPPDTGIVHQVNLEHLARVVFTREENGATVAYPDTCVGTDSHTPMVNGLGVVAWGVGGIEAEAAMLGQPVSMLIPQVLGFKLTGKLPEGSTATDLVLTITEMLRRHRVVGKFVEFYGPGVSAVPLANRATIGNMSPEYGSTISIFPIDDETLRYLELTGRSPEQIELVQAYARAQGLWHDPQAEPRYSELLELDLSTVMPSIAGPKRPQDRVPLSEAKEAFHGALATFIHQPEQKQQGYDNAVAESFPASDPPAYEDSTVHSPSPSDHLAEAPAGGYRSRDPVPVTLADGTECEIDHGSVAIAAITSCTNTSNPAVMLAAALLAKKAVEKGLTRKPWVKTSLAPGSRVVTDYYERAGLTRYLDALGFNLVGYGCTTCIGNSGPLIPEVSEAVRAHDLSVVSVLSGNRNFEGRIHAEVKMNYLMSPPLVVAYALAGTMDIDLFREPLGKGRDGRDVFLKDVWPTASEVQAVVESSIVPDMFKAGYADVFAGDERWKSLSTPHGDLFAWDTASTYVRKPPYFENMPRQPVPVADITGARVLALLGDSVTTDHISPAGSIAKNSPAAAYLLSHGVAQRDFNSYGSRRGNHEVMIRGTFANVRLRNQLAPGTEGGYTRDFTKRDAPVTTIFDASQSYIAAGTPLVILAGKEYGSGSSRDWAAKGTLLLGVHAVIAESYERIHRSNLLGMGVLPLQFPEGENAGSLGLTGEETFDIVGVTALNEGRTPATVKVKAGDVEFDATVRIETPSEADYYRHGGIMQYVLRNLLR

SEQ ID NO: 66980 - DNA, 2691 bp, Silicibacter pomeroyi DSS-3
  CDS (1)..(2691): transl_table=11
atgcccatcaaggttggacaggacaccgccaagacgcgccgcacgctcagcgtcaatggcaaatccatttcctattactcgatccccgccgccaccgaggccggtctgggggatttctcgaaactgcccgccgcgctgaaggtggtgctggagaacatgctgcggttcgaggatggcggcttttccgtgtcggtcgacgacatcaaggcctttgccgaatggggcgccaagggcggccagaacccgcgcgagatcgcctatcgcccggcccgcgtgctgatgcaggatttcaccggcgttcccgccgttgtcgacctggccgcgatgcgcgacggcatcaaggcgctgggtggtgacgcgcagaagatcaacccgctcaacccggttgacctggtcatcgaccactcggtcatgatcgacgaattcggcaatccgcgcgccttccagatgaacgtggaccgcgaatacgagcgcaacatggagcgttaccagttcctgaaatggggccagggcgcgttcaacaacttccgcgtggtgccgccgggcaccggcatctgccaccaggtgaacctggaatatctggcccagaccgtctggaccgataccgatcaggacggggtcgaagtcgcctatcccgatacgctggtgggcaccgacagccacaccaccatggtcaacggcatggccgttctgggctggggcgttggcgggatcgaggccgaggccgcgatgctgggccagccaatctcgatgctgatccccgaggtcatcggtttcgagctgaccggccagatggtcgagggtaccaccggcaccgacctggttctgaaagtggtcgagatgctgcgcgccaagggcgtggtgggcaagttcgtcgaattctacggcaccggccttgaccgtctgccgctggccgaccgggcaaccatcgccaacatggcgcctgaatacggcgccacctgcggcttcttcccgattgacgacaagactctggcgtacatgcgcaataccggccgcgacgaggaccggatcgcgctggtcgaagcctatgccaaggaaaacgggttctggcgcgatgccgattacgccccggtctataccgacacgctgagcctggacatgggcaccatcgtgcccgctatctcgggccccaagcgtccgcaggactatgtggcgctgaccgatgccaagaccgcattcacccgcgagatggctgagaccttcaagcgcccgatgggcaaggaagtcgcggtcaagggcgaagactataccatggaatcgggcaaggtcgtgatcgcctcgatcacgtcgtgcaccaacacctcgaacccctatgtgatgatcggcgccggtctggtggcgcgcaaggccgccgctctcggcctgaaccgcaagccctgggtcaagacctcgctggcgccgggttcgcaggtcgtcagcgcctatctggaggccgcaggcctgcaagaggatctggacaagatcggcttcaacctggtgggctatggctgcaccacctgtatcggcaactcgggtccgatccagaaggaactgtccgaggcgattgccgagggcgatctggtcgccacctcggtcctgtcgggcaaccgcaacttcgaagggcggatcagcccggatgtgcgcgccaactacctggcctcgccgccgctggtggtggtctatgcgctggccggcacgctggacatcgacctgacctccgagccgatcggcaccgacaaggatggcaacgatgtctacatgaaggacatctggcccacgcaagcggaaatcgcggaactggtcgacaggactgtgacccgcgaggcgttccagtcgaaatatgccgatgtgttcaagggtgacgagaaatggcaggcggtggaaaccaccgatgcggaaacctatgactggcccgcgacctcgacctatatccagaacccgccctatttccagggcatgggcaccgagccgggcaccatctcgaacatctcgggcgccaaggtgctggcgatcctgggcgacatggtcaccaccgaccacatctcgcccgcgggctcctttgccaccaccacgcctgccggcaaatatctgaccgagcgtcaggtggccccgcgcgagttcaactcctatggctcgcgccgtggcaaccacgagatcatgatgcgcggcaccttcgccaacatccgcatcaagaacgagatgctggacggcgtcgaaggcggctataccaaagggcccgatgggcagcagacctcgatctacgaggcctcgatggcctatcaggagcagggcaccccgctggtggtgttcggcggcgaacaatatggcgccggctcctcgcgcgactgggcggccaagggcaccgcgctgctgggcgtcaaggcggtcatcgccgaaagcttcgagcgtatccaccgctcgaacctggtgggcatgggcgtcatcccgttcgaattcaccggcggcgacaatcgcaagtcgctgggcctgaagggtgatgaaaccgtggcgatcagcgggctggacaccatccagcccctgcaagaggtgccctgcaccatcacctatggcgacgggtccgaaaagaccatcacgctgaagtgccggatcgataccgcgcccgagatcgaatatatcgagaacggcggcgtgctgcattacgtgctgcgcaacctggccaaagccagctga

SEQ ID NO: 66981 - protein, 896 aa, Silicibacter pomeroyi DSS-3
MPIKVGQDTAKTRRTLSVNGKSISYYSIPAATEAGLGDFSKLPAALKVVLENMLRFEDGGFSVSVDDIKAFAEWGAKGGQNPREIAYRPARVLMQDFTGVPAVVDLAAMRDGIKALGGDAQKINPLNPVDLVIDHSVMIDEFGNPRAFQMNVDREYERNMERYQFLKWGQGAFNNFRVVPPGTGICHQVNLEYLAQTVWTDTDQDGVEVAYPDTLVGTDSHTTMVNGMAVLGWGVGGIEAEAAMLGQPISMLIPEVIGFELTGQMVEGTTGTDLVLKVVEMLRAKGVVGKFVEFYGTGLDRLPLADRATIANMAPEYGATCGFFPIDDKTLAYMRNTGRDEDRIALVEAYAKENGFWRDADYAPVYTDTLSLDMGTIVPAISGPKRPQDYVALTDAKTAFTREMAETFKRPMGKEVAVKGEDYTMESGKVVIASITSCTNTSNPYVMIGAGLVARKAAALGLNRKPWVKTSLAPGSQVVSAYLEAAGLQEDLDKIGFNLVGYGCTTCIGNSGPIQKELSEAIAEGDLVATSVLSGNRNFEGRISPDVRANYLASPPLVVVYALAGTLDIDLTSEPIGTDKDGNDVYMKDIWPTQAEIAELVDRTVTREAFQSKYADVFKGDEKWQAVETTDAETYDWPATSTYIQNPPYFQGMGTEPGTISNISGAKVLAILGDMVTTDHISPAGSFATTTPAGKYLTERQVAPREFNSYGSRRGNHEIMMRGTFANIRIKNEMLDGVEGGYTKGPDGQQTSIYEASMAYQEQGTPLVVFGGEQYGAGSSRDWAAKGTALLGVKAVIAESFERIHRSNLVGMGVIPFEFTGGDNRKSLGLKGDETVAISGLDTIQPLQEVPCTITYGDGSEKTITLKCRIDTAPEIEYIENGGVLHYVLRNLAKAS

SEQ ID NO: 66982 - DNA, 2628 bp, Ehrlichia ruminantium str. Welgevonden
  CDS (1)..(2628): transl_table=11
gtgggatttttaaattctcttgattcaaaacaaaagttgaatgttggcaaaaattgttacgaatattttagtattggggttgcatctaaaaagctaggtgtagatattaaaagattaccatgctcacttaaaatactatttgagaatttattacgtaatgaaaatgggtttagtgttaaaatcgaagatataaaaaaattggctcaatgtgctgataaatatgtaagttatgaaattaatttcacacctgctcgagtattaatgcaggattttactggtgttcctgcagtagttgacttagctgcaatgcgtgactatgtaaaagaaaatggcggtaatccagctataattaatcctaaagtgccagttgatttagttatagatcactctattcaagttgattcatatggaacagagagttcttttgatgaaaatgtatctatagaaatgcaaagaaatgttgaaagatataagtttttaaaatgggggcaatgcgcatttaaaaattttcgtgttgtacctcctggagctggtatttgtcatcaggtaaatttagaatatcttgctaaggttgtatggaatgatggtgatttagtttatcctgacactttagttggtactgatagtcatactactatggttaatggattgtctgtattagggtggggtgtaggaggtatagaagctgaagcagtgatgttaggtcaaccagttactatgttaattcctgaagttgtaggatttaaattagtaggcaagttatcagatggtgttactgcaactgatatggtattgacaattactaatattcttaggagtaaaggtgtagtaggaaagtttgttgaattttttggtgaaggtttggatagtttatccattgctgatagggcaactgtagcaaatatgtctcctgaatatggggctacttgtggtttttttccaatagatcataaaaccttggaatacttggagatgacaggacgcgagctatctttaatagatttagtggagtcttacgctaaagcacaatatttatggcatactaaagaagggttaaggtatgataatgaaatagaatttgatttaggagaagtaaagcctgtattagctggtccaaaaagacctcaagataaaatttttctttctcaagtgaagacaacattgccaagtttgggtgtgaaatcaactaacgataataagtcagcaaaatctttaaaaaatggtgatatagttattgctgcgataactagttgtactaatacatcaaatccaagtgttatgattgcagcaggacttgttgcacgtaaagcaaatatgttaaatttaaaatctaaaccgtgggtaaagacctctttagctcctggttctcaagttgtaacagaatacctagtcaaatcaggtttacagaggcatttagatgctttaggattttatttggttggatatgggtgtactacttgtattggcaattctggatctttggctcctcatattgaagaagatataaaatctaatgatttgttagttgcagcagttttatctggtaatcgtaattttgaaggaagaatacatccatgtgtacgggctaattttcttgcatctcctccattggttgtagcttatgctttggctggtacaattgatatagatcttacttctgatcctatagctattggcgataatggggaaaatgtttatttatcagatatttggccatctaatgatgagattaatgaagttatacagaatactattaataaacaagtgtttactagtaggtataaaaatgtatttagtggaggaaagtattgggaaaatttaaaatgtggtgacagtgatatctataagtgggatatgaatagtacttatatacaaagtccaacttattttaaaaatttgtcttctaatttaaatagtagtgataatattaatattagtaatgcaaatattttagcattgttaggtgatagtgttactactgatcatatttctcctgcaggtaatattgctttaaatagtcctgctggtaagtttttattacaaaataatgtaatggtagaggattttaattcttatggttcaaggcgagggaatcatcatataatgacacggggtacttttgctaatattcgtgtacgtaatgaaatggtaagtgctgaaggtggtgtaactagatatattcctactggtgaagaaatgtcaatatttgatgcatcgcaactttatcaacagaataacataccgttagttgtaattgctggtaaagaatatggtagtggctcaagtagagactgggctgctaaaggtactttctttttaaatattaaagctattatagcagaaagttttgaacgtatacatagatcaaatcttattggtatgggagtattaccattaacatttaaaaatggatgtacgcgaaagacgttagatttaacaggttgtgaagtaataagtattactggtaaaattggtataaatcaagagttaaaatgtatgattttgagacaaaatggatctagtcaaagtattactgtggtttgtaatcttaatactgctattgaagttgagtattttaaaagtggtggtgtattgcaatacgtacttatgagaatgatggcaagttag

SEQ ID NO: 66983 - protein, 875 aa, Ehrlichia ruminantium str. Welgevonden
MGFLNSLDSKQKLNVGKNCYEYFSIGVASKKLGVDIKRLPCSLKILFENLLRNENGFSVKIEDIKKLAQCADKYVSYEINFTPARVLMQDFTGVPAVVDLAAMRDYVKENGGNPAIINPKVPVDLVIDHSIQVDSYGTESSFDENVSIEMQRNVERYKFLKWGQCAFKNFRVVPPGAGICHQVNLEYLAKVVWNDGDLVYPDTLVGTDSHTTMVNGLSVLGWGVGGIEAEAVMLGQPVTMLIPEVVGFKLVGKLSDGVTATDMVLTITNILRSKGVVGKFVEFFGEGLDSLSIADRATVANMSPEYGATCGFFPIDHKTLEYLEMTGRELSLIDLVESYAKAQYLWHTKEGLRYDNEIEFDLGEVKPVLAGPKRPQDKIFLSQVKTTLPSLGVKSTNDNKSAKSLKNGDIVIAAITSCTNTSNPSVMIAAGLVARKANMLNLKSKPWVKTSLAPGSQVVTEYLVKSGLQRHLDALGFYLVGYGCTTCIGNSGSLAPHIEEDIKSNDLLVAAVLSGNRNFEGRIHPCVRANFLASPPLVVAYALAGTIDIDLTSDPIAIGDNGENVYLSDIWPSNDEINEVIQNTINKQVFTSRYKNVFSGGKYWENLKCGDSDIYKWDMNSTYIQSPTYFKNLSSNLNSSDNINISNANILALLGDSVTTDHISPAGNIALNSPAGKFLLQNNVMVEDFNSYGSRRGNHHIMTRGTFANIRVRNEMVSAEGGVTRYIPTGEEMSIFDASQLYQQNNIPLVVIAGKEYGSGSSRDWAAKGTFFLNIKAIIAESFERIHRSNLIGMGVLPLTFKNGCTRKTLDLTGCEVISITGKIGINQELKCMILRQNGSSQSITVVCNLNTAIEVEYFKSGGVLQYVLMRMMAS

SEQ ID NO: 66984 - DNA, 2646 bp, Ehrlichia ruminantium str. Welgevonden
  CDS (1)..(2646): transl_table=11
gtgattggagtttataacgtgggatttttaaattctcttgattcaaaacaaaagttgaatgttggcaaaaattgttacgaatattttagtattggggttgcatctaaaaagctaggtgtagatattaaaagattaccatgctcacttaaaatactatttgagaatttattacgtaatgaaaatgggtttagtgttaaaatcgaagatataaaaaaattggctcaatgtgctgataaatatgtaagttatgaaattaatttcacacctgctcgagtattaatgcaggattttactggtgttcctgcagtagttgacttagctgcaatgcgtgactatgtaaaagaaaatggcggtaatccagctataattaatcctaaagtgccagttgatttagttatagatcactctattcaagttgattcatatggaacagagagttcttttgatgaaaatgtatctatagaaatgcaaagaaatgttgaaagatataagtttttaaaatgggggcaatgcgcatttaaaaattttcgtgttgtacctcctggagctggtatttgtcatcaggtaaatttagaatatcttgctaaggttgtatggaatgatggtgatttagtttatcctgacactttagttggtactgatagtcatactactatggttaatggattgtctgtattagggtggggtgtaggaggtatagaagctgaagcagtgatgttaggtcaaccagttactatgttaattcctgaagttgtaggatttaaattagtaggcaagttatcagatggtgttactgcaactgatatggtattgacaattactaatattcttaggagtaaaggtgtagtaggaaagtttgttgaattttttggtgaaggtttggatagtttatccattgctgatagggcaactgtagcaaatatgtctcctgaatatggggctacttgtggtttttttccaatagatcataaaaccttggaatacttggagatgacaggacgcgagctatctttaatagatttagtggagtcttacgctaaagcacaatatttatggcatactaaagaagggttaaggtatgataatgaaatagaatttgatttaggagaagtaaagcctgtattagctggtccaaaaagacctcaagataaaatttttctttctcaagtgaagacaacattgccaagtttgggtgtgaaatcaactaacgataataagtcagcaaaatctttaaaaaatggtgatatagttattgctgcgataactagttgtactaatacatcaaatccaagtgttatgattgcagcaggacttgttgcacgtaaagcaaatatgttaaatttaaaatctaaaccgtgggtaaagacctctttagctcctggttctcaagttgtaacagaatacctagtcaaatcaggtttacagaggcatttagatgctttaggattttatttggttggatatgggtgtactacttgtattggcaattctggatctttggctcctcatattgaagaagatataaaatctaatgatttgttagttgcagcagttttatctggtaatcgtaattttgaaggaagaatacatccatgtgtacgggctaattttcttgcatctcctccattggttgtagcttatgctttggctggtacaattgatatagatcttacttctgatcctatagctattggcgataatggggaaaatgtttatttatcagatatttggccatctaatgatgagattaatgaagttatacagaatactattaataaacaagtgtttactagtaggtataaaaatgtatttagtggaggaaagtattgggaaaatttaaaatgtggtgacagtgatatctataagtgggatatgaatagtacttatatacaaagtccaacttattttaaaaatttgtcttctaatttaaatagtagtgataatattaatattagtaatgcaaatattttagcattgttaggtgatagtgttactactgatcatatttctcctgcaggtaatattgctttaaatagtcctgctggtaagtttttattacaaaataatgtaatggtagaggattttaattcttatggttcaaggcgagggaatcatcatataatgacacggggtacttttgctaatattcgtgtacgtaatgaaatggtaagtgctgaaggtggtgtaactagatatattcctactggtgaagaaatgtcaatatttgatgcatcgcaactttatcaacagaataacataccgttagttgtaattgctggtaaagaatatggtagtggctcaagtagagactgggctgctaaaggtactttctttttaaatattaaagctattatagcagaaagttttgaacgtatacatagatcaaatcttattggtatgggagtattaccattaacatttaaaaatggatgtacgcgaaagacgttagatttaacaggttgtgaagtaataagtattactggtaaaattggtataaatcaagagttaaaatgtatgattttgagacaaaatggatctagtcaaagtattactgtggtttgtaatcttaatactgctattgaagttgagtattttaaaagtggtggtgtattgcaatacgtacttatgagaatgatggcaagttag

SEQ ID NO: 66985 - protein, 881 aa, Ehrlichia ruminantium str. Welgevonden
MIGVYNVGFLNSLDSKQKLNVGKNCYEYFSIGVASKKLGVDIKRLPCSLKILFENLLRNENGFSVKIEDIKKLAQCADKYVSYEINFTPARVLMQDFTGVPAVVDLAAMRDYVKENGGNPAIINPKVPVDLVIDHSIQVDSYGTESSFDENVSIEMQRNVERYKFLKWGQCAFKNFRVVPPGAGICHQVNLEYLAKVVWNDGDLVYPDTLVGTDSHTTMVNGLSVLGWGVGGIEAEAVMLGQPVTMLIPEVVGFKLVGKLSDGVTATDMVLTITNILRSKGVVGKFVEFFGEGLDSLSIADRATVANMSPEYGATCGFFPIDHKTLEYLEMTGRELSLIDLVESYAKAQYLWHTKEGLRYDNEIEFDLGEVKPVLAGPKRPQDKIFLSQVKTTLPSLGVKSTNDNKSAKSLKNGDIVIAAITSCTNTSNPSVMIAAGLVARKANMLNLKSKPWVKTSLAPGSQVVTEYLVKSGLQRHLDALGFYLVGYGCTTCIGNSGSLAPHIEEDIKSNDLLVAAVLSGNRNFEGRIHPCVRANFLASPPLVVAYALAGTIDIDLTSDPIAIGDNGENVYLSDIWPSNDEINEVIQNTINKQVFTSRYKNVFSGGKYWENLKCGDSDIYKWDMNSTYIQSPTYFKNLSSNLNSSDNINISNANILALLGDSVTTDHISPAGNIALNSPAGKFLLQNNVMVEDFNSYGSRRGNHHIMTRGTFANIRVRNEMVSAEGGVTRYIPTGEEMSIFDASQLYQQNNIPLVVIAGKEYGSGSSRDWAAKGTFFLNIKAIIAESFERIHRSNLIGMGVLPLTFKNGCTRKTLDLTGCEVISITGKIGINQELKCMILRQNGSSQSITVVCNLNTAIEVEYFKSGGVLQYVLMRMMAS

SEQ ID NO: 66986 - DNA, 2244 bp, Bacteroides fragilis NCTC 9343
  CDS (1)..(2244): transl_table=11
atggtatatgatttgaatatgttgaagagcttctatgcttcctataaagggaagatggagcatgttcgtgcagccttgaaacgtcctttgacgttggctgaaaagattttgtatacacatttgtataatgtggcggatttaaaaaattatgaaaggggtgaagactatgtcaactttcgcccggaccgcgttgctatgcaggatgctactgctcagatggctctgttgcaatttatgaatgcgggtaaagaagcggtggcagtaccttccacggttcattgcgaccacctgatacaagcttatcggggggctgaacgtgatattgaaactgctacacaaaccaatcgggaggtgtacgattttctgcgtgatgtctcttcccgttatggcatcggtttctggaaaccgggagcgggtatcattcaccaggtagtacttgaaaattatgcttttccgggtgggatgatggtcggtacagactcacatactcccaatgcaggaggtctcggaatggtagctatcggtgtaggcggagccgatgctgtggatgtaatgacaggtatggagtgggaacttaagatgccaaaactgattggagtccgtttgacaggagagttgaacggatggacagctccgaaagacgtgatactgaaactggcgggcatcttgaccgtgaagggtgggacgaatgccattatcgaatattttggcccgggtacagcttcgctatcggctacaggaaaggccaccatctgcaatatgggtgccgaagtgggggcaaccacttcactattcccgtatgatgaacggatggctgtttatctgaaagcaaccggacgtgaagaagtagctgcgatggctgacagtgtagctgccgacttgcgtgcagatgacgaagtgatggcacgaccggacgatttttatgaccgggttattgagataaacctttccgaactggaaccttatattaatggtccgtttactccggacgctgctactcctatttcagagtttgcagagaaagtggtaacaaacggttatccccggaagatggaagtggggttgataggatcttgtaccaactcttcttatcaggatatcagccgtgccgcttctgttgccaggcaggtgaatgaaaagaatctgggagtggcggcaccgctgattgtgaatccgggatccgaacagattcgtgctacggccgagcgtgacggcatgatggatgtgttcgaaaagatgggagctacgattatggctaatgcctgtggtccctgtatcggacagtggaaacgccatacggacgatccgacccgtaaaaactcgatagtgacttcctttaaccgtaattttgccaaacgtgccgacggtaatccgaatacttttgcttttgtggcttctcctgaaattgttttggcattgactattgccggagacctttgtttcaatccgctgaaagaccgtttggtgaatcatgacggtgaaaaggtgaaactcagtgaacctcaaggtgacgaacttccatcagccggatttgtagctggtaatcagggatatcaggctcccggcggtgagaaaaacgagatcagagtggctcccgattctcaacggttgcagttgttgactcctttccccgcgtgggatggcaatgattttctcaatatgccgttgcttatcaaagcacagggtaagtgtacgacagaccatatttcgatggcgggtccctggcttcggttccgggggcatctggagaatatatctgataatatgctgatgggagcggtgaatgctttcaatggcgaaacgaataaggtatggaatcgtttgaccaatacctatgaaactgtttcgggtacggctaaacagtataaggcggacggtatctcttccatcgttgtggccgaagaaaattacggtgaaggttccagtcgtgagcatgccgctatggaaccgcgtttccttcatgtaaaggtgatcctggctaagagttttgcccgtatccatgagactaatctgaaaaagcaaggtatgctggctgttacatttgcagacaaggccgattatgaccggattcgtgagcacgatttgatctcggtagtcggattgaaagagttttcacccggacgcaatctggaggtgatattgcaccacgaagatggtacggaagaacggttcgctgtacaacatacttacaatgaacaacagatcagctggttccgtgccggttctgctttgaatgcaaaatag

SEQ ID NO: 66987 - protein, 747 aa, Bacteroides fragilis NCTC 9343
MVYDLNMLKSFYASYKGKMEHVRAALKRPLTLAEKILYTHLYNVADLKNYERGEDYVNFRPDRVAMQDATAQMALLQFMNAGKEAVAVPSTVHCDHLIQAYRGAERDIETATQTNREVYDFLRDVSSRYGIGFWKPGAGIIHQVVLENYAFPGGMMVGTDSHTPNAGGLGMVAIGVGGADAVDVMTGMEWELKMPKLIGVRLTGELNGWTAPKDVILKLAGILTVKGGTNAIIEYFGPGTASLSATGKATICNMGAEVGATTSLFPYDERMAVYLKATGREEVAAMADSVAADLRADDEVMARPDDFYDRVIEINLSELEPYINGPFTPDAATPISEFAEKVVTNGYPRKMEVGLIGSCTNSSYQDISRAASVARQVNEKNLGVAAPLIVNPGSEQIRATAERDGMMDVFEKMGATIMANACGPCIGQWKRHTDDPTRKNSIVTSFNRNFAKRADGNPNTFAFVASPEIVLALTIAGDLCFNPLKDRLVNHDGEKVKLSEPQGDELPSAGFVAGNQGYQAPGGEKNEIRVAPDSQRLQLLTPFPAWDGNDFLNMPLLIKAQGKCTTDHISMAGPWLRFRGHLENISDNMLMGAVNAFNGETNKVWNRLTNTYETVSGTAKQYKADGISSIVVAEENYGEGSSREHAAMEPRFLHVKVILAKSFARIHETNLKKQGMLAVTFADKADYDRIREHDLISVVGLKEFSPGRNLEVILHHEDGTEERFAVQHTYNEQQISWFRAGSALNAK

SEQ ID NO: 66988 - DNA, 2595 bp, Pseudomonas fluorescens Pf-5
  CDS (1)..(2595): transl_table=11
atgaacagtgaatttcgcaagacgctgcccggcagccaactggactatttcgacgcccgggcggcggtcgatgcgcttaagccaggcgcctacgacagcctgccctacacctcccgcgtactggcggaaaacctggtgcgccgttgtgatccggcaaccctcaacgcttccctcggccaactgatcgaacgccgcgacgacctggacttcccctggttcccggcccgcgtggtgtgccacgacattcttggccagaccgcactggtggacctggccggcctgcgcgacgccatcgccgaccagggcggtgacccggcgctggtcaacccggtggtgccgacccagttgatcgtcgaccactccctggcggtggagtgcggcggtttcgacccggacgccttcgacaagaaccgcgccatcgaagaccggcgcaacgaagaccggttccacttcatcaactggaccaagaaggccttcaagaacgtcgacgtgatcccgcccggcaacggcatcatgcaccagatcaacctggagaaaatgtccccggtgatccaggtgctcgacggtgtggcctttcctgatacctgcgtcggcaccgacagccacaccccccacgtggatgcgctgggggtgatcgccatcggcgtgggcggcctggaagccgagagtgtcatgctcggccgcgcctcgtggatgcgcctgccggacatcatcggcgtcgagctcaccggcaagctgcaaccgggcatcaccgccactgacatggtgctggcgctgaccgagttcctgcgcaagcagaaagtggtgggggcctggctggaattctttggcgaaggtgccgcggcgctgaccctgggcgaccgcgccaccatctccaacatggccccggaatacggcgccacggcggcgatgttctacatcgaccagcagaccatcgactacctcaagctcaccggccgtgaagacgagcaggtgcgcctggtagagagctacgccaggcacactgggctgtgggccgacagcctgaagagcgcacgctacgagcgcggcctgcagttcgacctgtcgtcggtggtgcgcaacatggccgggccgagcaacccgcacgcccgggtcgccaccagcgacctggcggccaagggcatcgccgggcagtggtccgaaaccccggggcagatgccggacggcgcggtgatcatcgccgccatcaccagttgcaccaacaccagcaacccgcgcaacgtgatcgccgccggcctgctggcgcgcaacgccaacaagctggggctgacccgcaagccgtgggtcaagtcgtccctggccccgggttcgaaaaccgtggccatgtacctggaagaggccggcctgggccatgagctggagcaactgggctttggcgtggtggcttttgcctgcacgacgtgcaacggcatgtccggcgccctcgacccggtgatccagaaggaaatcatcgaccgcgacctgtacgccaccgccgtgctctcgggcaaccgcaacttcgatgggcgcatccacccttacgccaagcaggcgttcctggcttcgccgccgctggtggtggcctacgccattgccggcaccatccgtttcgatatcgaaaaggacgtgctgggcctggacgccaacggccgggaaatccgcctcaaggacatctggccgagcgatgaagagatcgacgcggtggtcaaggcggcggtcaagccggagcagttccgcaaggtctacatcccgatgttcgccatccacgaagacaccggcccgaaagtcgagccgctgtatgaatggcgcccgcagagcacctacatccgccgtccgccgtactgggaaggggccctggccggtgagcgcagcctgaccgggatgcgcccgctggcggtgttgccggacaacatcaccaccgaccacctgtcgccgtccaacgccatcatggcgggtagcgcggccggcgagtacctggcgaaaatgggcctgccggaagaggacttcaactcctacgcgacccaccgtggcgaccacttgaccgctcagcgcgcgaccttcgccaacccgaagctgttcaacgaaatggtccaggaaaacggcaaggtcaagcagggctccctggcgcggatcgagccggaaggcaaagtgacgcggatgtgggaagccatcgaaacctacatgcagcgcaagcagccgctgatcatcgttgccggtgccgactacggccagggctcgtcccgcgactgggcagccaagggcgtgcgcctggcgggggtggaagccatcgtcgccgaaggcttcgagcgcatccaccgtaccaacctggtgggcatgggcgtgctgccgctggagttcctcgcgggcaccgaccgcaagaccctgggtatcgacggcactgaaacctacgacgtgatcggcgcgcgcacgcctcgggcgcaactgaccctggtgatcaaccgcaagaacggcgagcggctcgaggtgccggtgacctgccgcctcgacaccgccgaagaggtatcgatctacgaggcgggcggggtgctgcaacgcttcgcccaggacttcctggaatcggcagtagccagctaa

SEQ ID NO: 66989 - protein, 864 aa, Pseudomonas fluorescens Pf-5
MNSEFRKTLPGSQLDYFDARAAVDALKPGAYDSLPYTSRVLAENLVRRCDPATLNASLGQLIERRDDLDFPWFPARVVCHDILGQTALVDLAGLRDAIADQGGDPALVNPVVPTQLIVDHSLAVECGGFDPDAFDKNRAIEDRRNEDRFHFINWTKKAFKNVDVIPPGNGIMHQINLEKMSPVIQVLDGVAFPDTCVGTDSHTPHVDALGVIAIGVGGLEAESVMLGRASWMRLPDIIGVELTGKLQPGITATDMVLALTEFLRKQKVVGAWLEFFGEGAAALTLGDRATISNMAPEYGATAAMFYIDQQTIDYLKLTGREDEQVRLVESYARHTGLWADSLKSARYERGLQFDLSSVVRNMAGPSNPHARVATSDLAAKGIAGQWSETPGQMPDGAVIIAAITSCTNTSNPRNVIAAGLLARNANKLGLTRKPWVKSSLAPGSKTVAMYLEEAGLGHELEQLGFGVVAFACTTCNGMSGALDPVIQKEIIDRDLYATAVLSGNRNFDGRIHPYAKQAFLASPPLVVAYAIAGTIRFDIEKDVLGLDANGREIRLKDIWPSDEEIDAVVKAAVKPEQFRKVYIPMFAIHEDTGPKVEPLYEWRPQSTYIRRPPYWEGALAGERSLTGMRPLAVLPDNITTDHLSPSNAIMAGSAAGEYLAKMGLPEEDFNSYATHRGDHLTAQRATFANPKLFNEMVQENGKVKQGSLARIEPEGKVTRMWEAIETYMQRKQPLIIVAGADYGQGSSRDWAAKGVRLAGVEAIVAEGFERIHRTNLVGMGVLPLEFLAGTDRKTLGIDGTETYDVIGARTPRAQLTLVINRKNGERLEVPVTCRLDTAEEVSIYEAGGVLQRFAQDFLESAVAS

SEQ ID NO: 66990 - DNA, 2742 bp, Pseudomonas fluorescens Pf-5
  CDS (1)..(2742): transl_table=11
atgccatccctcgatagcctgaaaacccttaagaccctaaaagtcgacgacaagacttatcactatttcagcctgccggacgccgccaggagcctgggtgatatcgacaccctgcccatgtcgctgaaagtcctgctggaaaacctgttgcgctgggaggacgacaagaccgtcaccggcgccgacctcaaggccatcgcggcctggctcaaggagcgccgctccgaccgcgagatccagtaccgccccgcacgggtgctgatgcaggacttcaccggggtgccggcggtggtcgacctggccgcgatgcgcgccgccatggccaaggccggtggcgatccgcagcggatcaacccgctgtcaccggtggacctggtgatcgaccactcggtgatggtggacaagttcgccagcagcagcgccttcgagcagaacgtcgatatcgagatgcaacgcaacggcgagcgctatgccttcctgcgctggggccagagcgccttcgacaacttcagcgtggtaccgccgggcaccggcatctgccaccaggtcaacctggaatacctggggcgcacggtctggaccaaggacgaggacggccgcacctatgccttccccgacaccctggtgggcaccgactcccacaccaccatgatcaatggccttggcgtactgggctggggcgtgggcgggatcgaagccgaggcggcgatgctcggccagccggtgtcgatgctgattcccgaagtcatcggcttcaagctcaccggcaagctcaaggaaggtatcaccgccaccgacctggtgctgacggtgacccagatgctgcgcaagaagggcgtagtgggcaagttcgtcgagttctatggcgatggcctggccgacctgcccctggctgaccgcgccaccattgccaacatggccccggaatacggcgccacctgcggcttcttcccggtggatgacatcaccctggactacctgcgcctgtccgggcgccccgacgaactggtgaaactggtggaggcctacagcaaggcccagggcttgtggcgcctgccgggcaaggagccggtattcaccgacagcctggcgctggacatgggcaccgtggaggccagcctcgccggccccaaacggccgcaggaccgggttgcactgcccaacgttgcccaggctttcactgacttcctcgacctgcagttcaaacccaccagcaaggaagaaggccgcctggaaagcgaaggtggcggtggtgtggcggtgggcaacgcggacctggtgggcgaagccgactaccagtacgacggccagacctatcgcctgaaaaacggtgccgtggtgatcgcggccatcacctcctgcaccaacacctccaaccccagcgtcatgatggccgccggcctggtggcgaagaaggccgtggaaaaaggcctgcaacgcaaaccctgggtcaagagctcgctagccccaggctccaaggtggtgaccgactactacaaggctgccggcctgacgccctacctggaccaactgggcttcgatctggtgggctacggctgcaccacctgcatcggcaactccggcccgctgcaggagccgatcgagaaagccatccagcaggccgacctcagcgtggcctcggtgctgtcgggcaaccgcaacttcgagggccgggtgcatccactggtgaaaaccaactggctggcctcgccgcccctggtcgtggcctatgccctggcgggcacggtgcgcatcgacatcagcagcgagcctctgggccagggcaaggacggccagccggtgtacctgcgggacatctggcccagcagcaaggagatcgccgacgccgtggcccaggtcaacactcggatgttccacaaggagtacgccgaagtgttcgccggggatgcacagtggcaagccatcgaagtgccgcaggccgccacctatgtgtggcaggacgactccacctatatccagcacccgccgttcttcgatgacatcgccggcccgctgccgcagatcaccgatgtcagcggcgcccgggtactggccctgctgggggactcggtgaccaccgaccacatctccccggccggcaacatcaaggccgacagcccggctggccgctacctgcgggacaagggcgtggaaccgcgggacttcaactcttacggctcacggcgcggcaaccacgaagtgatgatgcgcggtaccttcgccaacatccgcattcgcaacgaaatgctcggcggcgaggaaggtggcaacaccttgtacattcccaccggcgagaagttggcgatctatgacgcagccatgcgctaccaggccgacggcacgccgctggtagtgatcgccggccaggaatacggcaccggttcgagccgcgactgggcggccaaaggcaccaacctgctgggggtcaaggcggtgatcgccgaaagcttcgagcgtatccaccgctccaacctggtgggcatgggcgtcctgcccttgcagttcaagctggaccagaaccgcaagagcctgaagctgaccggcaaggaaaccctggacattctcggcctcagcggtacggaactgacgccgcggatgaacctgaccctggtgatcacccgtgaggatggcagccaggagaagatcgaggtgctgtgccgcatcgacaccttgaatgaagtggaatacttcaagtccggcgggatcctgcactacgttctgcggcaactgattgcctcctga

SEQ ID NO: 66991 - protein, 913 aa, Pseudomonas fluorescens Pf-5
MPSLDSLKTLKTLKVDDKTYHYFSLPDAARSLGDIDTLPMSLKVLLENLLRWEDDKTVTGADLKAIAAWLKERRSDREIQYRPARVLMQDFTGVPAVVDLAAMRAAMAKAGGDPQRINPLSPVDLVIDHSVMVDKFASSSAFEQNVDIEMQRNGERYAFLRWGQSAFDNFSVVPPGTGICHQVNLEYLGRTVWTKDEDGRTYAFPDTLVGTDSHTTMINGLGVLGWGVGGIEAEAAMLGQPVSMLIPEVIGFKLTGKLKEGITATDLVLTVTQMLRKKGVVGKFVEFYGDGLADLPLADRATIANMAPEYGATCGFFPVDDITLDYLRLSGRPDELVKLVEAYSKAQGLWRLPGKEPVFTDSLALDMGTVEASLAGPKRPQDRVALPNVAQAFTDFLDLQFKPTSKEEGRLESEGGGGVAVGNADLVGEADYQYDGQTYRLKNGAVVIAAITSCTNTSNPSVMMAAGLVAKKAVEKGLQRKPWVKSSLAPGSKVVTDYYKAAGLTPYLDQLGFDLVGYGCTTCIGNSGPLQEPIEKAIQQADLSVASVLSGNRNFEGRVHPLVKTNWLASPPLVVAYALAGTVRIDISSEPLGQGKDGQPVYLRDIWPSSKEIADAVAQVNTRMFHKEYAEVFAGDAQWQAIEVPQAATYVWQDDSTYIQHPPFFDDIAGPLPQITDVSGARVLALLGDSVTTDHISPAGNIKADSPAGRYLRDKGVEPRDFNSYGSRRGNHEVMMRGTFANIRIRNEMLGGEEGGNTLYIPTGEKLAIYDAAMRYQADGTPLVVIAGQEYGTGSSRDWAAKGTNLLGVKAVIAESFERIHRSNLVGMGVLPLQFKLDQNRKSLKLTGKETLDILGLSGTELTPRMNLTLVITREDGSQEKIEVLCRIDTLNEVEYFKSGGILHYVLRQLIAS

SEQ ID NO: 66992 - DNA, 2607 bp, Colwellia psychrerythraea 34H
  CDS (1)..(2607): transl_table=11
atgaattatgattaccgcaaaccgcttcctggtgcgaatatagatttttttgatacgcgtgaagcagttgaagccattactcctggtagctacgccaaactaccttatacctctcgtgttttagctgagcaattagtccgtaaatgtgatccagcggcacttaccgattctttaaaacaacttattgacgttaagcaagagcttgattttccatggtatcctgcacgtgttgtttgtcacgatatcttaggtcaaacagctttagttgatcttgccggtcttcgtgatgcaatcgctgatcaaggtggtgatccgtctaaagttaaccctgttgtgccaacacagttaattgttgatcactctcttgcagtggaagcgccgggttttgaccctgacgcgtttgagaaaaaccgttcgattgaagatcgtcgtaacaaagaccgctttaaatttattgagtggagcaaaacagcgtttaaaaatgttgatgtaattcctgctggtaacggcattatgcaccaaatcaacttagagaaaatgtcgcctgttattcaagcacgtgatggtgttgctttccctgatacttgtgtcggtaccgattcacatacaccacacgttgacgctttaggtgttatcgcgattggtgttggtggtttagaagctgaaacagtaatgctaggtcgcccatcaatgatgcgcttacctgatattattggtgttaagttaacgggtaaacgtgcgccaggtatcacagcaaccgatatggtgcttgcgatcactgaatttttacgtaaccaaaaagttgtttcaagctacttagagtttttcggtgaagggactaaagatttaaccattggtgaccgtgcaactatctcaaatatgacaccagaatacggtgcatctgcaggtatgttctacatcgatcaacaaacgattgattacttgaagcttactggccgcgagccagagcaagttaaattagttgaaacatacgcaaaacacactggtttatgggctgacgatttagttgatgcacaatatccacgtgttattgaatttgatttatcaacggtatgtcgtaacttagcgggtccatctaacccacatcgtcgtttagcgacagctgatcttgtatcaaaagatatcgctaaaaatctagatgcttgtaaagcacaagaagctgaagggttaatgcctgacggtgcagtaattattgcagcaatcacttcttgtactaatacttctaacccacgtaacgttgttgctgctggtttagttgcaaaacgtgcgaacgagttaggtttagtacgtaaaccttgggttaaatcatcattcgcaccgggttcaaaagtagcaaaactttacctagaagaagctggtttattatctgaaatggaaaaactaggttttggtattgttggttacgcatgtactacttgtaacggtatgtcaggtgccttagatccgaaaatccaagaagaaataatcgaccgtgatttatactcaacagcagtattatcaggtaaccgtaactttgatggtcgtattcatcctcacgccaaacaagctttcttagcgtcgccaccattagttgttgcttatgcgcttgctggtaccatgcgttttgatattgaaaaagatgtacttggtcaagaccaaaatggtaatgacattactttgaaagatatctggccatcagatgaagagattgattcaattgttgcatcatgtgttaaacctgagcaattcaaaaaaatctacacgccaatgtttgatttaggcgcttttgagcctgctgaaagtccattatacgactgggatcttaccagtacttatattcgtcgtcctccttattgggaaggtgccttagcgggtgaacgtacaatgaagggtatgcgacctttagcggtacttggtgacaacatcacaacggatcatttatcaccgtctaatgctattcagttaaacagtgcttcaggtgcttaccttgataaaatgggcgttccacacgaagactttaactcatacgcaacgcatcgtggtgatcatgaaacaacacaacgtgcaacattcgctaacccgaaattgttcaatgaaatgtgtcgtgatgataaaggcgaagttaagcaaggttcacttgcacgtattgagcctgaaggtactgaatctcgcatgtgggaagcgatcgaaacttacatggaacgcaaacagccattaatcattatcgctggtgctgattacggtcaaggttcatcacgtgactgggcagcaaaaggtgttcgtttagcgggtgttgaagttatcgtttcagaaggctttgagcgtattcaccgtactaacttgattggtatgggcgtgttaccactcgaatttaccaagggtgacacacgtaatacttatagcattgatggtactgaaacttatgatgttgaaggtactaccgctccaggtggtgctatgactgtgattatgacgcgtacaaatggcgaaataattaaaattccagtgaaatgtcgtttagatacagccgaagaagttaccgtgtacaacggcggcggggtgttacaaaagttcgccaccgattttcttcaatcaaatgctagctaa

SEQ ID NO: 66993 - protein, 868 aa, Colwellia psychrerythraea 34H
MNYDYRKPLPGANIDFFDTREAVEAITPGSYAKLPYTSRVLAEQLVRKCDPAALTDSLKQLIDVKQELDFPWYPARVVCHDILGQTALVDLAGLRDAIADQGGDPSKVNPVVPTQLIVDHSLAVEAPGFDPDAFEKNRSIEDRRNKDRFKFIEWSKTAFKNVDVIPAGNGIMHQINLEKMSPVIQARDGVAFPDTCVGTDSHTPHVDALGVIAIGVGGLEAETVMLGRPSMMRLPDIIGVKLTGKRAPGITATDMVLAITEFLRNQKVVSSYLEFFGEGTKDLTIGDRATISNMTPEYGASAGMFYIDQQTIDYLKLTGREPEQVKLVETYAKHTGLWADDLVDAQYPRVIEFDLSTVCRNLAGPSNPHRRLATADLVSKDIAKNLDACKAQEAEGLMPDGAVIIAAITSCTNTSNPRNVVAAGLVAKRANELGLVRKPWVKSSFAPGSKVAKLYLEEAGLLSEMEKLGFGIVGYACTTCNGMSGALDPKIQEEIIDRDLYSTAVLSGNRNFDGRIHPHAKQAFLASPPLVVAYALAGTMRFDIEKDVLGQDQNGNDITLKDIWPSDEEIDSIVASCVKPEQFKKIYTPMFDLGAFEPAESPLYDWDLTSTYIRRPPYWEGALAGERTMKGMRPLAVLGDNITTDHLSPSNAIQLNSASGAYLDKMGVPHEDFNSYATHRGDHETTQRATFANPKLFNEMCRDDKGEVKQGSLARIEPEGTESRMWEAIETYMERKQPLIIIAGADYGQGSSRDWAAKGVRLAGVEVIVSEGFERIHRTNLIGMGVLPLEFTKGDTRNTYSIDGTETYDVEGTTAPGGAMTVIMTRTNGEIIKIPVKCRLDTAEEVTVYNGGGVLQKFATDFLQSNAS

SEQ ID NO: 66994 - DNA, 2751 bp, Thermobifida fusca YX
  CDS (1)..(2751): transl_table=11
gtgtcggcgaacagcttcggcagccgcgacacgctccgtgtcggtgacgagtcgtacgaaatcttccgcttggatgccatcgacggcgtccagcggcttccctacagcctgaaggtgctgctggagaacctgctgcgcaccgaggacggcgtgaacgtcaccgccgaccatattcgcgcgctggccaactgggactccaaggcgcagcccagccaggagatccagttcagtcctgcccgcgtgatcatgcaggacttcaccggcgtgccctgcgtggtcgacctggccaccatgcgtgaggcagtccgggacctgggcggcgaccccaccaagatcaacccgctggcccctgccgagctggtcatcgaccactcggtgatcgtcgacgtgttcgggcgccccgacgccttcgaacgcaacgtcgaaatggagtacgagcgcaaccgcgagcgctaccagttcctgcgctggggccagaacgcctttgaagggttcaaggtcgtcccgccgggcaccggcatcgtgcaccaggccaacatcgagcacctggcccgggtcaccatggtccgcaacggccaggcctaccccgacacctgtgtgggcaccgactcccacaccaccatgcagaacggcctgggcatcctgggctggggcgtgggcggtatcgaggccgaggcagccatgctcggccagccgatctccatgctcatcccgcgggtcgtcggcttcaagctcaccggtgagctgccccccggcaccaccgccaccgacctcgtgctcaccatcaccgagatgctgcgggagcacggcgtcgtcggcaagttcgtcgagttctacggcgagggcgtggcctcggtgccgctggccaaccgcgccaccatcggcaacatgagcccggagttcggctcgactgccgcgatgttccccatcgacgacgagacgatccgctacctgaagctgaccggccgcagcgacgagcagaccgccctcgtcgaggcctacaccaaggaacaggggctgtggcacgacccgtcggtggagcccgagtactccgagtacctggagctcgacctctccgaggtggtgccgtcgatcgccggacccaagcgcccgcacgaccgcatcgccctgtccgacgccaagacggcctggcgccgggacgtgcgcgaccacgtcaacaacgacggcatcgtcacccgcgcggacgaggcgtccgccgagtccttcccggcctctgacgcgccggcgatctccagcaacggcgtggtgaccgagcgtccgcgcaagccggtcaaggtcaccctgggggacggcaccgaattcaccatcgaccacgggtccgtggtcatcgcggccatcacctcctgcaccaacacctccaacccgtcggtcatgctgggcgcggccctgctggccaagaaggcggtggagaaggggctgtcccgcaagccgtgggtgaagacctcgctggcccccgggtccaaggtcgtcaccgactactacgagcgttccggcctgaccccgtacctggacaagctgggcttcaacctcgtcggctacggctgcaccacctgcattggcaactccggtccgctgccggaggagatctccaaggcgatcaacgacaacgacctcgcggtcgccgcggtgctgtccggtaaccgcaacttcgaaggccgcatcaaccccgatgtcaagatgaactacctggcctccccgccgctggtggtggcctacgcgctggccgggacgatggacatcgacttcgacaccgagccgctgggcaccgacaccgacggcaacccggtctacctgcgcgacatctggccttcgccggaggagatccaggaggtcatcgactccgcgatcgccgcggagatgtaccagcgggcctactctgacgtgttcgccggcgacgagcggtggcgctcgctgcccactcccaccggggacacgttctcctgggacccgaactccacctacgtgcgcaagccgccctacttcgacggcatgccgctggagcccgaaccggtcagcgacattgtcggcgcccgcgtgctggccaagctcggcgactccgtcaccaccgaccacatttcgcccgccggcgccatcaagccgggcaccccggccgctgaatacctcatggccaacggggtggagcgcaaggacttcaactcctacgggtcgcgtcgcggcaaccacgaggtgatgatccgcggcaccttcgccaacatccggctgcgcaaccagatcgcaccgggcaccgaaggcggctacacgcgcgacttcacccaggaaggtggtcccgtcaccttcatctacgacgccgcgcagaactacgctgcccagaacatcccgctggtggtgctgggcggcaaggagtacggctccggttcttcgcgcgactgggcggccaaggggacccgcctgctgggcgtgcgcgccgtcatcgccgagtctttcgagcgcatccaccgctcgaacctgatcggcatgggcgtgctgccgctgcagttccccgaaggccagtccgcggactctctcggcctgaccggtgaggagaccttctcgatcaccggcgtgaccgagctgaacgagggccgcatccccgagacggtcaaagtcaccacggacaccggggtcgagttcgacgctgtggtgcggatcgacaccccgggtgaggccgactactaccgccacggcggcatcctgcagtacgtgctgcgccagttgatcaacaagaagtag

SEQ ID NO: 66995 - protein, 916 aa, Thermobifida fusca YX
MSANSFGSRDTLRVGDESYEIFRLDAIDGVQRLPYSLKVLLENLLRTEDGVNVTADHIRALANWDSKAQPSQEIQFSPARVIMQDFTGVPCVVDLATMREAVRDLGGDPTKINPLAPAELVIDHSVIVDVFGRPDAFERNVEMEYERNRERYQFLRWGQNAFEGFKVVPPGTGIVHQANIEHLARVTMVRNGQAYPDTCVGTDSHTTMQNGLGILGWGVGGIEAEAAMLGQPISMLIPRVVGFKLTGELPPGTTATDLVLTITEMLREHGVVGKFVEFYGEGVASVPLANRATIGNMSPEFGSTAAMFPIDDETIRYLKLTGRSDEQTALVEAYTKEQGLWHDPSVEPEYSEYLELDLSEVVPSIAGPKRPHDRIALSDAKTAWRRDVRDHVNNDGIVTRADEASAESFPASDAPAISSNGVVTERPRKPVKVTLGDGTEFTIDHGSVVIAAITSCTNTSNPSVMLGAALLAKKAVEKGLSRKPWVKTSLAPGSKVVTDYYERSGLTPYLDKLGFNLVGYGCTTCIGNSGPLPEEISKAINDNDLAVAAVLSGNRNFEGRINPDVKMNYLASPPLVVAYALAGTMDIDFDTEPLGTDTDGNPVYLRDIWPSPEEIQEVIDSAIAAEMYQRAYSDVFAGDERWRSLPTPTGDTFSWDPNSTYVRKPPYFDGMPLEPEPVSDIVGARVLAKLGDSVTTDHISPAGAIKPGTPAAEYLMANGVERKDFNSYGSRRGNHEVMIRGTFANIRLRNQIAPGTEGGYTRDFTQEGGPVTFIYDAAQNYAAQNIPLVVLGGKEYGSGSSRDWAAKGTRLLGVRAVIAESFERIHRSNLIGMGVLPLQFPEGQSADSLGLTGEETFSITGVTELNEGRIPETVKVTTDTGVEFDAVVRIDTPGEADYYRHGGILQYVLRQLINKK

SEQ ID NO: 66996 - DNA, 2646 bp, Ralstonia eutropha JMP134
  CDS (1)..(2646): transl_table=11
ttggctcctgcattacccagaattccccacgccatgaacactgcacaccgcaaaccactgccgggcaccaagctggatttctttgacgcgcgcgaagccgtcgaggcaatccagccgggtgcctatgacaagctgccctacacgtcgcgcgtgctggccgagaatctcgtgcgccgctgcgacccggccacgctgaccgattcgctcaagcagctgatcgagcgcaagcgcgaactggatttcccgtggttccccgcgcgcgtggtatgccatgacatccttggccagaccgcgctggtggacctggccggcctgcgcgacgccatcgccgaccagggcggcgaccccgccaaggtcaacccggtggtgccggtgcaactgatcgtcgaccactcgctggccgtcgaatgtggcggtttcgacccggatgcgttcgccaagaaccgcgccatcgaggatcgccgcaacgaggaccgcttcgacttcatcaactggaccaagaaggccttccagaacgtcgacgtgatcccgccgggcaacggcatcatgcaccagatcaacctggagaagatgtcgcccgtgatccacgcggacaagggcgtggcctaccccgacacctgcgtgggcaccgacagccacacgccgcacgtcgacgcgctgggcgtgatcgccatcggcgtgggcggcctggaagccgagaacgtcatgctgggccgcgcctcgtggatgcgcctgcctgacatcgtcggcgtcgagctgaccggcaagcgccagcctggcatcaccgccaccgacatcgtgctggccctgaccgagttcctgcgcaaggaaaaagtcgtcggcgcatacctggaattccgcggcgaaggtgcctcgagcctgacgctcggggaccgcgccacgatctcgaacatggcaccggagtacggcgctacggctgcgatgttcttcatcgacaaccagacgctggactacctgcgcctgaccggccgcgaagacgagcaggtcaagctggtcgagacgtatgcgaagaccgccggcctgtgggccgacacgctgaacaacgccgagtacgagcgcgtgctgaagttcgacctgtcgagcgtcgtgcgcaacatggccggcccgtcgaaccctcacaagcgcctgccgacttcggcactggccgagcgcggtatcgccgtggacctcgacaaggccaaggcgcaggaagccgaaggtctgatgcccgatggcgccgtgatcatcgccgccatcaccagctgcaccaacaccagcaacccgcgcaacgtgattgccgccgcgctgctcgcgcgcaatgccaatgcgcgtggcctgacccgcaagccgtgggtcaagtcatcgctcgcgccgggatcgaaggcggtcgagctgtacctggaagagtcgaagctgctgccggacctggaagcactgggctttggcatcgtcgcgttcgcctgcacgacctgcaacggcatgtcgggcgcgctggatccgaagatccagcaggaaatcatcgaccgcgacctgtacgcgacggctgtgctgtcgggcaaccgcaatttcgacggccgcattcacccgtacgccaagcaagccttcctggcttcgccgccgctggtggtggcctacgccatcgccggcacgatgcgcttcgacatcgagcgcgacgtgctgggcaccgacaaggaaggcaagccggtgtacctgaaggacatctggccgaccgacgaagagatcgacgcgatcgtcgccaagtcggtgaagcccgagcagttccgcaaggtctacgagccgatgttcgcgatcaccgcgcaaagcggcgagcccatcagcccgctgtacgactggcgcgcgcagagcacgtacatccgccgcccgccgtactgggaaggcgccctggccggcgaacgcacgctgaagggcctgcgtccgctggcagtgctcggcgacaacatcaccaccgaccacctgtcgccgtcgaacgcgatcctcgccaacagcgccgcgggtgagtacctggctaagatgggcctgccggaggaggacttcaactcttacgcaacccaccgcggcgaccacctgaccgcgcaacgcgcaacgttcgccaacccgacgctgatcaacgaaatggccgtggtcgacggccaggtcaagaagggttcgctggcacgcgtcgagcccgaaggcaaggtcgtgcgcatgtgggaagccatcgagacctacatggaccgcaagcagccgctgatcatcgtggcgggtgccgactacggccagggctcgtcgcgtgactgggcggccaagggcgtgcgtctggcgggcgtggaagtgatcgtggccgaaggcttcgagcgcatccaccgcaccaacctgatcggcatgggcgtactgccgctcgagttcaagccgggcgtgaaccgcctgacgctgggcctcgacggcaccgaaacctacgacgtgacgggcgagcgccagccgcgtgcggacctcacgctggtgatccaccgccgcaatggcgagcgcatcgaagtgcccgtgacgtgccgcctggacagcgacgaggaagtgtcgatctacgaagccggcggcgtgctgcagcgcttcgcgcaggacttccttgaatccgcgaaagcggctgcttaa

SEQ ID NO: 66997 - protein, 881 aa, Ralstonia eutropha JMP134
MAPALPRIPHAMNTAHRKPLPGTKLDFFDAREAVEAIQPGAYDKLPYTSRVLAENLVRRCDPATLTDSLKQLIERKRELDFPWFPARVVCHDILGQTALVDLAGLRDAIADQGGDPAKVNPVVPVQLIVDHSLAVECGGFDPDAFAKNRAIEDRRNEDRFDFINWTKKAFQNVDVIPPGNGIMHQINLEKMSPVIHADKGVAYPDTCVGTDSHTPHVDALGVIAIGVGGLEAENVMLGRASWMRLPDIVGVELTGKRQPGITATDIVLALTEFLRKEKVVGAYLEFRGEGASSLTLGDRATISNMAPEYGATAAMFFIDNQTLDYLRLTGREDEQVKLVETYAKTAGLWADTLNNAEYERVLKFDLSSVVRNMAGPSNPHKRLPTSALAERGIAVDLDKAKAQEAEGLMPDGAVIIAAITSCTNTSNPRNVIAAALLARNANARGLTRKPWVKSSLAPGSKAVELYLEESKLLPDLEALGFGIVAFACTTCNGMSGALDPKIQQEIIDRDLYATAVLSGNRNFDGRIHPYAKQAFLASPPLVVAYAIAGTMRFDIERDVLGTDKEGKPVYLKDIWPTDEEIDAIVAKSVKPEQFRKVYEPMFAITAQSGEPISPLYDWRAQSTYIRRPPYWEGALAGERTLKGLRPLAVLGDNITTDHLSPSNAILANSAAGEYLAKMGLPEEDFNSYATHRGDHLTAQRATFANPTLINEMAVVDGQVKKGSLARVEPEGKVVRMWEAIETYMDRKQPLIIVAGADYGQGSSRDWAAKGVRLAGVEVIVAEGFERIHRTNLIGMGVLPLEFKPGVNRLTLGLDGTETYDVTGERQPRADLTLVIHRRNGERIEVPVTCRLDSDEEVSIYEAGGVLQRFAQDFLESAKAAA

SEQ ID NO: 66998 - DNA, 2706 bp, Ralstonia eutropha JMP134
  CDS (1)..(2706): transl_table=11
atgccctacaacctcaataagacgctaaaagaattcaagatcggctcttcaggcaacggccagttctattccctcccccaactgggcgaggaactgaacgtggcgatcgaacgcctgccggtgtcgatccgcgtggtgctcgaatcggtgctgcgcaattgcgacggcaagaaggtcaccgaggaacatgtccgccagcttgccaactggaagccgaacgcggaacgcgtcgacgagattccgttcgtggtggcgcgtgtcgtgctgcaggactttaccggcgtgccgctgctggccgacctcgccgccatgcgtaacgtggccgagaagatgggcaagaaccccaagcagatcgagccgctggtgccagtggacctggtcgtcgatcactcggtccaggtcgaccacttccgcgaaaagaaggcgctcgacctgaacatgcaactggaattccagcgcaacaacgagcgataccagttcatgaagtggggcatgcaggcgtttgacacctttggcgtggtgcagccgggcttcggcatcgtgcaccaggtcaatctcgaatatctcgcgcgcggcgtccataagaaggacggcgtgtactaccccgacaccctggtcggcaccgatagccacaccaccatgatcaacggcatcggcgtggtgggctggggcgttggcggcattgaagcggaagccggcatgctgggccagccggtgtacttcctgacgccggacgtggtgggcgtggaactgaccggccgcctgcgcgagggcgtgactgcgaccgacctcgtgctgaccatcaccgagatgctgcgcaaggaaaaggtcgtcggcaagttcgtcgagttcttcggcgaaggcacggccagcctggcgctgccggaccgcgccacgatcggcaacatggcgcccgagtacggcgccaccatgggcttcttcccggtggacgagaagaccatcgattacttcaagggcaccggccgcacggaagaggaaatcgccgcgttcgaaggctatttccgagcgcaaaacatgttcggtatccccaagtccggcgagatcgactacagcaatgtggtcaagctggacctcggcaccgtcgcgccgtcgctggcaggcccgaagcgtccgcaggaccgcatcgagatcggcaacgtcaagagcacgttcagctcgctgttcagcaagcccgtggccgagaacggcttcaacaaggagccggccgaactcgatcgcacctaccagaccacggacggcatcgacgtcaagaacggcgacgtgctgatcgccgccatcacgtcctgcaccaacacgtccaatccgagcgtgctgcttggcgccggcttgctggccaagaaggccgtggaagccgggctgacggtggcgccgcacatcaagacgtcgctggcgcccggaagccgcgtggtgaccgagtacctgacggccgccggcctgctgccgtacctcgaaaagcttggcttcggcgtgaccgcctacggctgcaccacgtgcatcggcaacgcgggcgacctgacgccggaactgaacgaggccatcgtcacgaacgacctggtcgcggccgccgtgctgtcgggcaaccgcaatttcgaggcccgcatccatccgaatatccgtgccaacttcctggcttcgccgccgctggtggtggcctacgccatcgcaggcaatgtcacgcgcgacctgatgaccgagccggtcggcaagggcaagggcggcaaggacatctggctcggcgacatctggccgagctcggaggaaatccacgcgctgatgaagttcgcgatggacgccaagacgttcaagggcaactacgagcaggtcaagaagccgagcaagctgtggggcgcgatcaagggcaccaagggccaggtctacgactggcccgcgtcgacctacatcgccgagccgccgttcttccaggacttcagcatggagccgtccggcgccactgcgagcgtgcgcggcgcacgcgcgctcggcgtcttcggcgattccgtgacgaccgaccacatctccccggccggttcgatcaaggacacctcccctgccggcaagtacctgctgtcgcatggcgtgctcaaggcggacttcaacagctacggttcgcgccgcggcaaccatgaggtgatgatgcgcggcacgttcgccaacgtgcgcatcaagaacctgatgatcccgcccaaggccgacggctcgcgcgtcgaaggcggcctgacgatccaccagccgaccggcgaggaaatgtcgatctacgacgccgccatgaagtacatcgccgaaggcacgccgacgatggtgttcggcggcgaggaatacggcaccggctcgtcgcgcgactgggcggccaagggtacgcagctgctgggcgtgaaggccgtgatcgcgcgcagcttcgagcgcatccaccgttccaacctggtcggcatgggcgtgctgccgctgcagttcaagggcaccgacagcgcgcagacgctgggcatcacgggcaacgagaccttcgacatcgagggcatcgagggggatctcaggccgcagcaggacctggtgctggtgatcaaccgtgccaatggcgacgtgcagcgcgtgccggtgctgctgcgcatcgacacgccgatcgaagtcgattactacaaccacggcggcatcctgccgttcgtgctgcgccagctgctggccgcctga

SEQ ID NO: 66999 - protein, 901 aa, Ralstonia eutropha JMP134
MPYNLNKTLKEFKIGSSGNGQFYSLPQLGEELNVAIERLPVSIRVVLESVLRNCDGKKVTEEHVRQLANWKPNAERVDEIPFVVARVVLQDFTGVPLLADLAAMRNVAEKMGKNPKQIEPLVPVDLVVDHSVQVDHFREKKALDLNMQLEFQRNNERYQFMKWGMQAFDTFGVVQPGFGIVHQVNLEYLARGVHKKDGVYYPDTLVGTDSHTTMINGIGVVGWGVGGIEAEAGMLGQPVYFLTPDVVGVELTGRLREGVTATDLVLTITEMLRKEKVVGKFVEFFGEGTASLALPDRATIGNMAPEYGATMGFFPVDEKTIDYFKGTGRTEEEIAAFEGYFRAQNMFGIPKSGEIDYSNVVKLDLGTVAPSLAGPKRPQDRIEIGNVKSTFSSLFSKPVAENGFNKEPAELDRTYQTTDGIDVKNGDVLIAAITSCTNTSNPSVLLGAGLLAKKAVEAGLTVAPHIKTSLAPGSRVVTEYLTAAGLLPYLEKLGFGVTAYGCTTCIGNAGDLTPELNEAIVTNDLVAAAVLSGNRNFEARIHPNIRANFLASPPLVVAYAIAGNVTRDLMTEPVGKGKGGKDIWLGDIWPSSEEIHALMKFAMDAKTFKGNYEQVKKPSKLWGAIKGTKGQVYDWPASTYIAEPPFFQDFSMEPSGATASVRGARALGVFGDSVTTDHISPAGSIKDTSPAGKYLLSHGVLKADFNSYGSRRGNHEVMMRGTFANVRIKNLMIPPKADGSRVEGGLTIHQPTGEEMSIYDAAMKYIAEGTPTMVFGGEEYGTGSSRDWAAKGTQLLGVKAVIARSFERIHRSNLVGMGVLPLQFKGTDSAQTLGITGNETFDIEGIEGDLRPQQDLVLVINRANGDVQRVPVLLRIDTPIEVDYYNHGGILPFVLRQLLAA

SEQ ID NO: 67000 - DNA, 2652 bp, Ehrlichia canis str. Jake
  CDS (1)..(2652): transl_table=11
gtggaattgttaaattctcttgattcgaagaaaaagttaattacaggaaaaagttattatgaatattttagcttaaaagctgcatgtagtaagttaggtgttgatattgctaagttgccatattcactaaaagtgttgtttgaaaatttgctgcgtaatgaaaatggtcatagtgttaggcttgaagacataaaaaaattagctcaatgtgttaatgaacatgtaaaatacgaaataaatttttctcctgctcgtgttttaatgcaagattttactggtgtacctgcagtggtcgatttagctgcaatgcgtgattatgttagagagaatggtgaaaatcctagtattattaatcctaaagtaccagttgatttaattattgatcattcaatacaagttgatttttatggggaagaagatgcatttaataaaaatgtatctgtagaaatacagagaaatttagaaagatataagtttttaaaatggggacaacatgcttttaaaaattttcgtgttgtacctcctggagctggtatatgtcatcaggttaatttagagcatattgctaaagttgtatggagtgaaggagatttagtatatccagatacattagttggtactgatagtcacactactatgattaatggtttgtctgtgttaggatggggcgtaggtggcatagaagctgaagcagtcatgttgggtcagcctattactatgcttattcctcaggttataggctttaaattaacaggaaagttgtcggaaggtgttactgcaacggatatggtgttgactattactagtatcttgagaagtaaaggtgttgtagggaagtttgttgaattctatggagatggattaagtggtttatctattgctgatagatcgactgttgctaatatgtctcctgaatatggtgctacatgtgggttcttccctatagatcataagactttagaatatttagagataacaggacgtgatatatcgctaatagatttggtagaatcttatgctaaggaacaatgtttgtggcatactaaagaagaaccacgttatgatgatagaatagagcttgatttagcaagtgtacaacctgtaattgcgggtccaaagagacctcaggataaaatttttctttctgatgtcaaagcaacagtacagaatttattacaaagttcaaaatctacagtaattgatccggaaagtcagtctttacgtaatggtgatgttgtgattgctgcaataactagctgtactaatacgtctaatccaagtgttatgattgctgctggacttgttgcgcgtaaagcgaatatgttgaatctgaaagctaaaccatgggttaaaacttcattagctccaggttcacaagttgttacagaatatctagtaaaatctggtttacaaaaagatttagatgctttaggattccatttggttggatatggatgtactacttgcataggaaattctggtccattgagttctaaaattgaagaagatatcaaaaggaacgatttaatagtagcgtctgttttatctggtaaccgtaattttgaaggaagaatacatccttgtattagagctaattttttggcttctcctcctcttgttgtagcttatgctttggctgggactgttgatattaatcttaacgcagacccaatagctgtagatgatgatggcaaacatgtgtatttacatgatatatggccgtctaatgatgaaataaatgaggtcatcagcaaagctattgataaacaaatgtttgttgataaatataaagatgtttttagtgggggaaaatattgggaagatttaaaatgtgctaatggtgacatttatctgtgggatacaagtagtacttatatacaaagtcctacatattttaagaatttatctattgctgtggatgatgcaagcaataatattaatattagtaatgcgagaatcttagctttactaggtgatagtgttactactgatcacatttctccagctggtaatattgctgcaaatagtcctgctggtatgttcctaatgcaaaataatgttgtagtacaagattttaattcatatggttcacggagggggaatcatcatgtgatgactcgtgggacatttgctaatattcgtgtacgtaacgaaatggtgaattgtgaaggcgggtttactaaatatgtacctactggtgaaaagatgtcaatatttgatgcatcgcagctttatcaacagaataacgtaccattggttgttattgcaggaaaggagtatggtagtggatcaagtagagattgggcagctaaaggcactttctttttaaatattaaagctataatagctgaaagttttgaacgtatacacaggtctaatcttattggaatgggtgtattaccattaacgtttaaggaaggtgatacaagaaaaactttacaattaacaggggatgaaggaattagcattgttggtgaaattggtatcaataaagaagtagaatgtattatttttagaaaagatggtgttagtcaaaatatcaaattgatttgtaacctcaatactgctattgaagttgattattttaaaagtggtggtgttttacagtatgtgttagtaagaatgatgcgttctaacttatcaaaagaataa

SEQ ID NO: 67001 - protein, 883 aa, Ehrlichia canis str. Jake
MELLNSLDSKKKLITGKSYYEYFSLKAACSKLGVDIAKLPYSLKVLFENLLRNENGHSVRLEDIKKLAQCVNEHVKYEINFSPARVLMQDFTGVPAVVDLAAMRDYVRENGENPSIINPKVPVDLIIDHSIQVDFYGEEDAFNKNVSVEIQRNLERYKFLKWGQHAFKNFRVVPPGAGICHQVNLEHIAKVVWSEGDLVYPDTLVGTDSHTTMINGLSVLGWGVGGIEAEAVMLGQPITMLIPQVIGFKLTGKLSEGVTATDMVLTITSILRSKGVVGKFVEFYGDGLSGLSIADRSTVANMSPEYGATCGFFPIDHKTLEYLEITGRDISLIDLVESYAKEQCLWHTKEEPRYDDRIELDLASVQPVIAGPKRPQDKIFLSDVKATVQNLLQSSKSTVIDPESQSLRNGDVVIAAITSCTNTSNPSVMIAAGLVARKANMLNLKAKPWVKTSLAPGSQVVTEYLVKSGLQKDLDALGFHLVGYGCTTCIGNSGPLSSKIEEDIKRNDLIVASVLSGNRNFEGRIHPCIRANFLASPPLVVAYALAGTVDINLNADPIAVDDDGKHVYLHDIWPSNDEINEVISKAIDKQMFVDKYKDVFSGGKYWEDLKCANGDIYLWDTSSTYIQSPTYFKNLSIAVDDASNNINISNARILALLGDSVTTDHISPAGNIAANSPAGMFLMQNNVVVQDFNSYGSRRGNHHVMTRGTFANIRVRNEMVNCEGGFTKYVPTGEKMSIFDASQLYQQNNVPLVVIAGKEYGSGSSRDWAAKGTFFLNIKAIIAESFERIHRSNLIGMGVLPLTFKEGDTRKTLQLTGDEGISIVGEIGINKEVECIIFRKDGVSQNIKLICNLNTAIEVDYFKSGGVLQYVLVRMMRSNLSKE

SEQ ID NO: 67002 - DNA, 2805 bp, Methanosarcina barkeri str. Fusaro
  CDS (1)..(2805): transl_table=11
atgagagaaggtccggacccatttggggtcagagacacaattgaaacagctgccggaaaagctacgatttacagtctgggtaaactggaagaaaagggctatgagggaatttccctgcttccttactccataaggatcctgctggaatctctgctcaggcatgcagatactgaaaagcatataataactgctgaggatgtggaggctcttgctcgctggagcccggaaaatataagtgacagggatattccgttcattccatcaagggtgatcatgcaggactttacaggcgttccggctgtagtagacctggcagccctccgctcggcaatgcagcgccttggaggcgatcccgcaaaaataaatcctgttatccctgccgatcttgttattgaccactcggtccaggtggattcttatggcacggcatacgctctcgaggaaaacgagaaaaaggagtttgaacgcaacacggaacgctattctgtcctgcgctgggcccagaaagcctttgacaattttagagttgtgcctccaggaaggggcattatccatcaggtgaaccttgagtatctggccccgcttgtgcatcttaaagagaaagatggggagttatttgcatttcctgatactcttgtagggacagactcccatactacaatgattaacggaattggagtactcggctggggagtaggaggcatagaagccgaagccgtaatgctcgggcagccttattatatgcctgtgcctcaggtagtgggcttcaaactttacggaaaacctgcccctggagttactgccaccgatcttgtcctgacaattacgaagatgcttagaaaagagggagttgtcggcaaattcgtggaattttacggtcccgggttaaattcactgagtcttccggacagggcaacgatctcaaacatggctcctgagtatggtgcaacccttggaatttttccgcctgatgctgagacacttgactacctgcgaagaactggcaggagcaaagagcaggttgatcttgtgaaaaagtatatggaagctcagggccttttttattcaactcatgatccggaccctgttttcagcactaccctggaacttgatatgagcacggtaaaaccctgtcttgcaggcccaaagcgtcctcaggaccagcttttcttgagtgaggtacctgaaaattaccatgaaattatgaagcagacctttatccgaaagaaagaatcagggcttgaactttcccaggatcctgcttaccagcgctggatagaagacggaggaacgccttttgaggaacctgaaactcctggtgcagaagaggaaataaaggaatcttcggaaaaatctttcagggtaacacatggttccgtagtgattgcagcaattacttcctgtaccaatacctcaaacccttcagttttaataggagccgggctgctcgccaaaagggctgtagaaaagggcctgcacgtcaaaccttttgtaaaaacaagcctttccccaggttctagagtagctacggaatatctgaaagctgcaggccttttgccctatctcgaagcccttggtttccaccaggttggttacggttgtacaacctgtataggaaacagtggacctttacctgaaaaggtttcaaaagaaattaaggaaaatgaccttactgtcgcagccgtactcagcggaaaccgtaacttcgaaggacggattaatcctcttgtcagggcaaactaccttgcttctccacctcttgttgtggcctatgcaatcgcaggtaccgtgaatatcaacctcgaaaccgatcctcttgcttatgatccaaacgggcgccctgtttacctcaaagatatctggcctgcagaaaaggaaataagggccgctgaaaagaacagcatcaaaccttcaatgttcgaaaaagaatattcaggtgctttagagggctccaaacgctggaaagagctggaagctccaacaggtactctctatgattggaactctatgtctacatatattcaggaacctccatacttcatggacttcccacctgctccaccttcgcctgcggatataaagaatgcaagagttctggcccttttcggggacagcattaccacggaccatatttcccctgcgggtgccattccttcagacagtcctgcgggcaggtacctgatttcctggggtgtgagccctgaagatttcaattcttatgggtccaggaggggtaaccacgaggtaatgatgcgtgggacctttgggaatattcggctcaggaacaggctcgtgggcagggaaggaggatggaccgtataccattcccggaaagaagacttccccgaggaaccctgtgaaggaatccctatttatgacgcagccatgctttatgcggaaaatgatactcctctgatcgttatcgcaggaaaggaatacggaacaggcagttccagggactgggcagctaaaggtacgttcctgctcggagttaaagcagttattgccgagtctttcgagcgtattcacagaagtaaccttgtcggcatgggagttcttccattgcagtttaaagaaggcgagaatgccgatactctgggccttacaggaaaggaaagttatgatattctgggcattgaatacatggaaccacaaggagaacttactgtaagggcaaaagacgaagatggtaatgaagttcagttccaggtaactttgaggctggattcggctgtagaagtcgagtattacctgaacggtggaattttgcataagttcctgcgggattccgtgaagaaaaattaa

SEQ ID NO: 67003 - protein, 934 aa, Methanosarcina barkeri str. Fusaro
MREGPDPFGVRDTIETAAGKATIYSLGKLEEKGYEGISLLPYSIRILLESLLRHADTEKHIITAEDVEALARWSPENISDRDIPFIPSRVIMQDFTGVPAVVDLAALRSAMQRLGGDPAKINPVIPADLVIDHSVQVDSYGTAYALEENEKKEFERNTERYSVLRWAQKAFDNFRVVPPGRGIIHQVNLEYLAPLVHLKEKDGELFAFPDTLVGTDSHTTMINGIGVLGWGVGGIEAEAVMLGQPYYMPVPQVVGFKLYGKPAPGVTATDLVLTITKMLRKEGVVGKFVEFYGPGLNSLSLPDRATISNMAPEYGATLGIFPPDAETLDYLRRTGRSKEQVDLVKKYMEAQGLFYSTHDPDPVFSTTLELDMSTVKPCLAGPKRPQDQLFLSEVPENYHEIMKQTFIRKKESGLELSQDPAYQRWIEDGGTPFEEPETPGAEEEIKESSEKSFRVTHGSVVIAAITSCTNTSNPSVLIGAGLLAKRAVEKGLHVKPFVKTSLSPGSRVATEYLKAAGLLPYLEALGFHQVGYGCTTCIGNSGPLPEKVSKEIKENDLTVAAVLSGNRNFEGRINPLVRANYLASPPLVVAYAIAGTVNINLETDPLAYDPNGRPVYLKDIWPAEKEIRAAEKNSIKPSMFEKEYSGALEGSKRWKELEAPTGTLYDWNSMSTYIQEPPYFMDFPPAPPSPADIKNARVLALFGDSITTDHISPAGAIPSDSPAGRYLISWGVSPEDFNSYGSRRGNHEVMMRGTFGNIRLRNRLVGREGGWTVYHSRKEDFPEEPCEGIPIYDAAMLYAENDTPLIVIAGKEYGTGSSRDWAAKGTFLLGVKAVIAESFERIHRSNLVGMGVLPLQFKEGENADTLGLTGKESYDILGIEYMEPQGELTVRAKDEDGNEVQFQVTLRLDSAVEVEYYLNGGILHKFLRDSVKKN

SEQ ID NO: 67004 - DNA, 2595 bp, Pseudomonas fluorescens PfO-1
  CDS (1)..(2595): transl_table=11
atgaacacagaatttcgcaagaacctgcccggcacgccgctggactttttcgacgtccgcgcggcggtcgatgggatccagcccggcagctacgataccctgccgtacacctctcgcgtgctggcggaaaacctcgtgcgtcgctgcgacccggccacgctcaccgattccctgaaacaactgatcgagcgcaaacgcgacctcgacttcccatggttcccggcccgcgtggtgtgccacgatattctcggccagaccgcgctggtggatctggccggcctgcgcgacgcgattgcccagcagggcggcgacccggcgcaggtcaacccggtggtgccgacgcaactgatcgtcgaccactcgctggcggtggaggcgggcggttttgacgcccaggcgttcgagaagaaccgcgccatcgaagaccgtcgcaacgaagaccgtttccacttcatcaactggaccaagaaggcgttcaagaacgtcgacgtgatcccgccgggcaacggcatcatgcaccagatcaacctggagaaaatgtcgccggtgatccaggtgcgcgacggcgtggcgttcccggatacctgcgtcggcaccgacagccacaccccgcacgtcgatgcgctgggcgtgatcgccatcggtgttggtggtctggaagccgagagcgtgatgctcggccgcgcgtcgtggatgcgcctgccggaaagcgtcggtgtcgaactgaccggcaagctgcaaccgggcattaccgccaccgacatggtgctggcgctgaccgaatacctgcgcaaacagaaagtggtcggcgcgtggctggagttcttcggcgaaggcgcttccgcgctgaccctcggcgaccgcgcgaccatctccaacatggctccggaatacggcgccacggcggcgatgttctacatcgaccagcagaccatcgattacctgaaactcaccggtcgcgaagaccagcaagtgcaactggtcgagcaatacgccaagcagatcggcctgtgggccgacagcctgaaaggcgcgcaatacgagcgcggcctgaccttcgatctgtcctcggtggtgcgcaacatggccggcccgagcaacccgcacgcccgcgtggcggtgtcggatctggcggccaaaggcatcgccggtcagtgggaagacgtccctgggcaaatgcccgacggcgcggtgatcatcgccgccatcaccagttgcaccaacaccagcaacccgcgcaacgtgatcgccgccggcctgctggcgcgcaacgccaacaagctcgggctgacccgcaagccgtgggtcaagtcgtcgctggcaccgggctcgaaaaccgtggcgctgtacctcgatgaagcggggctgaccacggagctggagcagctcggtttcggcgtcgtcgccttcgcctgcaccacctgcaacggcatgtccggcgcgctggacccggtgatccagcaagagatcatcgaccgcgacctgtacgccactgctgtgctgtccggtaaccgcaacttcgacgggcggattcacccgtacgccaagcaggctttcctcgcttcgccgccgctggtggtggcctacgcgattgccggcaccatccgtttcgatatcgagaaagatgtgctgggcgtggtcgacggcaaggaaattcgcctgaaagacatctggccgagcgacgaagaaatcgacgcggtggtgaaatcttcggtcaagcctgagcagttccgtcaggtctacatcccgatgttcgccatccatgaagacaccggtccgaaagtcacgccgctgtacgactggcgcgaaatgagcacctacatccgccgtccgccgtactgggagggcgcgctggccggggcgcggccgctcaagggcatgcgtccgttggcggtattgccggacaacatcaccaccgatcacctgtcgccgtcgaacgcgatcatgctcgacagcgccgccggcgagtacctggcgaaaatgggcctgccggaagaggacttcaactcttacgcgacccaccggggcgaccacttgaccgcacagcgcgcgaccttcgccaacccgaaactgttcaacgaaatggtcgtggaaaacggcaaggtcaagcagggctcgctggctcgagtcgagccggaaggccaagtgatgcgcatgtgggaagccatcgaaacctacatggagcgcaagcagccgctgatcatcatcgccggcgccgactacggccagggctcgtcccgcgactgggcggccaaaggcgtgcgtctggcgggggtggaagcgattgccgccgaaggtttcgagcgcattcaccgcaccaacctggtgggcatgggcgtgttgccgctggagttcaaaccgggcactgaccgcaagactctgggcatcgacggcagcgaaacctacgacgtgatcggtgagcgcacgccgcgcgccgacctgacgctggtgatccatcgcaagaacggcgaacgcgtcgacgtgccggtgacctgccgcctcgacaccgccgaagaagtgtcgatctacgaggctggcggcgtgttgcagcgcttcgctcaggacttcctcgaagagtcggcggttgccgtttaa

SEQ ID NO: 67005 - protein, 864 aa, Pseudomonas fluorescens PfO-1
MNTEFRKNLPGTPLDFFDVRAAVDGIQPGSYDTLPYTSRVLAENLVRRCDPATLTDSLKQLIERKRDLDFPWFPARVVCHDILGQTALVDLAGLRDAIAQQGGDPAQVNPVVPTQLIVDHSLAVEAGGFDAQAFEKNRAIEDRRNEDRFHFINWTKKAFKNVDVIPPGNGIMHQINLEKMSPVIQVRDGVAFPDTCVGTDSHTPHVDALGVIAIGVGGLEAESVMLGRASWMRLPESVGVELTGKLQPGITATDMVLALTEYLRKQKVVGAWLEFFGEGASALTLGDRATISNMAPEYGATAAMFYIDQQTIDYLKLTGREDQQVQLVEQYAKQIGLWADSLKGAQYERGLTFDLSSVVRNMAGPSNPHARVAVSDLAAKGIAGQWEDVPGQMPDGAVIIAAITSCTNTSNPRNVIAAGLLARNANKLGLTRKPWVKSSLAPGSKTVALYLDEAGLTTELEQLGFGVVAFACTTCNGMSGALDPVIQQEIIDRDLYATAVLSGNRNFDGRIHPYAKQAFLASPPLVVAYAIAGTIRFDIEKDVLGVVDGKEIRLKDIWPSDEEIDAVVKSSVKPEQFRQVYIPMFAIHEDTGPKVTPLYDWREMSTYIRRPPYWEGALAGARPLKGMRPLAVLPDNITTDHLSPSNAIMLDSAAGEYLAKMGLPEEDFNSYATHRGDHLTAQRATFANPKLFNEMVVENGKVKQGSLARVEPEGQVMRMWEAIETYMERKQPLIIIAGADYGQGSSRDWAAKGVRLAGVEAIAAEGFERIHRTNLVGMGVLPLEFKPGTDRKTLGIDGSETYDVIGERTPRADLTLVIHRKNGERVDVPVTCRLDTAEEVSIYEAGGVLQRFAQDFLEESAVAV

SEQ ID NO: 67006 - DNA, 2745 bp, Rhodobacter sphaeroides 2.4.1
  CDS (1)..(2745): transl_table=11
gtggggcaaaacgcgcgcggagcacaagcccaaccctcgccacggcgccaggaggaccgcatgaccgtcaccgtcggacacgacagccagaagacccgcaagaccctcagcgtcggcggctctagctatgcctactactcgattccggcagcggaggaagccggtctcggccagttcgcccgcctgcccgccgcgctgaaggtggtgctggagaacatgctgcgcttcgaggacggcaagacggtgtcggtcgacgacatccgcgccttctcggaatggggcgcgaacggcggccggaacccgcgcgagatcgcctatcgcccggcccgcgtgctgatgcaggacttcaccggcgttccggcggtggtggaccttgccgcgatgcgcgacggcatcctcgggctcggcggcgacgcgcaaaagatcaacccgctgaacccggtcgatctcgtcatcgaccactcggtcatgatcgacgaattcggcaatccgcgcgccttccagatgaatgtggaccgcgaatacgagcggaacatggaacgctacaccttcctcaaatgggggcagaaggcgttcaacaacttccgcgtggtgccgccgggcaccggcatctgccaccaggtgaacctcgaatatctcgcgcagacggtctggaccgaccgtgaccaggacgggatggaagtggcctatccggacacgctggtgggcaccgattcgcacaccacgatggtcaatggtctggccgtcctcggctggggcgtgggcgggatcgaggccgaggccgcgatgctgggccagccggtctcgatgctgatccccgaggtcgtgggcttcaagctgaccggccaaatgatcgaaggcacgacggccaccgacctcgtgctgaaggtcgtgcagatgctgcgcaagaagggcgtggtgggcaagttcgtcgaattctacggcgagggtctcgaccatctgccgctcgcggaccgcgcgaccatcgccaacatggccccggaatatggcgcgacctgcggcttcttcccgatcgacggcgagacgctgcgctacctgcgccagacgggccgggacgagtcgcgcatcgcgctggtcgaagcctatgccaaggccaacggcctgtggcgcgacgcctcctacgagccgatctacaccgacacgctgcatctcgacatgggcgagatcgtgcccgccatctcgggcccgaaacgcccgcaggactacctgccgctgaccgacgccaaggcttcgttcgcgcgggagatggagacgagcttcaagcgcccggtgggcaaggaagtgcccgtcgcgggcgaagactacaccatgtcctcgggcaaggtggtgatcgcctcgatcacctcctgcaccaacacctcgaacccctatgtcctgatcggcgccggcctcgtcgcccgcaaggcgcgcgcgctggggctgaaccgcaagccgtgggtcaagacctcgctcgcgcccggatcgcaggtcgtgtccgaatatctggaggccgcgggcctgcaggaggatctggacgcggtgggcttcaacctcgtgggctacggctgcaccacctgcatcggcaactcgggcccgctgcagccggagatctcggccgccatcaacgagggtgacctcgtggccgccgccgtgctctcgggcaaccggaacttcgagggccggatcagccccgacgtgcgggcgaactacctcgcctcgccgccgctggtggtggcctatgcgctggccggcgacatgaacatcgacctgacctcggagcccatcggcatgggcacgaacgggccggtctatctcaaggacatctggcccaccaacgccgagatcgccgagctggtcgagaagaccgtgacccgcgaggccttccagaagaaatatgccgatgtcttcaagggcgatgccaagtggcagtcggtctcgaccacggacagccagacctacgactggccggcgagctcgacctacatccagaacccgccctacttccagaacatgtcgaaggagccgggcgtcatcaccgacatcaccggcgcgcgcgtccttgcgctcctcggcgacatgatcaccaccgaccatatctcgcccgcgggctcgttcaaggagagcacgccggccgggaaatatctggtcgagcggcaggtctcgccgcgcgagttcaactcctacggctcgcggcgcggcaaccacgaagtgatgatgcgcggcaccttcgccaacatccgcatcaagaacgagatgctggacggggtcgagggcggctacacgctcgggccggacgggcagcagacctcgatcttcgacgcctcgatggcctatcaggcggcgggcaccccgctcgtcctcttcggcggcatcgaatatggtgcgggctccagccgtgactgggcggccaagggcacggcgcttctgggcgtcaaggcggtcatcgccgagagcttcgagcgcatccaccgctcgaacctcgtcggcatgggcgtgatcccgttcgagttcaccgaaggccagaaccgcaagtcgctgggcctgaagggtgacgagacggtctcgatccagggcctctccggcgatctgaagccgctgtcgctggtgccctgcaccatcacctacggcgacggcacggtgaagacgatccagctcaagtgccggatcgataccgagatcgagatcgaatatgtcgagcacggcggcgtgctgcattacgtgctgcgcgacctcgcctcggtctga

SEQ ID NO: 67007 - protein, 914 aa, Rhodobacter sphaeroides 2.4.1
MGQNARGAQAQPSPRRQEDRMTVTVGHDSQKTRKTLSVGGSSYAYYSIPAAEEAGLGQFARLPAALKVVLENMLRFEDGKTVSVDDIRAFSEWGANGGRNPREIAYRPARVLMQDFTGVPAVVDLAAMRDGILGLGGDAQKINPLNPVDLVIDHSVMIDEFGNPRAFQMNVDREYERNMERYTFLKWGQKAFNNFRVVPPGTGICHQVNLEYLAQTVWTDRDQDGMEVAYPDTLVGTDSHTTMVNGLAVLGWGVGGIEAEAAMLGQPVSMLIPEVVGFKLTGQMIEGTTATDLVLKVVQMLRKKGVVGKFVEFYGEGLDHLPLADRATIANMAPEYGATCGFFPIDGETLRYLRQTGRDESRIALVEAYAKANGLWRDASYEPIYTDTLHLDMGEIVPAISGPKRPQDYLPLTDAKASFAREMETSFKRPVGKEVPVAGEDYTMSSGKVVIASITSCTNTSNPYVLIGAGLVARKARALGLNRKPWVKTSLAPGSQVVSEYLEAAGLQEDLDAVGFNLVGYGCTTCIGNSGPLQPEISAAINEGDLVAAAVLSGNRNFEGRISPDVRANYLASPPLVVAYALAGDMNIDLTSEPIGMGTNGPVYLKDIWPTNAEIAELVEKTVTREAFQKKYADVFKGDAKWQSVSTTDSQTYDWPASSTYIQNPPYFQNMSKEPGVITDITGARVLALLGDMITTDHISPAGSFKESTPAGKYLVERQVSPREFNSYGSRRGNHEVMMRGTFANIRIKNEMLDGVEGGYTLGPDGQQTSIFDASMAYQAAGTPLVLFGGIEYGAGSSRDWAAKGTALLGVKAVIAESFERIHRSNLVGMGVIPFEFTEGQNRKSLGLKGDETVSIQGLSGDLKPLSLVPCTITYGDGTVKTIQLKCRIDTEIEIEYVEHGGVLHYVLRDLASV

SEQ ID NO: 67008 - DNA, 2718 bp, Burkholderia sp. 383
  CDS (1)..(2718): transl_table=11
atggcccacaatctccacaagaccctcaaggaattcgacagcggttccggcaaaggcaagttctactcgctgccgcagctcggcaaggaactgaagacgaagatcgaacgcctgccggtgtcgatccgtatcgtgctcgagtccgtgctgcgcaactacgacggcaagaaaatcaccgaagcgcacatcgagcagctcgcgaactggaagccgaccgagaagcgcgtcgacgagattccgttcgtggtgtcgcgcgtcgtgctgcaggacttcactggcgtgccgctgctcgccgacatcgcggccatgcgcggcgtcgccgagcgtacgggcaagaacccgaagaagatcgagccgctggtcccggtcgatctcgtcgtcgatcactcggtgcagatcgactacttccgccagaaggacgcgctcgacctgaacatgaaactggaattccagcgcaacaacgagcgctaccagttcatgaagtggggcatgcaggcattcgacacgttcaaggtcgtgccgccgggcgtcggcatcgtccaccaggtgaacctcgagtacctcgcgcgcggcgtccacaagaaggcggacggcggcgacaccgtgtactacccggatacgctggtcggcaccgacagccacacgacgatgatcaacggcatcggcgtggtcggctggggcgtgggcggcatcgaggcggaagccggcatgctcggccagccggtgtacttcctgacgccggacgtcgtcggcgtcgagctgaagggcaagctgcgcgaaggcgtcacggccaccgacctggtgctgacgatcaccgaaatgctgcgcaaggagaaggtcgtcggcaagttcgtcgaattcttcggcgaaggcacgaaatcgctgtcgctgccggatcgcgcgacgatcggcaacatggcgccggaatacggcgcgacgatgggcttcttcccggtcgacgaaaagacgatcgactacttcgaaggcacgggccgcacgaaggcggaaatcgccgcgttcgaaaactacttcaaggcgcagaagctgttcggcatcccgaaggccggcgacatcgactacacgaaggtcgtgacgctcgacctggcgacggtcgcaccgtcgctggccggcccgaagcgcccgcaggaccgcatcgagatcggcaacgtcaagtcgacgttcaccgacctgttctcgaagccggtggcagacaacggcttcgcgaagaaggcggacgacctggccacgcaatacacgacgagcaacggcgtcgacgtgaagaacggcgacgtgctgatcgccgcgatcacgtcgtgcacgaacacgtcgaacccgagcgtgctgctggctgcaggcctgctcgcgaagaaggcggtcgaggccggcctcacggtcgatccgaagatcaagacctcgctcgcgccgggatcgcgcatcgtcaccgagtacctgacgaagacgggcctgctgccctacctgtcgaagctcggcttcgaagtcgcggcctacggctgcacgacctgtatcggcaacgcgggcgacctgacgccggagctgaacgaagcgatcacgaagaacgacatcgtcgcggcagccgtgctgtcgggcaaccgtaacttcgaagcgcgtatccacccgaacatccgcgcgaacttcctcgcgtcgccgccgctggtcgtcgcctacgcgatcgccggcaacatcacgcgcgacctgatgaccgaaccggtcggcaagggcaagggcggccgtgacatctacctcggcgacatctggccgacgagcgaagaaatccacgcgctgctcaagttcgcgctcgacccgaagaagttcgaggacaactactcgaagctgaccaagaagggcgacctctggagcaagatcgagggcgaatcgggccaggtctacgactggccgaagtcgacctacatcgccgagccgccgttcttcggcaacgacttctcgatggaaccggctgcatcgatcccgacggtcaagggcgcacgcgcactcggcatcttcggtgactcggtcacgaccgaccacatcagcccggcaggctcgatcaaggaagattcgccggcaggcaagtggctgaaggaaaacggcgtgcagaaggccgacttcaacagctacggctcgcgccgcggcaaccacgacgtgatgatgcgcggcacgttcgcgaacgtccggatcaagaacctgatgatcccggcgaaggcagacggctcgcgcgtcgaaggcggcctgacgatccaccagccgagcggcgaacagcagtcgatctacgacgcggccatgcagtatgtcggcgccgatacgccgacggtcgtgttcgcaggcgaagagtacggcacgggctcgtcgcgcgactgggccgcgaagggcacgcaactgctcggcgtgaaggccgtgatcgcacgcagcttcgagcgcatccaccgctcgaacctggtcggcatgggcgtgctgccgctgcagttcaagggctcggacagcatccagtcgctcggcatcaccggcgacgaaacgtatgacatcgaaggcctcggcgacgacttcaagccgcagcaggacgtcacgctggtgatcaaccgcaagaacggtgagtcgcagcgcgtgcaggtgctgctgcgcatcgatacgccgatcgaagtcgactactacaagcacggcggtatcctgccgttcgtgctgcgctcgctgctcgcagcgtaa

SEQ ID NO: 67009 - protein, 905 aa, Burkholderia sp. 383
MAHNLHKTLKEFDSGSGKGKFYSLPQLGKELKTKIERLPVSIRIVLESVLRNYDGKKITEAHIEQLANWKPTEKRVDEIPFVVSRVVLQDFTGVPLLADIAAMRGVAERTGKNPKKIEPLVPVDLVVDHSVQIDYFRQKDALDLNMKLEFQRNNERYQFMKWGMQAFDTFKVVPPGVGIVHQVNLEYLARGVHKKADGGDTVYYPDTLVGTDSHTTMINGIGVVGWGVGGIEAEAGMLGQPVYFLTPDVVGVELKGKLREGVTATDLVLTITEMLRKEKVVGKFVEFFGEGTKSLSLPDRATIGNMAPEYGATMGFFPVDEKTIDYFEGTGRTKAEIAAFENYFKAQKLFGIPKAGDIDYTKVVTLDLATVAPSLAGPKRPQDRIEIGNVKSTFTDLFSKPVADNGFAKKADDLATQYTTSNGVDVKNGDVLIAAITSCTNTSNPSVLLAAGLLAKKAVEAGLTVDPKIKTSLAPGSRIVTEYLTKTGLLPYLSKLGFEVAAYGCTTCIGNAGDLTPELNEAITKNDIVAAAVLSGNRNFEARIHPNIRANFLASPPLVVAYAIAGNITRDLMTEPVGKGKGGRDIYLGDIWPTSEEIHALLKFALDPKKFEDNYSKLTKKGDLWSKIEGESGQVYDWPKSTYIAEPPFFGNDFSMEPAASIPTVKGARALGIFGDSVTTDHISPAGSIKEDSPAGKWLKENGVQKADFNSYGSRRGNHDVMMRGTFANVRIKNLMIPAKADGSRVEGGLTIHQPSGEQQSIYDAAMQYVGADTPTVVFAGEEYGTGSSRDWAAKGTQLLGVKAVIARSFERIHRSNLVGMGVLPLQFKGSDSIQSLGITGDETYDIEGLGDDFKPQQDVTLVINRKNGESQRVQVLLRIDTPIEVDYYKHGGILPFVLRSLLAA

SEQ ID NO: 67010 - DNA, 1947 bp, Geobacter metallireducens GS-15
  CDS (1)..(1947): transl_table=11
atgggaaaaaatctcgcaaccaagatcctcgaagcgcacctcgcgaagggcgagcttaagccgggcaccgagatcgccctgaagatcgaccacgcgctcttgcaggacgccaccggcaccatggccatgctggagttcatcgccatgggggtcgaccgggtgaaggtggagctggcggcccagtacatcgaccataacctcctccagaccgacaaccgcaacgccgacgaccacatctttctcatgaccgcggcccagcggttcggcatccacgtctccaagccggggaacggggtctcccaccaggtgcacctggagcgcttcggcgtgccgggcaagaccatgctcggggccgactcccacaccacctccgccgccggtctttccatgatcgccatcggcgccggggggctcgatgtctcactggccatggcggggcaccccttccatctcccctgtccgaagatctggggagtgaagctcacgggagagctccagccctgggtctcggccaaggatgtgatcctggagatgctccgccgccacacggtgaaggggggggtcgggaagatcatcgagtactacggccccggcgtggcgaccctctcggccacggaccgggccatcatcggcaacatgggggcggaactgggggccaccacctccgtcttcccctcggaccaccggacccgcgagttcctggaggcccaggggcgcggccagctctggcaggagcttgccgccgaccccgacgccacctacgacgagtacgaggagattgacctcgccacggtggaacccctcatcgcccggccgtcatcccccgacaacgtggtgcgggtggccgacatcgaggggttgaaggtggaccaggtgctggtggggagttccgccaactccgccttccgggacctcatgaccgtctgtcgcatcctggatggccggcgcatcgccccccacctctccttcaacgtgaacccggggagccgccaggtgctggaaaacgtggcggatcaaggcgggatcatgatgttgcttctggccggcgcccagatccaccagccggggtgcctcggctgcatcggcatggggcaagcgccggggaccaatcaggtgagcctccgcaccttcccccgcaacttcccggggagaagcggcacgaagaacgatctggtctacctctgctcccccgagacggcagccgccgccggcctcttcggcgtggtcaccgacccccgcaagctggagggcctcatgccgtggcccaacgtccagaaccctgagaactacatcctggacgactccagcatcatcttccccctcccccccgaggaggcgaagcgggtggagatcgtcaccggccccaacatcatcccgttccccgactacgatcccctccccgagaccttggaggcggaggtcatcctcaccgtgggggacaatatctccaccgacaccatcatgcctgcggggaataaggtgctcccctaccggagcaacatcccggccatcagccagttcgtcttcgagcatctggaccccgatttccacaagcgggccaaggagaaggggaacggcgtcgtcatcggcggggagaactacggccaggggtcgagccgggagcatgcggccctggcgccgcgctatctcggcatccgggccaagatcgtcaagagcttcgcccggatccacaaggcgaacctggtgaacttcggcatcctccccctcacgttcagaaatcccgccgactacgacctggtgaagcagggggaccgcctcgtgttccccgatgtgcgccggctcgtggcctccggcgccgcagagataccggtgcgggtggacggacgggagattgtcaccattctggaggtctcagaccggcagcggcaggagcttctggccggggggaccctgaactttgtgaaaaaaggcggtacggaggggtga

SEQ ID NO: 67011 - protein, 648 aa, Geobacter metallireducens GS-15
MGKNLATKILEAHLAKGELKPGTEIALKIDHALLQDATGTMAMLEFIAMGVDRVKVELAAQYIDHNLLQTDNRNADDHIFLMTAAQRFGIHVSKPGNGVSHQVHLERFGVPGKTMLGADSHTTSAAGLSMIAIGAGGLDVSLAMAGHPFHLPCPKIWGVKLTGELQPWVSAKDVILEMLRRHTVKGGVGKIIEYYGPGVATLSATDRAIIGNMGAELGATTSVFPSDHRTREFLEAQGRGQLWQELAADPDATYDEYEEIDLATVEPLIARPSSPDNVVRVADIEGLKVDQVLVGSSANSAFRDLMTVCRILDGRRIAPHLSFNVNPGSRQVLENVADQGGIMMLLLAGAQIHQPGCLGCIGMGQAPGTNQVSLRTFPRNFPGRSGTKNDLVYLCSPETAAAAGLFGVVTDPRKLEGLMPWPNVQNPENYILDDSSIIFPLPPEEAKRVEIVTGPNIIPFPDYDPLPETLEAEVILTVGDNISTDTIMPAGNKVLPYRSNIPAISQFVFEHLDPDFHKRAKEKGNGVVIGGENYGQGSSREHAALAPRYLGIRAKIVKSFARIHKANLVNFGILPLTFRNPADYDLVKQGDRLVFPDVRRLVASGAAEIPVRVDGREIVTILEVSDRQRQELLAGGTLNFVKKGGTEG

SEQ ID NO: 67012 - DNA, 1932 bp, Desulfovibrio desulfuricans G20
  CDS (1)..(1932): transl_table=11
atgactatgaatctgacacaaaagatcattgccgcccatcttgtaagcggcgagatgacacagggcgccgaaatagggctgcgcatagaccagacgctgacgcaggatgccaccggcaccatggcgtatctgcagtttgaagccatgggcgtggacagggtgcgcactgacctgtcggtcagctatgtggaccacaacacgctgcagatgggattccgcaatccggatgaccaccgttttctgcgcacggtggcgcagaagtacggcattgtctattcaccggcgggcacgggcatctgtcatcagctgcatctggaaaattttgcggtgcccggttccacgctggtggggtcggacagccacacgcccacggcgggcggtataggtgcccttgccatgggggccggcgggctttccgttgctctggccatggcaggagagccgtatttcatcaccatgccccgcgtggtgaaagtgcgtctggaaggccgcctgaaggggtgggccacggcaaaggatgtcattctgcatctgctggggctgctgacagtcaagggcggtgtgggcaaggtgtttgaatacgccggtcccggtgtcgaaaccctcagcgtgcccgagcgtgccaccatcaccaacatgggggccgaactgggcgccaccacgtcggtgttccccagcgatgagcgcacccgcgattttctgaaggccatgggccgtgctgatgtatggaagccgctggcggcggatgacggggcgcaatacgacgaagaggtcgtcattgacctttcggcactgcagccgctggctgcgcagccgcacatgcccgacagggtggtgccggtggccagtctggacggtctgaaggttgatcaggtggccatcgggtcgtgcaccaattcatcatacgccgaccttaaaggtgcggtaagcctgctggcaggcaacagggtatgcgccggcaccgatacgctggtttcccccggttccaagcaggtgctgaagatgcttgcgcgtgaagggctggtcgagccgctgcttgattccggcgcacggctgctggagtgttcatgcgggccgtgtatcggcatgggggggtcccctgtcagcgggggcgtgtcggcccgtaccttcaaccgcaattttgaaggccgcagcggtaccaaagacgggcaggtttatcttgtcagtccgctgaccgcagccatggctgctttgcgcggctgtttcaccgatcccgccacatggggagaagctcccgcggtggccgatctgcccgccgaagtcccttccatcgctgatttgtttgcctatccgccgcaggacggagcaggcacagaggttgtctacgggcccaacatcgtggcgctggagcgttttgaaccgctgccggagcagctgcaggccggtgtgcttatccggctgggtgacgatataaccaccgaccacattatgcccgccggtgcggaaataacctcgctgcggtccaatgtgcccgccattgcgcggcatgttttcggccgggtggacgaagattttgtcacgcgggccgatgccttggaaaacggggttatcgtggcaggtgaaaattacggacagggatccagtcgcgaacatgcggcccttgctccgcgccatctgggtgtgcgtgcggtcatagccaagtcgcttgcccgtatccacagagccaatcttgtgaacttcggcattctgccgctgattctggaagataaagccgactatgcgcagctggaacagggctgcaccgtcactctggacaccacgctgctggctccgggagccgtcgtgcaggtaacagtggacggcggcgctgcagtggctgtcaggaatgatttgactgctaaggaattggacattattcgggcaggcggattgcttaattatgtacgtctctcgaaaacggctgctgcttag

SEQ ID NO: 67013 - protein, 643 aa, Desulfovibrio desulfuricans G20
MTMNLTQKIIAAHLVSGEMTQGAEIGLRIDQTLTQDATGTMAYLQFEAMGVDRVRTDLSVSYVDHNTLQMGFRNPDDHRFLRTVAQKYGIVYSPAGTGICHQLHLENFAVPGSTLVGSDSHTPTAGGIGALAMGAGGLSVALAMAGEPYFITMPRVVKVRLEGRLKGWATAKDVILHLLGLLTVKGGVGKVFEYAGPGVETLSVPERATITNMGAELGATTSVFPSDERTRDFLKAMGRADVWKPLAADDGAQYDEEVVIDLSALQPLAAQPHMPDRVVPVASLDGLKVDQVAIGSCTNSSYADLKGAVSLLAGNRVCAGTDTLVSPGSKQVLKMLAREGLVEPLLDSGARLLECSCGPCIGMGGSPVSGGVSARTFNRNFEGRSGTKDGQVYLVSPLTAAMAALRGCFTDPATWGEAPAVADLPAEVPSIADLFAYPPQDGAGTEVVYGPNIVALERFEPLPEQLQAGVLIRLGDDITTDHIMPAGAEITSLRSNVPAIARHVFGRVDEDFVTRADALENGVIVAGENYGQGSSREHAALAPRHLGVRAVIAKSLARIHRANLVNFGILPLILEDKADYAQLEQGCTVTLDTTLLAPGAVVQVTVDGGAAVAVRNDLTAKELDIIRAGGLLNYVRLSKTAAA

SEQ ID NO: 67014 - DNA, 2676 bp, Rhodospirillum rubrum ATCC 11170
  CDS (1)..(2676): transl_table=11
atgcccttgtgcggtcacgataccctcaaaacccgcaagaccctttccgtcaatggaaaggactacgactatttcagcctggaagcgtccggcctgggcgacatttcgcgcctgccctattccctgaaggtcctgcttgaaaacctgctgcgctacgaagacggccgcagcgtctccaccgacgacgccaaggccgttgtcgactggcaaaaggaccgccggtccgaccgcgaaatcgccttccgtccggcccgcgtgctgatgcaggacttcaccggcgttcccgccgtcgtcgatctggccgccatgcgcgaggcggtggtcgccctgggcggcgaccccaaaaccatcaatccgctgtcgcccgtcgatctggtcatcgatcattcggtgatgatcgatcacttcggcgccgccgattcgatgaagcgcaacatggacctggagttcgagcgcaacggcgaacgctacgccttcctgcgctggggtcagaaggccttcaacaacttccgggtcgtgccccccggggtcggcatctgccatcaggtcaatctggaatatctggccaagggcgtgtggaccggccgcgagggcgatcgcaccctggcctatcccgataccctggtgggaacggattcgcacaccaccatggtcaatggcctgggcgttctgggctggggcgtcggcggcatcgaggccgaggcggcgatgctgggccagccgatctccatgctcatccccgaggtcatcggcttcaagctgaccggcagcctgaaggaaggcaccaccgccaccgatctggtgctcacggtcgtcgagatgctgcgcaaaaagggcgtcgtcggcaagttcgtcgaattcttcggcgacggcttggataacctgccgctggccgaccgggcgaccatcgccaatatggtgcccgaatacggcgccacctgcggcatcttcccgatcgatgccgaaaccctgcgctatctgcgcttcaccggccgcgacgaagactccgtcgccctggtcgaagcctatgccaaggcccaggggatgtggcgccagaccggatcggccgaaccgctgttcaccgataccctggctctcgacatgggcacggtcgagccctcgctcgccggtcccaagcgtccccaggaccgcgtggccctgtcggccgccgcccccgccttcaagcaggcgctgaaaaccctggcgcccgaggctccggccgaccgctccatcccggtcgccggcaccgattacacgctgaacgacggcgacgtggtcatcgccgccatcacctcgtgcaccaatacctccaacccctcggtgctgatggccgccggtctggtggccaaaaaggccgtcgaacgcgggctgaccagcaagccctgggtcaagacctcgctcgccccggggtcgcaggtggtgtcggattacctgaacaaggccgggctgcagacctatctcgaccagcttggcttcaacgtcgccggctatggctgcaccacctgcatcggcaattccgggccgctggccgatggcatcatcgatgcggtcgacgataacggtctggtggtcaccgccgttctgtcgggcaaccgcaacttcgagggccgcatcagcccgcaggtcaaggccaactatctggccagcccgccgctggtcgtcgcctatgccatcgccggcagtctcaaggccgatatcaccaccgcgccgctcggcaaggacgccgagggcgtcgaggtcttcctgcgcgatatctggccgaccgccaaggaggtcgccgacgccatcagcgccttcatcagccccgacatgtaccgggcccgctacgccaacgtctttgacggtccggcggaatggcaggcggtggcggtggccgagggcgagacctacgcctgggacagccgctcgacctatgtccagcatccgccctatttccagggcatggacgcgacgccgaagccgccccaggacatcctggccgcccggcccttggcgatccttggcgattcggtcaccaccgaccacatctcgccggccggatcgatcaaggccacaagcccggctggggcctatctgagcgagcatggcgtcgaccagaaggacttcaattcctacggcgcccgccggggcaaccatgaagtgatgatgcgcggcaccttcgccaatatccgcatccgcaacgaaatggccccgggcaccgaaggcggcgtgaccaagcatcagccctcggacgaggtgatggcgatctatgacgcggcgatgaaatacgccgccaccgccacgccgctggtcattctgggcggcaaggaatacggcaccggatcgtcgcgcgactgggcggccaagggtaccaacctgctgggcgtcaaggcggtcatcgtcgaaagcttcgagcgcatccaccgttccaatctggtcggcatgggcgtcttgcccctgcagttcaaagagggaacggatcgcaagaccctgggcttggatggcacggagaccttcgaaatccgcggcgtggccgctctcaagccgcgccaggacgtgagcgtcgaggtgacgcgggccgatggcacccggctttccttcgacgcgctctgccgaatcgataccctcgatgaactcgattacttccgcaacggcggtatcttgcaatacgtgctgcgcaatctcgccagcgcctga

SEQ ID NO: 67015 - protein, 891 aa, Rhodospirillum rubrum ATCC 11170
MPLCGHDTLKTRKTLSVNGKDYDYFSLEASGLGDISRLPYSLKVLLENLLRYEDGRSVSTDDAKAVVDWQKDRRSDREIAFRPARVLMQDFTGVPAVVDLAAMREAVVALGGDPKTINPLSPVDLVIDHSVMIDHFGAADSMKRNMDLEFERNGERYAFLRWGQKAFNNFRVVPPGVGICHQVNLEYLAKGVWTGREGDRTLAYPDTLVGTDSHTTMVNGLGVLGWGVGGIEAEAAMLGQPISMLIPEVIGFKLTGSLKEGTTATDLVLTVVEMLRKKGVVGKFVEFFGDGLDNLPLADRATIANMVPEYGATCGIFPIDAETLRYLRFTGRDEDSVALVEAYAKAQGMWRQTGSAEPLFTDTLALDMGTVEPSLAGPKRPQDRVALSAAAPAFKQALKTLAPEAPADRSIPVAGTDYTLNDGDVVIAAITSCTNTSNPSVLMAAGLVAKKAVERGLTSKPWVKTSLAPGSQVVSDYLNKAGLQTYLDQLGFNVAGYGCTTCIGNSGPLADGIIDAVDDNGLVVTAVLSGNRNFEGRISPQVKANYLASPPLVVAYAIAGSLKADITTAPLGKDAEGVEVFLRDIWPTAKEVADAISAFISPDMYRARYANVFDGPAEWQAVAVAEGETYAWDSRSTYVQHPPYFQGMDATPKPPQDILAARPLAILGDSVTTDHISPAGSIKATSPAGAYLSEHGVDQKDFNSYGARRGNHEVMMRGTFANIRIRNEMAPGTEGGVTKHQPSDEVMAIYDAAMKYAATATPLVILGGKEYGTGSSRDWAAKGTNLLGVKAVIVESFERIHRSNLVGMGVLPLQFKEGTDRKTLGLDGTETFEIRGVAALKPRQDVSVEVTRADGTRLSFDALCRIDTLDELDYFRNGGILQYVLRNLASA

SEQ ID NO: 67016 - DNA, 1926 bp, Moorella thermoacetica ATCC 39073
  CDS (1)..(1926): transl_table=11
gtgggccagaatctagcccagaagataatcggccagcacctggtgaccggcaagatggtaccgggtgaggagattgccatccgcatcgaccagaccctgacccaggacgccaccggtaccatggcttacctgcaactggaggccatgggcgtcccccgggtgcggaccaggctttccgtcagttacgtcgaccataataccctccagaccggctttgaaaacgccgacgatcacctgttcctgcagggcatcgccgccaaatacggcattatcttttcccggcccggcaatggtatctgccaccaggtccatctggaacgcttcgccgtccccggaacgaccctgctggggtccgacagccatacccccactgccgggggcctgggcgccttagggatcggcgccggcggcctggatgtagccgtggccatggccggcggtcctttctattttaacatgccggccgtcgtccgtgtcaatttgcacgggcgtttggccccctgggtgagcgccaaggatatcatcctggaagtcttacgtagattaagcgttaaaggcggtgtgggcaaggtcatcgagtacggcggcgacggcgtggccaccctttccgtgccggaacgggcgaccattaccaatatgggcgccgagctgggggccaccacctccatcttccccagtgacgcggttaccagggccttcctgactgcccagggccgcgccggcgactgggttgaactcctgcccgatgccgacgccacctatgaccaggtcatcgatatcgacctggccgccctggaacccctggtggcccgaccccacatgccggataatgtagcccctgtcagggaggtaggcccgatcaaggtcaaccaggtggccatcggtagctgcaccaactcttcctacaccgatctcatgcgggtggcggccatcctcaagggtaaacgagtccatccggatgtcagcctggttatcgccccggggtcgcgccaggtcttccgcatgttggcgaaaaacggcgccctggccgacctgatcaccgccggcgcccgtatcctggaatgcgcctgcggcccctgcatcggtatgggacaggccccgccttcgggtggcgtttcggtgcgcaccttcaaccgtaacttccagggccgcagcggtacggccgacgcgttaatttacctggccagcccggaggtggccgcagccacggcccttaaaggttacctgaccgatccccgggagcttggtgaacccatagaggtggccctcccggaaagcttcccggtggacgacggtatgttcatcttcccgccggaggacggttcccgggtggagatccggcgcgggcccaatatcaagcccctgcccctgccccagccgccggcggaggttattaccgctccggtccttttgaaagtcggcgacaatattaccaccgaccatatttccccggccggcgccagatatttacccttgcgttccaacatcccggccctggccgagcacgcctttgagggagtggacccgacctttgcccggcgggccaaggaagccggccagggaataattgttggcgggcaaaactacggccagggctcgagccgtgagcacgccgccctctgccccatgtacctgggcatcaaggcggtcatcgccaaatccttcgcccgcatccaccgcagcaacctggtgaatttcggcatcctgcccctgacctttgccgacccggacgattacgaccggattgcagccggtgacactctggccatcgacctgagccagggacttgagccggaggaaataacggttaccgacaccagcaagggctttacttttaaagtgcgtcacgacctctccccccgccagcagaccgtcatcctggccggggggctgctgaactacaccaaacagcaggcagaccggtaa

SEQ ID NO: 67017 - protein, 641 aa, Moorella thermoacetica ATCC 39073
MGQNLAQKIIGQHLVTGKMVPGEEIAIRIDQTLTQDATGTMAYLQLEAMGVPRVRTRLSVSYVDHNTLQTGFENADDHLFLQGIAAKYGIIFSRPGNGICHQVHLERFAVPGTTLLGSDSHTPTAGGLGALGIGAGGLDVAVAMAGGPFYFNMPAVVRVNLHGRLAPWVSAKDIILEVLRRLSVKGGVGKVIEYGGDGVATLSVPERATITNMGAELGATTSIFPSDAVTRAFLTAQGRAGDWVELLPDADATYDQVIDIDLAALEPLVARPHMPDNVAPVREVGPIKVNQVAIGSCTNSSYTDLMRVAAILKGKRVHPDVSLVIAPGSRQVFRMLAKNGALADLITAGARILECACGPCIGMGQAPPSGGVSVRTFNRNFQGRSGTADALIYLASPEVAAATALKGYLTDPRELGEPIEVALPESFPVDDGMFIFPPEDGSRVEIRRGPNIKPLPLPQPPAEVITAPVLLKVGDNITTDHISPAGARYLPLRSNIPALAEHAFEGVDPTFARRAKEAGQGIIVGGQNYGQGSSREHAALCPMYLGIKAVIAKSFARIHRSNLVNFGILPLTFADPDDYDRIAAGDTLAIDLSQGLEPEEITVTDTSKGFTFKVRHDLSPRQQTVILAGGLLNYTKQQADR

SEQ ID NO: 67018 - DNA, 2718 bp, Burkholderia thailandensis E264
  CDS (1)..(2718): transl_table=11
atggcccacaatctccacaaaacactcaaggaattcgacagcggttccggcaaaggcaagttctactcgctgccgaagctcggcaaggaactgaagacgaagatcgagcggctgcccgtgtcgatccgcatcgtgctcgagtccgtgctgcgcaattacgacggcaagaagatcaccgaagagcacatcgagcagctcgcgaactggaagccgaacgcgaagcgcgtcgacgaaatcccgttcgtcgtgtcgcgcgtcgtgctgcaggacttcacgggcgtgccgctgctcgccgacatcgcggccatgcgcggcgtcgcgaagcgcgcgggcaagaacccgaagaagatcgagccgctcgtgccggtcgatctcgtcgtcgaccactcggtgcagatcgactacttccgccagaaggacgcgctcgacctgaacatgaagctggagttccagcgcaacaacgagcgctaccagttcatgaagtggggcatgcaggcgttcgacacgttcaaggtcgtgccgccgggcgtcggcatcgtccaccaggtgaacctcgagtacctcgcgcgcggcgtccacaagaagaaggacgacggcgacaccgtctactaccccgacacgctcgtcggcaccgacagccacacgacgatgatcaacggcatcggcgtggtgggctggggcgtgggcggcatcgaggcggaagccggcatgctcggccagccggtgtacttcctcacgcccgacgtcgtcggcgtcgagttgaagggcaagctgcgcgaaggcgtgacggccaccgatctcgtgctgaccatcaccgaaatgctgcgcaaggaaaaggtcgtcggcaagttcgtcgagttcttcggcgaaggcacgaagacgctcgcgctgccggaccgcgcgacgatcgcgaacatggcgccggaatacggcgcgacgatgggcttcttcccggtcgacgaaaagacgatcgactacttcaagggcacgggccgcacgaaggcggaaatcgccgcgttcgagaactacttcaaggcgcaggaactgttcggcatcccgaaggcaggcgaaatcgactacacgaagacgctgacgctggatctcgcgacggtcgcgccgtcgctcgcgggcccgaagcgtccgcaggaccgcatcgagatcggcaacgtgaagtcgacgttcaccgagctgttctcgaagcccgtcgcggaaaacggcttcgcgaagaaggccgacgatctctcggccgagtacaagacgagcaacggcgttgccgtgaagaacggcgacgtgctgatcgccgcgatcacgtcgtgcacgaacacgtcgaacccgagcgtgctgctcgctgccggcctgctcgcgaagaaggccgtcgaagcgggcctcaccgtcgcgccgcacatcaagacgtcgcttgcgccgggatcgcgcatcgtcaccgaatacctgacgaagacgggcctgctgccctatctcgcgaagctcggcttcgaagtcgcggcctacggctgcacgacctgtatcggcaacgcgggcgatctcacgcccgagctgaacgaagcgatcacgaagaacgacatcgtcgcggcggccgtgctgtcgggcaaccgtaacttcgaggcgcgcatccacccgaacatccgcgcgaacttcctcgcttcgccgccgctcgtcgtcgcgtacgcgatcgccggcaacatcacgaaggatctgatgaccgagccggtcggccagggcaagggcggccgcgacatctacctcggcgacatctggccgtcgagcgaagaagtccagtcgctgctcaagttcgcgctggacccggagaagttcgagaagaactactcgcacctgaccaagaagggcgacctctggagcaagatcgagggcgaatcgggccaggtctacgactggccgaagtcgacgtacatcgcggagccgccgttcttcggcaaggacttctcgatggaaccggccgacgagatcgtcacggtcaagggcgcgcgcgcgctcggcatcttcggcgattcggtcacgaccgaccacatcagcccggcaggctcgatcaaggaagattcgccggcaggcaagtggctgaaggagaacggcgtgcagaaggccgacttcaacagctacggctcgcgccgcggcaaccatgacgtgatgatgcgcggcacgttcgcgaacgtgcggatcaagaacctgatgatcccggcgaaggcagacggcacgcgcgtcgaaggcggcctgacgatccaccagccgagcggcgaacagctgtcgatctatgatgcggcgatgaagtacatcgccgccgacacgccgaccgtcgtgttcgcgggcgaagagtacggcacgggctcgtcgcgcgactgggccgcgaagggcacgcaactgctcggcgtgaaggccgtgatcgcacgcagcttcgagcgcatccaccgttcgaacctggtcggcatgggcgtgctgccgctgcagttcaagggctcggacagcatccagtcgctcggcatcaccggcgacgagacgtacgacatcgaaggcctcggcgacgacttcaagccgcagcaggacgtcacgctcgtgatccatcgcaagaacggcgaaacgaagcgcgtgcaggtgctgctgcgcatcgatacgccgatcgaagtcgattactacaagcacggcggtatcctgccgttcgtgctgcgctcgctgctcgcggcgtaa

SEQ ID NO: 67019 - protein, 905 aa, Burkholderia thailandensis E264
MAHNLHKTLKEFDSGSGKGKFYSLPKLGKELKTKIERLPVSIRIVLESVLRNYDGKKITEEHIEQLANWKPNAKRVDEIPFVVSRVVLQDFTGVPLLADIAAMRGVAKRAGKNPKKIEPLVPVDLVVDHSVQIDYFRQKDALDLNMKLEFQRNNERYQFMKWGMQAFDTFKVVPPGVGIVHQVNLEYLARGVHKKKDDGDTVYYPDTLVGTDSHTTMINGIGVVGWGVGGIEAEAGMLGQPVYFLTPDVVGVELKGKLREGVTATDLVLTITEMLRKEKVVGKFVEFFGEGTKTLALPDRATIANMAPEYGATMGFFPVDEKTIDYFKGTGRTKAEIAAFENYFKAQELFGIPKAGEIDYTKTLTLDLATVAPSLAGPKRPQDRIEIGNVKSTFTELFSKPVAENGFAKKADDLSAEYKTSNGVAVKNGDVLIAAITSCTNTSNPSVLLAAGLLAKKAVEAGLTVAPHIKTSLAPGSRIVTEYLTKTGLLPYLAKLGFEVAAYGCTTCIGNAGDLTPELNEAITKNDIVAAAVLSGNRNFEARIHPNIRANFLASPPLVVAYAIAGNITKDLMTEPVGQGKGGRDIYLGDIWPSSEEVQSLLKFALDPEKFEKNYSHLTKKGDLWSKIEGESGQVYDWPKSTYIAEPPFFGKDFSMEPADEIVTVKGARALGIFGDSVTTDHISPAGSIKEDSPAGKWLKENGVQKADFNSYGSRRGNHDVMMRGTFANVRIKNLMIPAKADGTRVEGGLTIHQPSGEQLSIYDAAMKYIAADTPTVVFAGEEYGTGSSRDWAAKGTQLLGVKAVIARSFERIHRSNLVGMGVLPLQFKGSDSIQSLGITGDETYDIEGLGDDFKPQQDVTLVIHRKNGETKRVQVLLRIDTPIEVDYYKHGGILPFVLRSLLAA

SEQ ID NO: 67020 - DNA, 2595 bp, Burkholderia thailandensis E264
  CDS (1)..(2595): transl_table=11
atgaacactgccaaccgcaaacccctgcccggcacgccgctcgattacttcgacgcgcgcgccgccgtcgacgcgatccgcccgggcgcgtacgacaccctgccgtacacgtcgcgcgtgctcgccgagaacctcgtgcgccggtgcgacccggcgatcctcgccgattcgctgacgcagctcatcgagcgcaagcgcgagcgcgatttcccgtggttcccggcgcgcgtcgtctgccacgacatcctcggccagaccgcgctcgtcgatctcgcgggcctgcgcgacgcgatcgccgaacgcggcggcgatccggcgaaggtgaatccggtcgtgccggtgcaactgatcgtcgaccattcgctcgccgtcgaatgcggcggcttcgatccggacgcgttcgcgaagaaccgcgcgatcgaggatcgccgcaacgaggatcgcttccacttcatcgagtggacgaagaaggcgttcgagaacgtcgacgtgatcccgcccggcaacggcatcatgcaccagatcaatctggagaagatgtcgcccgtgatccaggcgcaggacggcgtcgcgtacccggacacctgcgtcggcaccgacagccacacgccgcacgtcgacgcgctcggcgtgatcgcgatcggcgtgggcgggctggaggcggagaacgtgatgctcggccgcgcgtcgtggatgcggctgccggacatcgtcggcgtcgagctgaccggcaagcgccagcccggcatcaccgcgaccgacgtcgtgctcgcgctcaccgaattcctgcgcaaggagaaggtggtcggcgcgtatctggaatttcgcggcgagggcgcgaagagcctcacgctcggcgatcgcgcgacgatctcgaacatggcccccgaatacggcgcgacggccgcgatgttcttcatcgacgagcagacgatcgactacctgcgcttgacgggccgcagcgacgagcaggtgaagctcgtcgagacgtacgcgaaggcggcgggcctgtgggccgacagcctcgcgaacgcgcaatacgagcgcacgctgacgttcgatctgtcgagcgtcgtgcgcaacatggccggcccgtcgaatccgcaccggcggctgccgacgtcggacctcgccgcgcgcgggatcgccggcaagtgggaagagaagccgggcgagatgcccgacggcgcggtgatcatcgccgcgatcacgagctgcacgaacacgagcaacccgcgcaacgtgatcgccgcggcgctgctcgcgcgcaacgcgaacgcgcgcggcctcgcgcgcaagccgtgggtgaagagctcgctcgcgcccggctcgaaggcggtcgagctgtacctgaaggaagcgaacctgctgccggagctggagaagctcggcttcggcatcgtcgcgttcgcgtgcacgacctgcaacggaatgtccggcgcgctcgacccgaagatccagcaggagatcgtcgatcgcgacctgtacgcgacggccgtgctgtccggcaaccgcaacttcgacggccgcatccacccgtacgcgaagcaggcgttcctcgcgtcgccgccgctcgtcgtcgcgtacgcgatcgcgggcacgatccgcttcgacatcgagaaggacgcgctcggccacgacaaggacggcaagcccgtcacactgaaggacatctggccgaccgacgaggagatcgacgcgatcgtcgcgtcgagcgtgaagcccgagcagttccgcaccgtctacgagccgatgttcgcgcgtcgcgccgatgccggcgagcgcgcggcgccgctgtacgactggcggccgcagagcacgtacattcgccgtccgccctactgggaaggcgcgctcgcgggcgagcgcacgctcgcgggcatgcgcgcgctcgccgtgctcggcgacaacatcacgaccgatcacctgtcgccgtcgaacgcgatcctgccgacgagcgcggcgggcgaatacctcgcgaagatgggcctgcccgaggaggacttcaactcgtacgcgacgcaccgcggcgatcacctgaccgcgcagcgcgcgacgttcgcgaacccgacgctcgtcaacgagatggcggtcgtcgacggcgaagtaaagaagggctcgctcgcgcgcgtggagccggaaggcaaggtcatgcggatgtgggaggcgatcgagacctacatgaaccgcaagcagccgctcgtcgtgatcgcgggcgcggattacggccagggctcgtcgcgcgactgggcggcgaagggcgtgcggctcgcgggcgtcgaggcgatcgtcgcggagggcttcgagcggattcatcgcacgaacctgatcggcatgggcgtgctgccgctcgagttcaagccgggcgtgaaccgcacgacgctcgcgatcgacggcaccgagacgttcgacgtgatcggcgagcgcacgccgcgcgccgacctgacgctcgtgatccgccgcaggaacggcgagcgcgtcgaggtgccggtcacgtgccggctcgatacggccgaggaagtgtcgatttacgacgcgggcggcgtgctgcagcgcttcgcgcaggactttctcgaatcgtcgaaggcggcgtga

SEQ ID NO: 67021 - protein, 864 aa, Burkholderia thailandensis E264
MNTANRKPLPGTPLDYFDARAAVDAIRPGAYDTLPYTSRVLAENLVRRCDPAILADSLTQLIERKRERDFPWFPARVVCHDILGQTALVDLAGLRDAIAERGGDPAKVNPVVPVQLIVDHSLAVECGGFDPDAFAKNRAIEDRRNEDRFHFIEWTKKAFENVDVIPPGNGIMHQINLEKMSPVIQAQDGVAYPDTCVGTDSHTPHVDALGVIAIGVGGLEAENVMLGRASWMRLPDIVGVELTGKRQPGITATDVVLALTEFLRKEKVVGAYLEFRGEGAKSLTLGDRATISNMAPEYGATAAMFFIDEQTIDYLRLTGRSDEQVKLVETYAKAAGLWADSLANAQYERTLTFDLSSVVRNMAGPSNPHRRLPTSDLAARGIAGKWEEKPGEMPDGAVIIAAITSCTNTSNPRNVIAAALLARNANARGLARKPWVKSSLAPGSKAVELYLKEANLLPELEKLGFGIVAFACTTCNGMSGALDPKIQQEIVDRDLYATAVLSGNRNFDGRIHPYAKQAFLASPPLVVAYAIAGTIRFDIEKDALGHDKDGKPVTLKDIWPTDEEIDAIVASSVKPEQFRTVYEPMFARRADAGERAAPLYDWRPQSTYIRRPPYWEGALAGERTLAGMRALAVLGDNITTDHLSPSNAILPTSAAGEYLAKMGLPEEDFNSYATHRGDHLTAQRATFANPTLVNEMAVVDGEVKKGSLARVEPEGKVMRMWEAIETYMNRKQPLVVIAGADYGQGSSRDWAAKGVRLAGVEAIVAEGFERIHRTNLIGMGVLPLEFKPGVNRTTLAIDGTETFDVIGERTPRADLTLVIRRRNGERVEVPVTCRLDTAEEVSIYDAGGVLQRFAQDFLESSKAA

SEQ ID NO: 67022 - DNA, 1932 bp, Syntrophus aciditrophicus SB
  CDS (1)..(1932): transl_table=11
atgaaaaaaactctgactcagaaaattcttgaatcccatatggtatccggaagttacgttccgggaaatgaaatagccatccgaatcgaccagactctgactcaggacgccacgggaacaatggcctatctccagttcgaatccctgcgtatatccagagttaaaactgaactatccgtcagttatgtcgatcacaatacagtgcagatcggatatgaaaatgccgatgatcatcgataccttcaaagcgtcgctgaaaaattcggcatttacttttcccgcccgggtaacggcatctgtcaccaggttcatctggaacggttcggcaggccgggaaaaaccctgatcggttcagacagtcatacgcccactggtggcgctctgggaatgatcgccatcggcgccggtggcctcgatgtcgccctggccatggcaggagaacctttctatctgacctgcccgaaagtgattaaaatttatcttctgggacgtcttcagccctgggtgtccgcgaaggacatcattctgaaagtgctcgatctcttcggcaccaaaggaaatgtggggtatgtatttgagtatgacggccccggacttgaaactctgacagttcctgaacgggcaacgatcgcgaatatgggggcggagtgcggcgtgacgacctcggttttccccagcgatgccatgacccggcgtttcctgaaagcgcagcagcgtgaaggagactggattgaaattcgggccgacagggattccgaatacgaccgggttgtggagatcgatctctccgagttgatcccgttgaccgcgaaacccagcagcccgggcaatatctccccgataagggaatgcggcccggtcaagatccggcaggtctgcctggggagctgcaccaattcgtcatacaaggatctggctacagtcgcgcaaatcctgaaaggaaaagtaactcatcccgacgtcagtttcattatcgctcccggctccaagcaggttcttgaaaatctcgcccgtgacggccaccttgccgatctgctttccgccggtgcgagactcatggaaaatgcctgtggattctgcattgggaacagtcagagtcccccgactggatcggcctccctcagaacatccaatcgtaactttcccggacggtcaggcacgttggacgcagaggtctatatcgccagtccggaagcggctgccgcatccatcatcaccggtaagatgacggacccgcgggatctggggattccctaccccgaggtttccatgccggaaaccttttacgtcgatgaccgaatgatcctcaaaccaaaggatgccgaggcagcctcagcggtcatcatctatcgcgggccgaatatcggcccgcccccgaccaacgatcctctccccattcaactggatggcgtagtgactctgaaggtcagagacaatataacgaccgaccacatcattcccgcaggtaaacggatgaagtaccgctccaacatcccgaaatatgcggagtatctctttgaaatagtggacaatacattttatgaacgggcgatgaagatcaaggaaagcggtcgccacaatgtgattgtggcaggactctcctacggccagggttcttcaagggaacatgccgcactatgccctatgtatgtgggtgtgaaagccgtccttgccagatcctttgaacggattcatgccgcgaacctggtcaatttcggcatcctccctcttacttttctcaacgaagaagactatgaccgattcgtacagggagatgaaattcacgtaccggatatccggaacagcctcagtggccccggtgtgctgcagattcataatgtgaacaggaacatcgtcattgaagtgtccttccaactcaccgaacggcagaagcagatcctgctggcaggcggggccttgaacagacgctga

SEQ ID NO: 67023 - protein, 643 aa, Syntrophus aciditrophicus SB
MKKTLTQKILESHMVSGSYVPGNEIAIRIDQTLTQDATGTMAYLQFESLRISRVKTELSVSYVDHNTVQIGYENADDHRYLQSVAEKFGIYFSRPGNGICHQVHLERFGRPGKTLIGSDSHTPTGGALGMIAIGAGGLDVALAMAGEPFYLTCPKVIKIYLLGRLQPWVSAKDIILKVLDLFGTKGNVGYVFEYDGPGLETLTVPERATIANMGAECGVTTSVFPSDAMTRRFLKAQQREGDWIEIRADRDSEYDRVVEIDLSELIPLTAKPSSPGNISPIRECGPVKIRQVCLGSCTNSSYKDLATVAQILKGKVTHPDVSFIIAPGSKQVLENLARDGHLADLLSAGARLMENACGFCIGNSQSPPTGSASLRTSNRNFPGRSGTLDAEVYIASPEAAAASIITGKMTDPRDLGIPYPEVSMPETFYVDDRMILKPKDAEAASAVIIYRGPNIGPPPTNDPLPIQLDGVVTLKVRDNITTDHIIPAGKRMKYRSNIPKYAEYLFEIVDNTFYERAMKIKESGRHNVIVAGLSYGQGSSREHAALCPMYVGVKAVLARSFERIHAANLVNFGILPLTFLNEEDYDRFVQGDEIHVPDIRNSLSGPGVLQIHNVNRNIVIEVSFQLTERQKQILLAGGALNRR

SEQ ID NO: 67024 - DNA, 2784 bp, Frankia sp. CcI3
  CDS (1)..(2784): transl_table=11
atggacaccttcggcagtaccggatcgctcgtggtgggtgatcgcacctacacgatcaggcggctggacgcggtgcccggggccgatcgactcccctacagcctcaaggtgctgttggagaaccttctgcgtaccgaggacggcgcgaacatcaccgcggaccacgtccgggcgctggcgaactgggatccctcggccgcccccagccaggagatccagttcacgcccgcccgcgtcatcatgcaggacttcaccggtgtgccgtgtgtggtggaccttgccgccatgcgggaggcgatggccgccctcggcggcgacccatcgaagatcaatccgctggcccccgccgagctcgtgatcgaccactcgatcatcgccgaccacttcggccggccggacgcgttcgagctcaacgcggcgctggagttcggccgcaaccgggagcgttaccagttcctgcgctggggtcaggaggcgttcgacaacttcaccgtcgtcccgccgaacaccggcatcgtgcaccaggtcaacctggagcacctcgcccgggtcgtcttcacgaagcagacggccgatgggacgctggcctaccccgacaccctcgtgggcacggacagccacaccacgatgatcaacggtctcggcgtgctcggctggggcgtcggcggcatcgaggccgaggccgccatgctcggccagccggtgagcatgcttatccccactgtggtgggcttcaagctgaccggcgagctgccgacgggcaccaccgcgaccgacatggtgctcgtcattaccgagatgctgcgtcggcacggcgtcgtcggccggttcgtcgagttctacggcgacggcgtgacgaacgtcccgctggcgaaccgggcgaccatcggcaatatgagccccgagtacggctccacctgcgcgatcttcccgatcgacgcggagacactgaactacctcaggctgaccggccgtcccgcggagctggtggcgttggtcgaggcgtacgccaaggagcagggcctctggcacgacccgagccgcgaggccgcttacacgaccacccttgagctggacctgtccaccgtcgagccgtcgcttgccgggcccaagcgcccgcaggaccgggtgccgctggcgagcgcgaagcaggccttccgggcggcgttggtcgactacgcccagcccctggtgctcacgaacggcggcgcggacgaggcggatgccgagtccttcccggcctccgacccggcggccgcattcgccgacaagccctccgacgccccgatctcggtgaacgccgtggtcggggacgtcgccgcccgcccgtccaacccgacggcggtcaccctcgccgacggcacgggcgtcgagatcgaccacggcgccgtcgccgtcgcggccatcacctcctgcaccaacacgtccaacccgcaggtcatgatcggcgctgccctgctggcccgcaacgccgtcgagaaggggctcacccgcaagccgtgggtgaagaccaccctcgcgccgggctcgaaggtggtcatggactactacgagcgggcggggctcgtgccctacctggacaaggtcggcttcaacctggtcgggttcggctgcaccacctgcatcggtaactccgggccgctgccggaggagatcagtgccgcggtgaacgacgcggacctggcggtggtcagcgtgctgtcgggcaaccgcaacttcgagggccggatcaaccccgacatcaagatgaactacctggcgtccccgccgctggtggtcgcctacgcgctggccggcaccatggacatcaacctcgacaccgacccgctgggcaccggcaccggcggggagcccgtctacctgcgtgacatctggccgagcgaggccgaggtcgccgcggtcgtcggcgacgccatccagtccgagatgtacgagtccgactacgccgacctgtccggtgacgagcgctggcgttcgctgccgctcggtgatggcggggaggtgtcgcggacgttcgcctgggcgcccgactccacctacgtccggcaccctccgtacttcgaggggatggcggcgaagccggaggcccggaccgacatcatcgacgcccgggtgctggcggtgctcggcgactcggtcaccaccgaccacatctccccggctggttcgatcaagaaggactcgcctgccggccgctacctcaccgagcacggggtcgcgcccgccgacttcaactcctacgggtcgcggcgcggcaaccacgaggtgatgatccgcggcacgttcgccaacatccggttgcgcaaccggctggcgccgggcaccgagggcggcgtcacccggcacctgccagacggcgagcagctggccatctacgacgccgcgcagaaatacgccgccgagggtgtgccgctggtgatcctggctggtaaggagtacggctcgggttcctcccgggactgggcggcgaagggtacctcgctgctcggcgtgcgggcggtcatcgccgagtcctacgagcgcatccaccggtcgaatctgatcggtatgggcgtgctgccgctgcagttccccgccggcgagtcggtggagtcgctcggcctgaccggggaggagacgttcaccatcacgggcctcgccgaggtggacgagaggaccccgcccatcacggtacgtgccggcgacaagaccttcgaggcggtcgtgcggatcgacacccccggcgaggcggagtactaccgccacggcgggatcctgctgtacgtcctgcgctcgttgctgtag

SEQ ID NO: 67025 - protein, 927 aa, Frankia sp. CcI3
MDTFGSTGSLVVGDRTYTIRRLDAVPGADRLPYSLKVLLENLLRTEDGANITADHVRALANWDPSAAPSQEIQFTPARVIMQDFTGVPCVVDLAAMREAMAALGGDPSKINPLAPAELVIDHSIIADHFGRPDAFELNAALEFGRNRERYQFLRWGQEAFDNFTVVPPNTGIVHQVNLEHLARVVFTKQTADGTLAYPDTLVGTDSHTTMINGLGVLGWGVGGIEAEAAMLGQPVSMLIPTVVGFKLTGELPTGTTATDMVLVITEMLRRHGVVGRFVEFYGDGVTNVPLANRATIGNMSPEYGSTCAIFPIDAETLNYLRLTGRPAELVALVEAYAKEQGLWHDPSREAAYTTTLELDLSTVEPSLAGPKRPQDRVPLASAKQAFRAALVDYAQPLVLTNGGADEADAESFPASDPAAAFADKPSDAPISVNAVVGDVAARPSNPTAVTLADGTGVEIDHGAVAVAAITSCTNTSNPQVMIGAALLARNAVEKGLTRKPWVKTTLAPGSKVVMDYYERAGLVPYLDKVGFNLVGFGCTTCIGNSGPLPEEISAAVNDADLAVVSVLSGNRNFEGRINPDIKMNYLASPPLVVAYALAGTMDINLDTDPLGTGTGGEPVYLRDIWPSEAEVAAVVGDAIQSEMYESDYADLSGDERWRSLPLGDGGEVSRTFAWAPDSTYVRHPPYFEGMAAKPEARTDIIDARVLAVLGDSVTTDHISPAGSIKKDSPAGRYLTEHGVAPADFNSYGSRRGNHEVMIRGTFANIRLRNRLAPGTEGGVTRHLPDGEQLAIYDAAQKYAAEGVPLVILAGKEYGSGSSRDWAAKGTSLLGVRAVIAESYERIHRSNLIGMGVLPLQFPAGESVESLGLTGEETFTITGLAEVDERTPPITVRAGDKTFEAVVRIDTPGEAEYYRHGGILLYVLRSLL

SEQ ID NO: 67026 - DNA, 2673 bp, Novosphingobium aromaticivorans DSM 12444
  CDS (1)..(2673): transl_table=11
atgacccaggtcggacaggatacgctcggcacccgcagcacgatgaacgtgggcggcaaggagttcgcctactactcgctcaagaaggcctccgagaagttcggcgacatctcgcgcctgcccttctcgatgaaggtccttctcgaaaacctcctgcgcttcgaggacggtggcttcaccgtctcgaccgacgacgtgaaggcggtggtcgactggcagaagaaccccgccgaatcgaacaacgagatccagtaccgcccggcgcgcgtgctgctccaggacttcaccggcgttccctgcgtggtcgatcttgccgcgatgcgcgatgccatcgccacgcttggcggtgacaccagcaagatcaatccgctggtccccgtgaacctcgtcatcgaccactcggtcatggttgacgagttcggccatcccaaggccttcgaagagaacatggaaatcgaataccagcgcaacatggagcgctacgatttcctcaagtggggttcgaagagcctcaacaacttctacgcagtgcccccgggcaccggcatctgccaccaggtcaatcttgaaaacatcgcgcagacggtgtggaccagcaccgaccagaacggcgcgacggttgcctaccccgacacctgcgtcggcaccgacagccacaccaccatggtcaatggccttggtgtgctgggctggggcgtcggcgggatcgaggccgaggccgcgatgctcggccagcccgtctcgatgctcatccccgaagtggtgggcttcaagttcaccggcgaactgaaggaaggcgtcaccgccaccgacctcgtgctgacctgcaccaacctgctgcgcaagcacggcgtggtcggccgtttcgtcgaatactacggccccggccttgccgccctgtcgctggccgaccgtgcgacgctggccaacatggcacccgaatacggcgcgacctgcggcttcttcggaatcgacgagaagaccctcgactacatgcgcctcaccggccgcgaagaggctcagatcgcgctcgtcgaagcctatgccaaggagcagggcttctggatcgacccgtcggtcgagccgatcttctcctcgacgctggaactcgacctcggcactgtcgtgccctcgctcgccggtcccaagcgcccgcaggaccgcgtctcgcttcccgaagtcgacgacgtgttcaacgccgacatggcgaacacctacaagaagacccccacccgcgttccggtcgaaggcaaggacttcgacatcggtgacggcgacgtcacaatcgcggcgatcacctcgtgcaccaacacctcgaacccgggcgtgctggttgccgcaggcctcgtcgccaagaaggccaacgagctgggcctgaagcccaagccctgggtcaagacctcgctggcgcccggctcgcaggtcgtcaccgactacctgaacaaggcaggcctgcaggaacacctggacgccgtcggcttcaacctcgtcggttatggctgcaccacctgcatcggcaactcgggcccgctcgccgaaccgatcagcaaggcgatcaacgacaacggcctcgtggccgccgccgtgatctcgggcaaccgcaacttcgaaggccgcgtctcgcccgacgtgcgcgcgaacttcctcgcgtcgccgccgctggtcgtcgcctatgcactcaagggcacggtgatcgaggacttcaccaccaccccgatcggcaagagcaaggacggcgctgacgtctatctcaaggacatctggccctcgaacagcgaagtcgcgaccaccatggccggctgcatggaccgcgccatgttccaggcccgctatgccgacgtctacaagggcgatgcgcactggcaggcgatcaacgtcacgggttcggaaacctactcctggcgcgccggctcgacttatgtcgccaacccgccctacttcgaaggcatgtcgatgacgccggctccggtcagcgacatcatcgatgccaagccgctgctcatcctgggcgattcgatcaccaccgaccacatctcgccggccggctcgatcaaggctgacagcccggcgggcaagtggctgatggagcaccaggtcgcgaaggcggacttcaactcctacggcgcgcgccgtggccaccatgaagtgatgatgcgcggcaccttcgccaacatccgcatcaagaacgaaatggtccccggcgtcgaaggcggcttctcgcgctacggcgacgaggtcggctcggtctatgacgttgccatgaagcacaaggccgacggcacgccgacggtcgtgatcgcgggcaaggaatacggcacgggctcttcgcgcgactgggcggccaagggcaccaacctgctcggcgttcgcgccgtgatcgtcgagagcttcgagcgcatccaccgctcgaacctcgtcggcatgggcgtgctgccgctccagttcaaggaaggccagaaccgcacctcgctcgcgctctcgggcgacgacaccttcacgatcaagggcgtcgcgaacctccagccgcgccaggacgtggaagtcgaagtgacgcgcaaggacggcaccaagctgaccttcaccgcactgtgccgcatcgataccgccaacgaagtcgagtacttcatgaacggcggcatcctgcactacgtgctgcgcaagctcgcttcgtaa

SEQ ID NO: 67027 - protein, 890 aa, Novosphingobium aromaticivorans DSM 12444
MTQVGQDTLGTRSTMNVGGKEFAYYSLKKASEKFGDISRLPFSMKVLLENLLRFEDGGFTVSTDDVKAVVDWQKNPAESNNEIQYRPARVLLQDFTGVPCVVDLAAMRDAIATLGGDTSKINPLVPVNLVIDHSVMVDEFGHPKAFEENMEIEYQRNMERYDFLKWGSKSLNNFYAVPPGTGICHQVNLENIAQTVWTSTDQNGATVAYPDTCVGTDSHTTMVNGLGVLGWGVGGIEAEAAMLGQPVSMLIPEVVGFKFTGELKEGVTATDLVLTCTNLLRKHGVVGRFVEYYGPGLAALSLADRATLANMAPEYGATCGFFGIDEKTLDYMRLTGREEAQIALVEAYAKEQGFWIDPSVEPIFSSTLELDLGTVVPSLAGPKRPQDRVSLPEVDDVFNADMANTYKKTPTRVPVEGKDFDIGDGDVTIAAITSCTNTSNPGVLVAAGLVAKKANELGLKPKPWVKTSLAPGSQVVTDYLNKAGLQEHLDAVGFNLVGYGCTTCIGNSGPLAEPISKAINDNGLVAAAVISGNRNFEGRVSPDVRANFLASPPLVVAYALKGTVIEDFTTTPIGKSKDGADVYLKDIWPSNSEVATTMAGCMDRAMFQARYADVYKGDAHWQAINVTGSETYSWRAGSTYVANPPYFEGMSMTPAPVSDIIDAKPLLILGDSITTDHISPAGSIKADSPAGKWLMEHQVAKADFNSYGARRGHHEVMMRGTFANIRIKNEMVPGVEGGFSRYGDEVGSVYDVAMKHKADGTPTVVIAGKEYGTGSSRDWAAKGTNLLGVRAVIVESFERIHRSNLVGMGVLPLQFKEGQNRTSLALSGDDTFTIKGVANLQPRQDVEVEVTRKDGTKLTFTALCRIDTANEVEYFMNGGILHYVLRKLAS

SEQ ID NO: 67028 - DNA, 2622 bp, Anaplasma phagocytophilum HZ
  CDS (1)..(2622): transl_table=11
atgacgtgtttggatactttgcaagtacgaaaaaagttgtgtgttgctggggtatcctacgattattacgcgctagatttagcatgtcagaagctgggtctggatatcgctagcgtgccatttgtttacaggattttgctggagaacttacttcgaaatgaagacggtctacatgttaaactccctgatatagaacggtttgctgcgtgtgtaagtgggggagattcttgtgaagtgaacttcatgcccgctagggtaatgatgcaggattttacaggcgtaccagctttggttgatcttgcgtcaatgcgggattttgtgaaggcgcaggggaaagatcctagcattataaatcctagaatacccgttgatcttgttgtagaccactcattgcaagtggatttctctgggacagaaggcgcattagctgaaaatgttgcgcttgagatgtcacgtaatctagagcgatatcaatttctcaaatggagccagcaggcattcagaaatttacgagttgttcctccaggtactggtatatgtcaccaggtaaatcttgaatatttagccaaagttgtgtggaatcatcagggcgttttgtatccagatactctgattgggacggatagccataccacgatgattaatgggatatcagttcttggttggggtgtcggtggcatagaagctgaagcagcgatgcttgggcagcccattgtgatgtctgtccctgaagttgtagggtttgaaatactcggcgcgctcaaagagggtgtaactgctacagatatggtgttgaccattacagaaatactgcgaagccggaaggtagtagggaaatttgttgagttttatggtgaagggctgaaaaatctgtctgcgtatgatcgggctaccgtcgcaaatatggcgcctgaatatggtgcaacctgtggattctttccatttgatcaaagtacattagattatctttatgtcactggtcgtgatagggagtatctgggtgtcgtagagcagtatatgcggacgcaaggtctgtggtgcgataattgcgaggtatcgtattcggaaaagttaaccctaaacttagaagatatactgcctgtagttgcgggacctaaaaggccccaggataagcttttcctggctcaaataccaaattcgttgccggtgagcacatttggagaagactcgcacttgcctgtgaaaaatggtgatgttgtagtggcggctattactagctgtaccaacacttccaatccgtatgtcatggtggcggcgggaattgttgcacgtaaggcaagaaagttgggtttaaagactaagccatgggtgaagacttctcttactccaggttctcaggttgtagctgagtatcttaagatttcgggtcttcaagacgatttgaatcttctaggatttaacattgttggctatggatgtgctacgtgtataggtaattcggggccgctatcaaaggaaatagaagaatgtgtgcaaagcaataatttgcttgttgcttcagtgttatctgggaataggaactttgaaggtaggatacatccttcagtaaaagctaactttttggcgtcacctcctttggttgtgatcttttccttgagtggtacagtattaatcgatgttaccaaggatcctatatgtgaagatgcgcagggcaaaccggtgtatatgcaggatctatggcctactactgaggaaatagctgagatagtgaataagtttatatctcgtgatatgtttgtcagaaaatactccgatgtgtttttaggagatgctatatggcagagagtagaatcaaagggagatgtcacctatagttggagcgctgaaagtacctatgtacagctacctccgtacttcacagaggctgaaacgaagcagaagaatattgaaggtaacgcgttaaaatgtaactctgcaagagtgctcatgctattgggtgatagcataaccactgatcatatttctcctgcagggaatattgctgctgagagtccagcgggtaaatttctcctgcagagtggggttaaagagggtgatttcaattcttatggctcaagacgcgggaatcacaatgtaatgatacgcggtacattcgcaaatatacgtataaaaaacgagatgttatctggtgtagagggtggatttacacgtcattatccttcacaggaagttttgccaatttttgatgcggccatgcgttactccgaggaaaatactcctctggttataatagcaggtaaggaatatggtactggatctagtagggattgggctgccaaaggtactttacttttgggattggtcgcagttatagccgaaagcttcgagcgtatacataggtcaaatcttgtcgggatgggtgttttgccactaattttcaaggatgaatcccggagtatgttttcagggaacgagactctgactttgtatggtgaaataggagcaagaaaggagataaagtgtgaagtgcgaaaaagcgatgggactgtgaaaactatagcacttgtatgcgcggtgaatactgcgatagaagttgattatctttcttgcggtggtgtgctccattatgttttaaataggatggtgacaggtcaaatgtaa

SEQ ID NO: 67029 - protein, 873 aa, Anaplasma phagocytophilum HZ
MTCLDTLQVRKKLCVAGVSYDYYALDLACQKLGLDIASVPFVYRILLENLLRNEDGLHVKLPDIERFAACVSGGDSCEVNFMPARVMMQDFTGVPALVDLASMRDFVKAQGKDPSIINPRIPVDLVVDHSLQVDFSGTEGALAENVALEMSRNLERYQFLKWSQQAFRNLRVVPPGTGICHQVNLEYLAKVVWNHQGVLYPDTLIGTDSHTTMINGISVLGWGVGGIEAEAAMLGQPIVMSVPEVVGFEILGALKEGVTATDMVLTITEILRSRKVVGKFVEFYGEGLKNLSAYDRATVANMAPEYGATCGFFPFDQSTLDYLYVTGRDREYLGVVEQYMRTQGLWCDNCEVSYSEKLTLNLEDILPVVAGPKRPQDKLFLAQIPNSLPVSTFGEDSHLPVKNGDVVVAAITSCTNTSNPYVMVAAGIVARKARKLGLKTKPWVKTSLTPGSQVVAEYLKISGLQDDLNLLGFNIVGYGCATCIGNSGPLSKEIEECVQSNNLLVASVLSGNRNFEGRIHPSVKANFLASPPLVVIFSLSGTVLIDVTKDPICEDAQGKPVYMQDLWPTTEEIAEIVNKFISRDMFVRKYSDVFLGDAIWQRVESKGDVTYSWSAESTYVQLPPYFTEAETKQKNIEGNALKCNSARVLMLLGDSITTDHISPAGNIAAESPAGKFLLQSGVKEGDFNSYGSRRGNHNVMIRGTFANIRIKNEMLSGVEGGFTRHYPSQEVLPIFDAAMRYSEENTPLVIIAGKEYGTGSSRDWAAKGTLLLGLVAVIAESFERIHRSNLVGMGVLPLIFKDESRSMFSGNETLTLYGEIGARKEIKCEVRKSDGTVKTIALVCAVNTAIEVDYLSCGGVLHYVLNRMVTGQM

SEQ ID NO: 67030 - DNA, 2718 bp, Neorickettsia sennetsu str. Miyayama
  CDS (1)..(2718): transl_table=11
atgaagaagaaactaaaatccgaaataagctacttcgatataaagctcgagaaaggggtccctaatcttccctgtgtaattaagatactggtagagaatgcactgagaaatggagaaaaagattcagttgtgagggcattatgcaattacaaacggcatattggaaacctcactgtggattactatccctctcgcgtgctaatgcaggattttactggcgtacctgctatagtagatttagcagccctacgtgacaccgtttctaaagcacaaggagaccccagaagcgtaaacccaaaaatcccggtggaccttgttatagaccactcgattcaggttgattcttatggcaaggcaagctcggccaccgaaaataaaacaatagaatttcaaaaaaacatagagagatacaaattcttaaaatgggcccaaaggtcctttcagaattttcgagtagttccaccaggaactggtatttgccatcaagtcaatctagagtacctggcacaggttgtccgcacagaacggcaagaaacagaagtattagcatatccagataccctcgtaggtacagacagtcatactactatgagcggtggtctctccgtgcttgggtggggtgtcggtggaatagaggccgaatcagtggtgttgggtgaacctatttcgatggtaattcctgaagtaattggattaaaacttgaaggaaaattaaaagctggtcttactgcaactgatctggttctacacattactcacctacttcgaaaacacaaagtagtaggaaaattcgttgaagtctttggtgatggagtcaggaacctttctgtcgcagatcgagcaacaatagcaaacatggcacctgaatgcggttcgacttgcaatttctttgctccggatcaaaagacactagattatctcgacctcacagggaaaacacaggaacaaatcgacctagtagaagactatacaaagagtcaaacaatgtgggcagattacgcacgtgcaacagacttcgtagacgtgattgagctggatctctgtgaggttcgtacgacccttgcaggaccaaaaagaccacaagacaagatacctctccacttggtaccagagaactttaataaggtatgtattcgttctgaagaaaaggtggaaacttcttccgcacctgatgaagaatgtattcaagtaccgcaaacttctgtagatagattggcagattcgcccaagcttcaaaatgggtccatagtgattgccgcaatcacgagttgtacaaatacttctaacccatctgggatgattgcagcaggcctgttggcaaaaagagctgtacaatctgggctacgcgtaaagaactgggtgaagacatctcttgcacctggatcccaagttgtctcagaatatttgaagcagtctggactacaggactatctggacaagctgggttttaacatcgtgggttttggttgcacgacttgtataggtaattcgggtgaattgaaagaggaaatctctgaggaaatcgatgagaaagatctagtagtagtatctgtactttccggtaaccgtaactttgaaggcagaattcattcaaaagtaaaagcaaattacctagcttcgcccatgctcgtggttacttatgctattgcgggcaatataaacgtaaacctagagtctcaacctcttgggtatgataaaagcggtaaagcaatatacctaagagatatcaccccctcagatgatgaaattgatgcttatgttcgtcgcgtcctcagaagggagatattcttgtcaaaatatcaggatgttttcttaggcgacaagaactggcaacaattagagtgtactagctcagtcacttacaaatgggacgaaaactgtacctatattaaaagtcccccattttttaggagtgatgatcaggtcagccttcaggatataacttctaagatcaatgaaaaagtagatcaccaccctgcgaaatttgatatatcagtgaggaatgcacgaatacttgccatcttcggggatactatcacaactgaccacatctctccggctgggacgattcctgtagagagcccagcaggggagtacctgaagacattaggtgtaactccacagcaattcaattcttatggagcccggcgaggtaatcatgaggtcatgatacgtggcaccttcgcgaacacaaggatcaaaaataagatacttgagaatgtcgagggaggatatacgactcatttcagccgtgatggtagagaggaaatcgttagtatctatgaagcagcaatgcgttacaaatcctctggaaccaatcttgttatttttgcaggtaaggaatatggtactggctcaagtcgcgattgggctgcaaagggcacgtacttgcttggcatcaaggcggtgatagcagaaagtttcgaacgcatccatagaagcaacctagttggcatgggcgttcttccgcttgtttattctgatcctaaagaatacagtcgcttagaacttactggcagggaaattgttactatagagttggaagacaacctttcaccgatgtgcaaaataaagtgtcaacttatcaaagaaacaggtgtaacacttcctctaaggcttatcctaatggttacaacggagaaagagatgaattatgtaaaagttggtaatatactaaagtacgtgctcaaagaatcttttctagaacaaaagcactaa

SEQ ID NO: 67031 - protein, 905 aa, Neorickettsia sennetsu str. Miyayama
MKKKLKSEISYFDIKLEKGVPNLPCVIKILVENALRNGEKDSVVRALCNYKRHIGNLTVDYYPSRVLMQDFTGVPAIVDLAALRDTVSKAQGDPRSVNPKIPVDLVIDHSIQVDSYGKASSATENKTIEFQKNIERYKFLKWAQRSFQNFRVVPPGTGICHQVNLEYLAQVVRTERQETEVLAYPDTLVGTDSHTTMSGGLSVLGWGVGGIEAESVVLGEPISMVIPEVIGLKLEGKLKAGLTATDLVLHITHLLRKHKVVGKFVEVFGDGVRNLSVADRATIANMAPECGSTCNFFAPDQKTLDYLDLTGKTQEQIDLVEDYTKSQTMWADYARATDFVDVIELDLCEVRTTLAGPKRPQDKIPLHLVPENFNKVCIRSEEKVETSSAPDEECIQVPQTSVDRLADSPKLQNGSIVIAAITSCTNTSNPSGMIAAGLLAKRAVQSGLRVKNWVKTSLAPGSQVVSEYLKQSGLQDYLDKLGFNIVGFGCTTCIGNSGELKEEISEEIDEKDLVVVSVLSGNRNFEGRIHSKVKANYLASPMLVVTYAIAGNINVNLESQPLGYDKSGKAIYLRDITPSDDEIDAYVRRVLRREIFLSKYQDVFLGDKNWQQLECTSSVTYKWDENCTYIKSPPFFRSDDQVSLQDITSKINEKVDHHPAKFDISVRNARILAIFGDTITTDHISPAGTIPVESPAGEYLKTLGVTPQQFNSYGARRGNHEVMIRGTFANTRIKNKILENVEGGYTTHFSRDGREEIVSIYEAAMRYKSSGTNLVIFAGKEYGTGSSRDWAAKGTYLLGIKAVIAESFERIHRSNLVGMGVLPLVYSDPKEYSRLELTGREIVTIELEDNLSPMCKIKCQLIKETGVTLPLRLILMVTTEKEMNYVKVGNILKYVLKESFLEQKH

SEQ ID NO: 67032 - DNA, 2628 bp, Ehrlichia chaffeensis str. Arkansas
  CDS (1)..(2628): transl_table=11
gtggagtttttagattctcttaatgcgaagaaaaagttagtctcaggaaaaaattgttatgaatactttagtttaagaactgcagctagtaagttaggggttgatgttactaagttgccgtattcgttgaaagtattgtttgagaatttattacgtaatgaagatggtcgtaatgttagagttgaagatataaagaaattagcacaatgtgttaataagcatgtaagctatgaaattaatttttctccagctcgggtattaatgcaagattttactggagtaccagcaatagttgatttagctgcaatgcgtgattatgtaagagaaaatggtagtgatcctagcataattaatcccaaagtaccagttgatttagttattgatcattcaatacaagttgatttttatggaaaagaggatgcatttaataaaaatgtatctatggaaatacaaagaaatttagaaagatataggtttttaaaatggggacagaatgctttcaaaaattttcgtgttgtgcctcctggagctggtatatgtcatcaagtaaatttagaacatattgctaaagttgtatgggataaggaaaatttagtatatccagacactttagtaggtactgatagccatactactatgattaatggattatctgtcttaggatggggagtaggtggtatagaagctgaagcagtaatgttaggtcagcccattactatgctgattcctaaagttataggatttaaattgacaggaaaattgtctgaaggtgttactgcaacagatatggtattgactattactaatatcttgagaagtaaaggggttgtaggaaagtttgttgaattttatggagatgggttaagtgggttatccattgctgatagagctactattgctaatatgtctcctgagtatggtgcgacgtgtggttttttcccgatagataataaaactttagaatatttggaaatgacaggacgtgatttatcactgatagatttagtagaatcctatgctaaggagcagtgtttgtggtataccaaagaagagccacgttatgatgataagatagagtttaatctggaaacagtacagcctgtacttgctggtccaaaaagacctcaagataaaatttttctttctgaagtaaaagcaacgttacagaacctattgccaaattcaagatcaacagttaatttagcagaaagttctttacaggatggtgatgttgttattgctgcaataactagttgtactaatacatcaaaccctagtgttatgattgctgcaggacttgttgcgcgcaaagcaaatatgttaaatttaaaatctaagccatgggtaaaaacttcattagctccaggttcacaggttgttacggaatatttggttaagtcgggattacaaaaagatttaaatgcattaggattcaatttggttggttatggatgtactacttgtataggaaattctggtcctctaagttcagatattgagaaaaatataaaagaaaataatttggtagttgcatctgtactatctggtaatcgtaactttgaagggagaatacatccttgtgtaaaagctaattttttagcttctcctcctcttgttgtagcttatgctttagctggaactgttaatattaatattcatttggatccaatagctgtggatgatgatggcaaagatatctatttgcatgatatatggccttctaatgatgagataaatgaagttatttgtaagactattaataaacaaatgtttgttgataaatataagaatatttttgatggagggaaatattgggaagatttaaaatgtattgatagtgatatctatgcatgggatatagatagtacttatatacagagccctacttattttaaaaatttatctcctaatatggatatcaataataatcttaatattaataacgcgagaattttggctttactaggtgatagtgtcactactgatcatatttctccagctggtaacattgctgaaaatagtccagcaggtaagtttttaatgcagaataatgttgtagtatcagactttaattcatatggctcacgtagaggaaatcatcacgtaatgacgcgtggtacctttgctaatattcgtgtacgtaatgagatggtaagttgtgaaggtggttttactaaatatgtgcctacaggtgaagaaatgtcgatatttgatgcatcacaactttatcaacaaaataacataccattggttgttattgctggaaaagaatatggtagtggttcaagtagggattgggcagctaaaggtactttctttttgaatattaaggctattatagctgaaagttttgaacgtatacatagatctaatcttattggtatgggtatattaccattaatctttgaagagggagatacaaggaaaactttaaatcttgtaggtgatgaagaaattagtattgttggtgagattggtataaatcaggaagtagaatgtattattattagaaaagaaactcgtagaagtataagattaatttgtaatctcaatactgctattgaagttgactattttaaaagtggtggtgttttacagtatgtactaatgaagatgatgtccagctaa

SEQ ID NO: 67033 - protein, 875 aa, Ehrlichia chaffeensis str. Arkansas
MEFLDSLNAKKKLVSGKNCYEYFSLRTAASKLGVDVTKLPYSLKVLFENLLRNEDGRNVRVEDIKKLAQCVNKHVSYEINFSPARVLMQDFTGVPAIVDLAAMRDYVRENGSDPSIINPKVPVDLVIDHSIQVDFYGKEDAFNKNVSMEIQRNLERYRFLKWGQNAFKNFRVVPPGAGICHQVNLEHIAKVVWDKENLVYPDTLVGTDSHTTMINGLSVLGWGVGGIEAEAVMLGQPITMLIPKVIGFKLTGKLSEGVTATDMVLTITNILRSKGVVGKFVEFYGDGLSGLSIADRATIANMSPEYGATCGFFPIDNKTLEYLEMTGRDLSLIDLVESYAKEQCLWYTKEEPRYDDKIEFNLETVQPVLAGPKRPQDKIFLSEVKATLQNLLPNSRSTVNLAESSLQDGDVVIAAITSCTNTSNPSVMIAAGLVARKANMLNLKSKPWVKTSLAPGSQVVTEYLVKSGLQKDLNALGFNLVGYGCTTCIGNSGPLSSDIEKNIKENNLVVASVLSGNRNFEGRIHPCVKANFLASPPLVVAYALAGTVNINIHLDPIAVDDDGKDIYLHDIWPSNDEINEVICKTINKQMFVDKYKNIFDGGKYWEDLKCIDSDIYAWDIDSTYIQSPTYFKNLSPNMDINNNLNINNARILALLGDSVTTDHISPAGNIAENSPAGKFLMQNNVVVSDFNSYGSRRGNHHVMTRGTFANIRVRNEMVSCEGGFTKYVPTGEEMSIFDASQLYQQNNIPLVVIAGKEYGSGSSRDWAAKGTFFLNIKAIIAESFERIHRSNLIGMGILPLIFEEGDTRKTLNLVGDEEISIVGEIGINQEVECIIIRKETRRSIRLICNLNTAIEVDYFKSGGVLQYVLMKMMSS

SEQ ID NO: 67034 - DNA, 2352 bp, Desulfitobacterium hafniense Y51
  CDS (1)..(2352): transl_table=11
atgatacgtttaattgaaaacggtatataccttattcaaggtaagcaagccttggaggtaaaagatacaaatgttctttgggatcttaatggtcagaccgttgatccggagcagctttccacggaagaattcccggatcgtgaaaaggcccgtaaaaataccatggcttatcagattctctcccggcataatgcctccggaaacatggatgatctgaagattcgctttgatgccttaacttctcatgacatcacctatgtggggattgtgcagacggcaagggccagcggcttgaaggaattcccgattccctatgtgctgaccaactgccataacagtttgtcggcggtgggtggaaccatcaacgaagatgatcatgtcttcggtttgtctgcggctcaaaaatacggcggtatctatgttcctgcccatcaagcggtcatccatcaatatatgagggagatgatgacaggctgcggcagcatgattctgggctcggacagccatacccgttacggcgcctttggcaccatgggagtgggggaagggggaccggagctggtcaagcagcttctcagcaaaacctatgatgtgaaatatcccggtgtggtggccatctatctggaaggcaagccccgccctggcgtaggtccccaggacgtagccctggccattatcggagccgtctttaagaatggctttgttaagaataaggtcatggaatttgtgggccccggcattgagaatctatcagtggacttccgcagcggtattgatgtcatgactacagaaaccacttgcttaagctccatttggaccaccgacgatcaagtgaagaagtattatgatatccatggccgcagtgaagcttatgccaagctggagccgggagaagtggcctattatgacggtatggtggtggtggatttaagcaaaatcgtgcccatgatcgctatgcctttccatcccagcaatacctttaccattgccgagctcaatgagaacccttacgatatccttaaacaggtggaagcagaggcaagaaagcagctggataatccccggattaagttcaatctgacggatcggatcgtcaagggccggctccatgtggatcaggccatcgtggcaggctgtgccggcggaagctttgaaaacattatggatgtggccgctatcctggacagccaatcggtggggaacgactacctgtccttcagcgtctatccttccagccagcccatttattatgaactcattaagcggggcgctatcggcaagctgatgcaggccggaacactgatcaagacagctttctgcggtccttgctttggggccggggatgtgcctgccaacggccaattcagcattcgtcataccacgaggaacttccctaaccgggaaggctccaaacccggagaactgcagatatcttcagttgccttgatggacgcacgttctattgccgccacagtgattcgcggtggccggctgaccccggcgacggagattgattttactcccgcagaagctgattatgaatttaatgccgatatctatgccaagagagtgtatcaaggtttcggcaaacccctccttaagtcggaattgaagttcggccccaatattgccgactggccggagatgattgccctccccgagaatattctcttgaaatttgcggccgtcattcacgatcctgtcaccaccacagatgagttgattccttcgggagaaacctcctcttaccgctccaaccctctgcgacttgcagaatttaccctttcccggaaagaacctcagtatgtggaacgtgccaaaggggtgcaagtcttggagaaagaacgccgcagcctggtggccggtgccaaggatttgaccggcctgagcgatggtttgcgcggattggccgagcaaatcctccaggcagctcctgcctatactcatctgcaggaggccctggccgacaccgggatcggtacagtgatctatgccgtgaagcctggggatggttcagcccgggagcaggctgcatcctgtcagaaggtcctgggaggatgggccaatatcgctcaggagtacgctaccaaacgttaccggagcaacctgatcaactggggaatgttgccctttacctgggataatgaccctgagatcgttttccatgtggatgatgtgctttttgtcccgggaattcgccagagcatcatcagtgaagccgaaacggttacagggcagttgtttactgctcatgggattaaagaggttaagcttcagctcaatccgctgactcaggacgagagagagattatcctccagggaagccttattaactactatgccgccaactga

SEQ ID NO: 67035 - protein, 783 aa, Desulfitobacterium hafniense Y51
MIRLIENGIYLIQGKQALEVKDTNVLWDLNGQTVDPEQLSTEEFPDREKARKNTMAYQILSRHNASGNMDDLKIRFDALTSHDITYVGIVQTARASGLKEFPIPYVLTNCHNSLSAVGGTINEDDHVFGLSAAQKYGGIYVPAHQAVIHQYMREMMTGCGSMILGSDSHTRYGAFGTMGVGEGGPELVKQLLSKTYDVKYPGVVAIYLEGKPRPGVGPQDVALAIIGAVFKNGFVKNKVMEFVGPGIENLSVDFRSGIDVMTTETTCLSSIWTTDDQVKKYYDIHGRSEAYAKLEPGEVAYYDGMVVVDLSKIVPMIAMPFHPSNTFTIAELNENPYDILKQVEAEARKQLDNPRIKFNLTDRIVKGRLHVDQAIVAGCAGGSFENIMDVAAILDSQSVGNDYLSFSVYPSSQPIYYELIKRGAIGKLMQAGTLIKTAFCGPCFGAGDVPANGQFSIRHTTRNFPNREGSKPGELQISSVALMDARSIAATVIRGGRLTPATEIDFTPAEADYEFNADIYAKRVYQGFGKPLLKSELKFGPNIADWPEMIALPENILLKFAAVIHDPVTTTDELIPSGETSSYRSNPLRLAEFTLSRKEPQYVERAKGVQVLEKERRSLVAGAKDLTGLSDGLRGLAEQILQAAPAYTHLQEALADTGIGTVIYAVKPGDGSAREQAASCQKVLGGWANIAQEYATKRYRSNLINWGMLPFTWDNDPEIVFHVDDVLFVPGIRQSIISEAETVTGQLFTAHGIKEVKLQLNPLTQDEREIILQGSLINYYAAN

SEQ ID NO: 67036 - DNA, 2724 bp, Acidobacteria bacterium Ellin345
  CDS (1)..(2724): transl_table=11
atgaacagctttgatagccgtgccgtactccgcgtggatggtcgcgagtacgaaatctaccgccttgacgccctcgacaagcagggctttaacgttgcgcgcctgcccttctcgctgcgcatattgctggaaaacctgctgcgccgcgaagacgggcgcaatgtgaaggccgacgaaatccgcgccctggccgggtgggacccgaaggccgtacccgcgcaggaaatcgcctttatgcccagccgcgtgctgctgcaggacttcaccggcgtgcccgccgtggtggacctggccgcgatgcgcgaggcgatgaaggccctcggcggcgatgcgacaaaaatcaatccgctgcagccggccgagctggtgattgaccactcggtgcaggtggatgagtttggctccgccaaagccttcgacctgaacgccgagctggagttcatccgcaacaaggagcgctacgcgttcctgcgctgggggcaaacggcgttcaagaacttcgccatcgtgccgccggacaccggcattgtgcaccaggtgaacgtcgagtacctggcgcgcgttgtgtttgtggcgcagcaggggtcgaatggcagcagcaaggccgtggcgtatcccgacacgctggtgggcaccgactcgcacacgacgatggtcaacgggcttggcgtgctgggctggggcgtgggcggcattgaagccgaggccgccatgctcggccagcctgtctcgatgctgattccgcaagtggtgggcgttcgcctgaccggcaagctgcccgagggcgcgactgccaccgacctcgtattgacgctgaccgaaatgctgcgccgccacggcgtggtcggcaagttcgtggagtacttcggcagcggcttgcgtcacctgccgctggcggaccgtacgacgattgcgaacatggcgcccgaatacggcgcgacttgcggcatcttccccgtggacgacgagacgctgcgctacctgcgcctctcgggccgcagcgaagagcacatcaaactcgtcgaggcgtactgcaaggagcagggactgttccacacgcacgacacgccggaagccgagtacagcgaagtgctcgacctgcacctggcaacggtggagccgagcgtggcggggccgaagcgtccgcaggaccgcgtggtgctgggtcatgttggcgagtctttcgagaaggcgctgccgacgctggtgaagcccggcacgaagctggaagacaacttcaaacacaacgccacgccgaagggcggcgagacagttgcagaaggcgttaaccatggtgcagtggtgatcgcggcgatcacgagttgcaccaatacttcgaacccgagtgtgatgatcggcgccgggctggtcgcgaagaaagctgtcgaaaaaggtctgaagacgccggcgtgggtgaagacgtcgctggcgccgggatcgaaggtggtcaccgactactacatcaagtccggactgctgacgtatctcgaacagctcggtttcaacgtagtcggctacggctgcaccacgtgcattggaaactccgggccgctgccggaagaagtttcgaagcatgtcggcgagaaggacctcgtcgtcgcgtcggtgctgtcgggcaatcgcaacttcgaaggccgcatcaatagcgaagttcgcgcgaattacctgatgtcgccgccgctggtggtggctttcgcgctggcaggacgcattgatttcgatccgacgaaagacgcgatcggcatcggcaacgatggtaacgaagtcttcctgaaagacatttggccaacttcgcaggaagtggatgacgtagtgaactcctgcattgaaggctcgatgttccgcaagagttatggcgacgttttcaagggcgaccagcgctggcaggggctgaacgtcccgaccggcgagaccttcgcgtgggaagacacttcgacctacgtgaagaacccaccgtacttcgagggcatgacgctcacgccgaaagccgtcgaggagatcaagggcgcgcgtgtgctggccgtacttgggcactcgatcactaccgaccacatctcgcccgcgggatcgattaagaaagacgggcccgccggtaagtatctgaccgaacatggcgtgaagatcgccgacttcaattccttcggctcgcgccgcggcaatcatgaagtgatgatgcgtggcaccttcgccaatacgcgcctgcgcaacaagatggtgccgggcaccgaaggcggctataccaagcatctgccgagcggcgagcagatgtcgatcttcgacgcgtcggagaagtaccgcgccgagggcgtgccgacggtgattctcgcaggcaaggagtatggctcgggttcgtcgcgcgactgggcggcgaaggggccgcggctgctcggcgtgcgcgcggtgattgccgaaagcttcgaacgcatccatcgctcgaaccttgtaggcatggggattattccattgcagttcctggaaggcgaagacgtggagaaacacggcctgactggcgatgagacgatcgagatccgcggactcaacgaggcactcgataacttcgcgcccggcaagacagtggaagttctcgccacccacaacaacggcaagacggaaacattccgagctacgctgcgcattgatacaccccaggaagtgcagtatttccgtcacggcggaattctgcattacgtggtgcggcagttggcgggagcagcgaagaattag

SEQ ID NO: 67037 - protein, 907 aa, Acidobacteria bacterium Ellin345
MNSFDSRAVLRVDGREYEIYRLDALDKQGFNVARLPFSLRILLENLLRREDGRNVKADEIRALAGWDPKAVPAQEIAFMPSRVLLQDFTGVPAVVDLAAMREAMKALGGDATKINPLQPAELVIDHSVQVDEFGSAKAFDLNAELEFIRNKERYAFLRWGQTAFKNFAIVPPDTGIVHQVNVEYLARVVFVAQQGSNGSSKAVAYPDTLVGTDSHTTMVNGLGVLGWGVGGIEAEAAMLGQPVSMLIPQVVGVRLTGKLPEGATATDLVLTLTEMLRRHGVVGKFVEYFGSGLRHLPLADRTTIANMAPEYGATCGIFPVDDETLRYLRLSGRSEEHIKLVEAYCKEQGLFHTHDTPEAEYSEVLDLHLATVEPSVAGPKRPQDRVVLGHVGESFEKALPTLVKPGTKLEDNFKHNATPKGGETVAEGVNHGAVVIAAITSCTNTSNPSVMIGAGLVAKKAVEKGLKTPAWVKTSLAPGSKVVTDYYIKSGLLTYLEQLGFNVVGYGCTTCIGNSGPLPEEVSKHVGEKDLVVASVLSGNRNFEGRINSEVRANYLMSPPLVVAFALAGRIDFDPTKDAIGIGNDGNEVFLKDIWPTSQEVDDVVNSCIEGSMFRKSYGDVFKGDQRWQGLNVPTGETFAWEDTSTYVKNPPYFEGMTLTPKAVEEIKGARVLAVLGHSITTDHISPAGSIKKDGPAGKYLTEHGVKIADFNSFGSRRGNHEVMMRGTFANTRLRNKMVPGTEGGYTKHLPSGEQMSIFDASEKYRAEGVPTVILAGKEYGSGSSRDWAAKGPRLLGVRAVIAESFERIHRSNLVGMGIIPLQFLEGEDVEKHGLTGDETIEIRGLNEALDNFAPGKTVEVLATHNNGKTETFRATLRIDTPQEVQYFRHGGILHYVVRQLAGAAKN

SEQ ID NO: 67038 - DNA, 2748 bp, Silicibacter sp. TM1040
  CDS (1)..(2748): transl_table=11
atgcccatcaccgtcggacaggacacagccaaaacacgcaaaacattgagcgtgaacggaaaatctatttcttattactccattccagccgcaacagacgccggatatggtgatttcaccaaactgcctgcagccctgaaagtggtgcttgagaacctcttgaggtttgaagatggcggtttttcggtctcgaccgacgacatcaaggcgtttggcgactgggccaaaaacggcgggaagaacccgcgcgagatcgcctatcgcccggcgcgcgtcctgatgcaggacttcaccggtgtgcctgcggtggtcgatctggccgcgatgcgtgacgggatcaagacccttggcggggatgccaacaagatcaacccgctggtgcctgtcgatctggtgatcgaccactcggtgatgatcgacgaatttggcaacccgcgcgcctttcagatgaatgtggaccgcgaatatgagcgcaatatggagcgctaccaattcctgaaatggggccaaggcgcgttcaacaacttccgcgtggtgccacccggcaccggcatctgccatcaggtgaaccttgaatatctggcccagaccgtctggtcagatgttgaccaaaacggcgaggaagtggcgtatccggatacgcttgtgggcaccgacagccacaccaccatggtcaatggcgcggctgtgcttggctggggcgtgggcgggatcgaggccgaggccgcgatgctaggccagccgatctccatgctgatccccgaggttgtgggttttgaactgaccggcgagatggttgaaggcaccaccggcacagaccttgtactcaaggtggtggagatgctgcgcgagctcggcgtggtgggcaaattcgtggaattctatggctctggcctcgacaacctgccgctggcggatcgtgccaccattgccaatatggcaccggaatatggcgccacctgcggctttttcccgatcgacaaggaaaccatccgctacctgcgcaacaccggccgcgacgaggaccgcattgcgctggttgaaacctacgccaaggaaaacggtttctggcgcgatgagacctacgcgccgatttacaccgagacactgagcctcgacatgggcaccatcgtgccggcaatctctggccccaaacgcccgcaggactatgtggcgctggacggcgcagcgcaggccttcaaacaggtggtatcggagtatcgcggtgtggatgcgtcagccaacgcagccgagatggcgtcagagggccctgccccgaccgcaccggtggatccgtgcaaatcgcaccccgtcaaaggcgaagactttgcgttgcgcgacggctcggtggtgattgcctccatcacctcctgcaccaatacctcaaacccctatgtgatgatcggggccggtctggtggcgaaaaaggcgcatgaactgggcctcaaccgcaaaccctgggtcaaaacctcgctggctccgggctctcaggtggtctcggcataccttgaggccgcaggcctgcaagagcatctggatgcgatcgggttcaacctcgtgggctatggctgcaccacctgtatcggcaactccggcccgatccagaaagagttctccgaggcgattgccgagggcgatctggtcgccacctcggtgctgtcgggcaaccgcaactttgagggccgcatcagcccggatgtgcgcgccaactacctcgcctcgccgccgctggtggtcgcctatgcgttggcgggcgacatgaacgtggatctcgcacgcgatccgctcggccaggacaaagacggcaatgacgtctacctgaaggacatctggcccacccagaaggaaatcgccgatctggtcgaggccactgtgacccgcgaggcgtttcagtccaaatacgccgatgtcttcaagggtgacgaaaaatggcaaagcgtggagaccactgaggccgagacgtacgactggcccgctgcctcgacgtatattcaaaacccgccctattttcagggcatgggcccagagccgggcaagattcaggacgtcatcggcgccaagcctctgttgattctcggggatatggtcaccaccgaccatatctctccggcggggtcttttgcgaccaccacaccggcgggcaaatacctgctggaccgtcaggtgcagccgcgcgagttcaactcttatggctcgcgtcgcggcaaccacgagatcatgatgcgcggcaccttcgccaatatccgcatcaagaacgagatgctcgacggtgttgagggcggctataccaaaggtccagatggtgcgcagacctcggtctatgaggcgtcgatggcgcatcacgaggctggcaccccgctggtggtgtttggcggcgaacaatatggcgccggatcctcgcgtgactgggcggccaagggcaccgcgctcttgggggtgaaggccgttattgccgagagtttcgagcgtattcaccgctccaaccttgtgggcatgggcgtcatcccgttcgagttcaccggaggcgacacccgcaaatcgctcaagctcaccggcgatgaaacggttgacattcggggtctggagaccgtgacaccgctgcaggaggtcgagtgcgacatcacctatggcgacggcagcaaaaagaccatcaccttgaagtgccgcatcgataccgcgccagagatcgaatacatcgagaacggcggcgtgctgcactatgtgctgcgcaacctggccaagagctga

SEQ ID NO: 67039 - protein, 915 aa, Silicibacter sp. TM1040
MPITVGQDTAKTRKTLSVNGKSISYYSIPAATDAGYGDFTKLPAALKVVLENLLRFEDGGFSVSTDDIKAFGDWAKNGGKNPREIAYRPARVLMQDFTGVPAVVDLAAMRDGIKTLGGDANKINPLVPVDLVIDHSVMIDEFGNPRAFQMNVDREYERNMERYQFLKWGQGAFNNFRVVPPGTGICHQVNLEYLAQTVWSDVDQNGEEVAYPDTLVGTDSHTTMVNGAAVLGWGVGGIEAEAAMLGQPISMLIPEVVGFELTGEMVEGTTGTDLVLKVVEMLRELGVVGKFVEFYGSGLDNLPLADRATIANMAPEYGATCGFFPIDKETIRYLRNTGRDEDRIALVETYAKENGFWRDETYAPIYTETLSLDMGTIVPAISGPKRPQDYVALDGAAQAFKQVVSEYRGVDASANAAEMASEGPAPTAPVDPCKSHPVKGEDFALRDGSVVIASITSCTNTSNPYVMIGAGLVAKKAHELGLNRKPWVKTSLAPGSQVVSAYLEAAGLQEHLDAIGFNLVGYGCTTCIGNSGPIQKEFSEAIAEGDLVATSVLSGNRNFEGRISPDVRANYLASPPLVVAYALAGDMNVDLARDPLGQDKDGNDVYLKDIWPTQKEIADLVEATVTREAFQSKYADVFKGDEKWQSVETTEAETYDWPAASTYIQNPPYFQGMGPEPGKIQDVIGAKPLLILGDMVTTDHISPAGSFATTTPAGKYLLDRQVQPREFNSYGSRRGNHEIMMRGTFANIRIKNEMLDGVEGGYTKGPDGAQTSVYEASMAHHEAGTPLVVFGGEQYGAGSSRDWAAKGTALLGVKAVIAESFERIHRSNLVGMGVIPFEFTGGDTRKSLKLTGDETVDIRGLETVTPLQEVECDITYGDGSKKTITLKCRIDTAPEIEYIENGGVLHYVLRNLAKS

SEQ ID NO: 67040 - DNA, 2730 bp, Myxococcus xanthus DK 1622
  CDS (1)..(2730): transl_table=11
atgaccgacagtttcggcacgaagtcccagctcaaggtgggctctgccacctatgacctcttcagcctgggcaagctggcgaaaacccacccggcggtgaaccgcctgccgttctcgctgaaggtcctgctggagaacctgctgcgccacgaggacggtcgtgtggtgaagcgcgagcacgtggagaagatgctggcgtgggaccccaaggccacgccggacgtggaaatctccttccaccccgcccgcgtgctgctccaggacttcacgggcgtacccgcggtggtggacctggcggccatgcgtgaggcgctggcctccatgggcggcaacccggacaggatcaacccgcgcaacccggccgacctggtcatcgaccactcggtgcagattgactccttcgcgacgtccgccgcgttcaaggagaacgccgagctggagttcgagcgcaaccgtgagcggtacgcgttcctccgctggggccagagcgcgttcaagggctttggcgtggttccgccggacatcggcatctgccaccaggtcaacctggagttcctggcgcacgtgacgttccgccagggcagcaccgtgtacccggacacgctggtgggcaccgacagccacaccacgatgatcaacggcctgggcgtggtgggctggggcgtgggcggcatcgaggcggaggccgcgctgctgggccagccgattacgatgctgattccgcaggtggtgggcttcaagctctccggcaagctgcccgcgggcgccaccgccacggacctggtgctcaccgtcacgcagatgcttcgcaagaagggcgtggtgggcaagttcgtggagttctacggcagcggcctgaagaacctgtccctgccggaccgcgccaccatcgcgaacatggcgcccgagtacggcgccaccatcggcttcttcccggtggacgaggagagcctcaactacctgcgcttcaccggccgtcctgacgacctggtggccctcaccgaggcctacgccaaggagcagggcctgtggcggcgtgacgacgccgaggaccccatcttcagcgacacgctggagctggacctgtccaccgtggtgcccagcctcgccggccccaagcgcccgcaggaccgcgtgcccctcaaggacatgaagtccggctacgagaagtcgctggtggagatgctgtcggccggcaagagcaagggcgaggacgaggagggtggcaagggcaaggccgccgccgccgcggtgccgcccgagcgtctggctcagacggtcacggtgaagaacggccgccagagctaccagatgggccacggcgcggtggtgattgcgtcgattacgtcctgcaccaacacctccaacccggcggtgctggtgggcgcgggcatcctggccaagaaggccgtggagcgcggcctcaacccgaagccgtgggtgaagacgtccctggccccgggcagccgcgtcgtcagcgagtacctgcgcgacgccggcctgctgccctacctggaggcggtgggcttccacatcgtgggctacggctgcacgacgtgcatcggcaactccggtccgctgacggagcccgtggccaacgccgtcaccgagggggacctggtcgtcgccgcggtgctgtccggcaaccgcaacttcgaaggccgcatcaacccgcacgtgcgcatgaactacctggccagcccgccgctggtggtggcctacgcgctggcgggcgaagtgggcatggacctggacaacgagccgctgggcaccgaccccaacggacgtcccgtgttcctcaaggacatctggcccaccaacgaggagattcaggaggtcatccgcacctccgtgaagccggagcagttccgcagccagtacgccaacgccatggagggcgacgcgctctggcagcagctgccggtgggcaagggctccacgttccagtgggacgacacgtccacctacgtgcgcaagccgcccttcttcgacaacctgccgaaggagcccaaggcgacgcaggacatccatggcgcgcacgtgatggcgctgctgggtgactccgtcaccacggaccacatctcccccgcgggcaacatcgccaagacgagcccggcggccaagtacctcatggccaacggcgtggagcccaaggacttcaactcctacggcgcgcgccgcggcaaccacgaggtgatggtgcgcggcaccttcgccaacatccgcctgaagaacctgctggtcccgggcgtggagggcggcgtcaccgtccacatccccacgcgcgagcggatgagcatctacgacgcgtccatgaagtaccaggcggagggcacgccgctggtggtgctggcgggcgcggagtacggcaccggctccagccgtgactgggcggccaagggcaccatgctgctgggcgtgaaggccgtcatcgccaagagcttcgagcgcatccaccgctccaacctggtgggcatgggcgtgctgccgctccagttcgaggcgggccaggacgcgcagtcgctgggcctcaccggccacgagaagttcgacatcaccggcgtggcgcaggacctggcgccgcagaagaagctcaccgtgaaggccacgggcgagagcggcaccaaggagttcacggtggtgtgccgcatcgacacgccgaacgagctcgactactaccgccacggcggcatcttgcagtacgtgctccgccaactggccaagggctag

SEQ ID NO: 67041 - protein, 909 aa, Myxococcus xanthus DK 1622
MTDSFGTKSQLKVGSATYDLFSLGKLAKTHPAVNRLPFSLKVLLENLLRHEDGRVVKREHVEKMLAWDPKATPDVEISFHPARVLLQDFTGVPAVVDLAAMREALASMGGNPDRINPRNPADLVIDHSVQIDSFATSAAFKENAELEFERNRERYAFLRWGQSAFKGFGVVPPDIGICHQVNLEFLAHVTFRQGSTVYPDTLVGTDSHTTMINGLGVVGWGVGGIEAEAALLGQPITMLIPQVVGFKLSGKLPAGATATDLVLTVTQMLRKKGVVGKFVEFYGSGLKNLSLPDRATIANMAPEYGATIGFFPVDEESLNYLRFTGRPDDLVALTEAYAKEQGLWRRDDAEDPIFSDTLELDLSTVVPSLAGPKRPQDRVPLKDMKSGYEKSLVEMLSAGKSKGEDEEGGKGKAAAAAVPPERLAQTVTVKNGRQSYQMGHGAVVIASITSCTNTSNPAVLVGAGILAKKAVERGLNPKPWVKTSLAPGSRVVSEYLRDAGLLPYLEAVGFHIVGYGCTTCIGNSGPLTEPVANAVTEGDLVVAAVLSGNRNFEGRINPHVRMNYLASPPLVVAYALAGEVGMDLDNEPLGTDPNGRPVFLKDIWPTNEEIQEVIRTSVKPEQFRSQYANAMEGDALWQQLPVGKGSTFQWDDTSTYVRKPPFFDNLPKEPKATQDIHGAHVMALLGDSVTTDHISPAGNIAKTSPAAKYLMANGVEPKDFNSYGARRGNHEVMVRGTFANIRLKNLLVPGVEGGVTVHIPTRERMSIYDASMKYQAEGTPLVVLAGAEYGTGSSRDWAAKGTMLLGVKAVIAKSFERIHRSNLVGMGVLPLQFEAGQDAQSLGLTGHEKFDITGVAQDLAPQKKLTVKATGESGTKEFTVVCRIDTPNELDYYRHGGILQYVLRQLAKG

SEQ ID NO: 67042 - DNA, 2823 bp, Rubrobacter xylanophilus DSM 9941
  CDS (1)..(2823): transl_table=11
atgacacagggtactacggaagacgccttcggcgctcgcagaaagcttcggctccgctccgggggcgtggactactacagcctcgatgagctcgaccggagggtggggggcgacgtcttctcgctgccgttctccatccgggtcatcctcgagtcgctgctgagaaactgcggcggcaggttcgtctccggggaggacgtggagcggctcgcctcctggcccgactcggtgggcgaggagctcgcctacctgcccgcccgggtcatcatgcaggacttcaccggcgtcccggcggtggtggacctggcggccatgcgcagcgccatggcggccatcgggggggacccgaagaagatcaacccgctcgtcccggcggacctggtgatcgaccactcggtgcaggtggacatgttcggctcggcctacgccctgatgtacaacgccgagcgggagttcgagcgcaaccgggagcgctacgagttcctgaagtggggccagcaggccttcgacaacttcagcgtggtgcccccggccaccgggatcgtgcaccaggtgaacctggagtacctggccagggtggtgcgggagagcggcggggttgccttcccggacaccctggtcgggaccgacagccacaccaccatggtcaacgggctcggggtgctcggctggggggtcggcgggatcgaggccgaggcggtgatgctcggccagccctactacatgctcgtccccgaggtggtgggcttccggctcaccggcgcccttggcgacggggtgaccgccaccgacctggtgctcaccgtcacccagatgctccgcaggcacggggtggtggggaagttcgtggagttctacggcgaggggctctcccggctgagcctgcccgaccgggccaccatagccaacatggcccccgagtacggggcgacggcgagcttcttcccggtggacgaggagacgctccgctacctgcgcggcacgggccgcgaggaggagctggtggagctggtggagcgctacagcaaggagcaggggctcttccggaccgacgagacgccggacccgcgcttctccgagacgctggagctggacatgtccacggtggagtccagcctggcggggccgcggcgcccccaggaccgggtgctcctcggggagatgaagtccagcttccggcgggcgctcaccggcaccttcgagaaggagctgccgccgtacatgtacgaggaggagtcggcggagtccttcccggcgagcgacccgccggcggacaccgcgggggtgaccggggaggggcgccccgacgcccccgaggaggaggcccccgcggaggcccccgagccggcggaggccgaggccgaggtcgagctcgacggggagagggtgcggctgcgccacggctcggtggtgatcgcggcgatcaccagctgcaccaacacctccaacccctcggtgatggtgggggcggggcttctggcgaagaaggccgtggagcggggcctcagggtgaagccgcacgtgaagaccagcatggccccgggctccaaggtggtcaccgagtacctgcagacctcggacctcctgccctacctggaggagctgaacttccaggtggtgggctacggctgcaccacgtgcatcggcaactccggcccgctgcccgagcccgtggagcgggcggtggaggagaacgatctggtggtggcggcggtcctctccggcaaccgcaacttcgaggggaggatcaacccccacgtccgggcgaactacctggcctccccgccgctggtggtggcctacgcgctggccgggacggtggacatcgacctgacgagggagcccctcgggcacgacccggaggggaacccggtctacctgcgggacatctggccctcgcaggaggagatccgggcgcagatagagagcgccctcgacccgaacctctaccggaagcagtacgcgaacgtgtacaccggcaacgagcagtggaacgaggtggaggtgccctcgggcgacctctacgagtgggacccgagctccacctacatccaggagccggccttcttcaaggggctctcgccggagcccgagccgctgcgggacatcaccggggcccgggtgctggtgaaggtcggcgactcgctgaccaccgaccacatctcgcccgcgggctccatcccgccggacagcccggcggggcgctacctgatctcgaagggggtcgagcctaaggacttcaactcctacggctcgcggcgcggcaaccacgaggtgatggtccgcggcaccttcgcgaacatccggctcaggaaccagctggtccccggcagggagggcggctacacggtccacctcccggacggcgaggagaccacggtctacgaggcggccgtgcgctaccaggaggagggcgtcccgctgctggtcatcggcggcaaggagtacggcaccggctcctcccgcgactgggcggccaagggcaccttcctgctcggggtgaaggcggtcctcgccgagagcttcgagcgcatccaccgctcgaacctgatcgggatgggggtcctgccgctgcagttcgccgggggcgagagcgcgggctctctgggcctgaccgggagggagacctacgacgtgctgggcctcgaggacctctcccccggcaaggagctgaccgtccgggccacctccgagggcggcgagacgaaggagttccgggtccgggcgcgggtggactccccggtggaggtggagtacctccgcaacggcggcatcctgcagacggtcctcaggcagctcctgaaggagggttcggcctcctga

SEQ ID NO: 67043 - protein, 940 aa, Rubrobacter xylanophilus DSM 9941
MTQGTTEDAFGARRKLRLRSGGVDYYSLDELDRRVGGDVFSLPFSIRVILESLLRNCGGRFVSGEDVERLASWPDSVGEELAYLPARVIMQDFTGVPAVVDLAAMRSAMAAIGGDPKKINPLVPADLVIDHSVQVDMFGSAYALMYNAEREFERNRERYEFLKWGQQAFDNFSVVPPATGIVHQVNLEYLARVVRESGGVAFPDTLVGTDSHTTMVNGLGVLGWGVGGIEAEAVMLGQPYYMLVPEVVGFRLTGALGDGVTATDLVLTVTQMLRRHGVVGKFVEFYGEGLSRLSLPDRATIANMAPEYGATASFFPVDEETLRYLRGTGREEELVELVERYSKEQGLFRTDETPDPRFSETLELDMSTVESSLAGPRRPQDRVLLGEMKSSFRRALTGTFEKELPPYMYEEESAESFPASDPPADTAGVTGEGRPDAPEEEAPAEAPEPAEAEAEVELDGERVRLRHGSVVIAAITSCTNTSNPSVMVGAGLLAKKAVERGLRVKPHVKTSMAPGSKVVTEYLQTSDLLPYLEELNFQVVGYGCTTCIGNSGPLPEPVERAVEENDLVVAAVLSGNRNFEGRINPHVRANYLASPPLVVAYALAGTVDIDLTREPLGHDPEGNPVYLRDIWPSQEEIRAQIESALDPNLYRKQYANVYTGNEQWNEVEVPSGDLYEWDPSSTYIQEPAFFKGLSPEPEPLRDITGARVLVKVGDSLTTDHISPAGSIPPDSPAGRYLISKGVEPKDFNSYGSRRGNHEVMVRGTFANIRLRNQLVPGREGGYTVHLPDGEETTVYEAAVRYQEEGVPLLVIGGKEYGTGSSRDWAAKGTFLLGVKAVLAESFERIHRSNLIGMGVLPLQFAGGESAGSLGLTGRETYDVLGLEDLSPGKELTVRATSEGGETKEFRVRARVDSPVEVEYLRNGGILQTVLRQLLKEGSAS

SEQ ID NO: 67044 - DNA, 1983 bp, Rubrobacter xylanophilus DSM 9941
  CDS (1)..(1983): transl_table=11
atggccgacaacctggtcaccaagatcttcaaggagcacatggccggcggctctctggagccgggggaggaggtggcgctgcggatagaccagaccctcctgcaggacgccacggggacgatggcctgcctgcagttcgagcgcatgggcgtggaccgcgtgcgggtccccttcgcggtgcagtacgtggaccacaacatcatccagctcgaccacaaaaaccccgacgaccaccgcttcctgcaggccttcgccgccaggtacggcatacactactcccggcccggcaacggcatctgccactacctgcacgtcgagcggttcgccaggcccggcgccaccctcatcggggccgactcgcacaccacgagctccggcgccctcgggtccatcgccatcggggccggcggcctcgacgtggcgctggtgatggccgggcagcccttccagacgcccgcgccgaaggtggtcggcgtcgagctcaccggcgagctctccgactgggtgacgccgaaggacgtgatcctggagctgctgcggcggcgcggcgtgcgcgggggtctgaacaggatcttcgagttctacggcgagggcgttgcgaccatagacgtgacggggcggaccacgatctgcaacatgatagccgagctcggcgccacgaccggcatcttcccctccgacgagcgcacccgcgagtggctggaggcccagcagcgcccggacgacttcgtggagctcgccgccgacgagggcgcctcctacgacgagcacgagcacatcgcgctcgacgagctcgagccgctcatcgccaagccgcactcgcccggcaacgtggtgaaggtcgaggaggtggccggcacgaaggcggcgcaggtgtgcatcggcagctccgtcaactccggcttcgacgacctcgcggtggcggccgccgtcctgcgcgaccagatcgtctaccccggactggtgatgaccgtgaccccggggagccgccagatcctcgactccatcgcccgcaccggcgtctactccgacctggtgctcgccggcgcgaggatgctcgagccggtctgcggcccgtgcgtggggatggggcaggccccgccctcggactccgtgagcgtcaggaccttcaaccgcaacttccccgggcgctccgggacgatgaacgaccacgtctacctcaccaccccgaccgtcgcggcggcgacggcgctgaaaggggtcatcaccgacccgcgcgagctcggggactacccggagctcccgaaggccccggccaacccggaggtggacgaccgccagatcctggaccccgcgccgccggaggaggcggaggggatcgagatcccgcgcggccccaacatcaagccgccgccggaggccccggagctgcccgagtcgctggagtgcacggtcaccatcgtcgtcggggacgacatctccaccggcgacctcgcccccgacggggtggaggtcatggcctaccgctcgaacatacccgagatcgccaggttcaccttccggcgcttcgaccccgagtaccacgagaaggcgcagaggatggcgcccgggttcatcgtcggggggcacaactacgggcagggctccagccgcgagcacgccgccctggccccgctgcacctcgggatccgggcggttctcgccaagagcttcgcgcgcatccaccggcgcaacctgatctcgcagggcatcctccccctgcgcttcagggacgaggacgactacgagaggttcgagcaggggcagaggtgggagctgccggagatccgggagcgcctcgagcggggcgacgaggaggtgccgctgcgctccgagggtggggaggacgtcacgctgctcgccgagttctcgccgcgcgagcgcgagatcctgctctccggcggcgtcctgcggatgctgcgccggaagggcgagggccagccggagggcaccgagcgggtctcgggggaggcggagaggtga

SEQ ID NO: 67045 - protein, 660 aa, Rubrobacter xylanophilus DSM 9941
MADNLVTKIFKEHMAGGSLEPGEEVALRIDQTLLQDATGTMACLQFERMGVDRVRVPFAVQYVDHNIIQLDHKNPDDHRFLQAFAARYGIHYSRPGNGICHYLHVERFARPGATLIGADSHTTSSGALGSIAIGAGGLDVALVMAGQPFQTPAPKVVGVELTGELSDWVTPKDVILELLRRRGVRGGLNRIFEFYGEGVATIDVTGRTTICNMIAELGATTGIFPSDERTREWLEAQQRPDDFVELAADEGASYDEHEHIALDELEPLIAKPHSPGNVVKVEEVAGTKAAQVCIGSSVNSGFDDLAVAAAVLRDQIVYPGLVMTVTPGSRQILDSIARTGVYSDLVLAGARMLEPVCGPCVGMGQAPPSDSVSVRTFNRNFPGRSGTMNDHVYLTTPTVAAATALKGVITDPRELGDYPELPKAPANPEVDDRQILDPAPPEEAEGIEIPRGPNIKPPPEAPELPESLECTVTIVVGDDISTGDLAPDGVEVMAYRSNIPEIARFTFRRFDPEYHEKAQRMAPGFIVGGHNYGQGSSREHAALAPLHLGIRAVLAKSFARIHRRNLISQGILPLRFRDEDDYERFEQGQRWELPEIRERLERGDEEVPLRSEGGEDVTLLAEFSPREREILLSGGVLRMLRRKGEGQPEGTERVSGEAER

SEQ ID NO: 67046 - DNA, 2772 bp, Mesorhizobium sp. BNC1
  CDS (1)..(2772): transl_table=11
atgaccgtacccgcatcctatgagctgtcgcctcaggaagtccgttcccgttcggatgaacagaccaggatgggatcgcacgtgtctaattcactcgacagctataaatgccgccgcaccctcaaagtgggaaacaccgaatacacttacttcgacctcaaggaggcggagaaaaacggtctttccggcgtttcccggcttcccttctccatgaaggttctcctcgaaaatctcctccgcaaggaggatggccgctcggtcaccaagcagagcattgaagcggtggccgcatggctctccgaccgcggctccgccggtgtggaaatcgcctattcgcccgcccgcgttctcatgcaggacttcaccggcgttccggccgtggtggatcttgccgccatgcgtgacgcgatggcctcgcttggcggagacccgcagaagatcaacccgcttgttccggtggacctcgtcatcgaccactcggtcatcgtcgatgagttcggaacaccgcttgcctttgcccgcaatgtcgagctggaatatcagcgcaatgccgagcgttaccgctttttgaaatggggccagcaggcgttccagaacttccgcgtcgtaccgcccggtacgggcatctgccatcaggtgaacctggaattcctggcgcgcgtggtgtggagccgcgatgaggatgggacgctcctcgcctatcccgatacctgcgttggcaccgactcgcatacaaccatggtgaacggccttggcgttctcggttggggcgtgggcggcatcgaggcggaggcagccatgctcggccagccggtctccatgctcctcccggaggtcgtcggcttcaagctgacgggcaagctcaaggaaggcgtgaccgccaccgatctcgttcttaccgtcacgcagatgctgcgcaaaaaaggcgtggtgggcaaattcgtcgagttcttcggccctggccttgccaacatgaccgtggccgaccgtgccaccatcggcaacatggcacccgaatatggtgcgacctgcggtttcttcccggtcgatggcgagaccatcaagtacctcaccatgtcgaaccgctccgccgagcagatcgctctggtggaggcctacacaaaggcccaggggctttggcgcgaagaggaaatgcaggacccggttttcaccgaaatcctcgaactcgaccttggaaccgttgtgccttccatggccgggccgaagcggccggaggggcgcatcgcgctggaggatatcgcctccaatttcgagaaggcgctcgaggccgagtacaagaagaccgtcgataccgcgaagcgctatgcggtcgagggtgaggatttcgaccttggccatggcgacgtggttatcgccgccatcacatcctgcaccaacacctcgaatccgagcgtgcttttggccgctggcctgctcgcccgaaacgcaaataggcgcggcctgaagcggaagccctgggtcaagtcctcgctcgcgcccggcagcaaggtggtggccgaatattatgagaagtccggcctgcagaaggagctggaccagctcggcttcaatctcgtcggtttcggctgcaccacctgcatcggcaattccggcccgctgccggagccgatctcgaaaaccatcaatgacaagggtctgatcggggccgccgttctttccggcaaccgcaatttcgagggccgtgtctcgccggacgtgcaggccaactatctggcctcgccgccgctggtggtggcctatgcgctggccggaaccgtgcgcaaggatttgaccaaggaaccgctcggcgaagatgagagcggcaacccggtctatctgcgcgatatctggccgacctctgccgaggtgcaggaattcatcgccaagcatgtcacccgcgagctcttcgccaccaaatatgcggatgtctttaacggcgacgagtattggcgcggtctggaggcgcctgcgggccagacctatgcctgggaccagaactccacttacgtgcagaacccgccctatttcgaaggcatgcagcccaagccgcgcccgggcggcgatatcaagggcgcgcgtgtgctgggcctgttcggcgacaagatcacgaccgatcacatctcgcctgcagggtccatcaaggcccagtcgccggccgggcagtatctgatggagcacggggtgggcgtggccgacttcaaccagtacggcacgcggcgcggcaaccatgaggtgatgatgcgcggcactttcgccaatatccgcatccgcaaccacatgctgggcgaaaacgggcgcgagggcggctacacgatccactatccttccaaggaggagatgccgatttacgatgctgccatgcgttaccgccaggaaggggtgccgctggtcatcttcgccggcgtggaatacggcaacggttcctcccgcgactgggcagccaaaggcacaaacctcctcggcgtgcgcgccgtcatcgcgcagtccttcgaacgtatccaccgctccaatctggtgggcatgggcgtcatccccttcgttttcgcggaggagacgagctggaaggagctgggtttgaagggcgacgagatcgtcacgatcgagggcctggacaatatcaagccccgcgccaccatggtggcgaagatcagctatgcggacggctcggtgaaggaagtgcctttgctgtgccgtatcgatacgctcgatgagctcgagtacttcaagaacggcggcattctgcagtacgtgctgcggtatctggctgcttga

SEQ ID NO: 67047 - protein, 923 aa, Mesorhizobium sp. BNC1
MTVPASYELSPQEVRSRSDEQTRMGSHVSNSLDSYKCRRTLKVGNTEYTYFDLKEAEKNGLSGVSRLPFSMKVLLENLLRKEDGRSVTKQSIEAVAAWLSDRGSAGVEIAYSPARVLMQDFTGVPAVVDLAAMRDAMASLGGDPQKINPLVPVDLVIDHSVIVDEFGTPLAFARNVELEYQRNAERYRFLKWGQQAFQNFRVVPPGTGICHQVNLEFLARVVWSRDEDGTLLAYPDTCVGTDSHTTMVNGLGVLGWGVGGIEAEAAMLGQPVSMLLPEVVGFKLTGKLKEGVTATDLVLTVTQMLRKKGVVGKFVEFFGPGLANMTVADRATIGNMAPEYGATCGFFPVDGETIKYLTMSNRSAEQIALVEAYTKAQGLWREEEMQDPVFTEILELDLGTVVPSMAGPKRPEGRIALEDIASNFEKALEAEYKKTVDTAKRYAVEGEDFDLGHGDVVIAAITSCTNTSNPSVLLAAGLLARNANRRGLKRKPWVKSSLAPGSKVVAEYYEKSGLQKELDQLGFNLVGFGCTTCIGNSGPLPEPISKTINDKGLIGAAVLSGNRNFEGRVSPDVQANYLASPPLVVAYALAGTVRKDLTKEPLGEDESGNPVYLRDIWPTSAEVQEFIAKHVTRELFATKYADVFNGDEYWRGLEAPAGQTYAWDQNSTYVQNPPYFEGMQPKPRPGGDIKGARVLGLFGDKITTDHISPAGSIKAQSPAGQYLMEHGVGVADFNQYGTRRGNHEVMMRGTFANIRIRNHMLGENGREGGYTIHYPSKEEMPIYDAAMRYRQEGVPLVIFAGVEYGNGSSRDWAAKGTNLLGVRAVIAQSFERIHRSNLVGMGVIPFVFAEETSWKELGLKGDEIVTIEGLDNIKPRATMVAKISYADGSVKEVPLLCRIDTLDELEYFKNGGILQYVLRYLAA

SEQ ID NO: 67048 - DNA, 2268 bp, Cytophaga hutchinsonii ATCC 33406
  CDS (1)..(2268): transl_table=11
atggcatttgatttggagatgataaaaaaggtctattctcttatgcctcaaagaattgaggcagcaaaaaagttgataggcaaacctttaacgcttactgaaaaaattctttattctcatttggatgaaggtacagcgacaaaggtgtatgaaagaggtgtatcttatgttgattttaatccggatcgtgttgctatgcaggatgcaacggcccaaatggcgttgttacaatttatgcaggcaggaagaccgaaagttgctgtaccatctaccgtacactgtgatcacttgattactgcaaaagaaggagcaacaaaggatttaccttttgcaaataaagaaagtaaagaagtatttgattttttaggttctgtttctaataaatatggtattggattctggaaaccaggtgcaggtattatccaccaggtagttttagaaaattatgcattcccgggtggtatgatgatcggtacagattcacatactgtaaacgcaggtggtttaggtatgctggcaatcggtgttggtggtgctgatgcatgcgacgtaatggctggtcttccatgggaacttaaattccctaaattaattggtgttaaattaaccggtaaattgaatggctggacagcacctaaagacgtgatcttaaaagtagctggtatcttaactgtaaaaggtggtacaggtgctattgtagaatactttggcgaaggcgctacttctatgtcttgtacgggtaaaggtacaatctgtaacatgggtgctgaaatcggtgctaccacgtcaacatttggttacgatgaatctatggagcgttacctgcgtgctacaggccgtgcagatgttgcagatttagctaacggtatcaaacagcatttaaatgcagatcctgaagtatacgcttctcctgaaaaatatttcgatcaggtaattgaaattaatctttctgaacttgagccgcacttgaacggtccgtttactccggatcttgctactcctgtttctaaaatgaaagaagaagcagagaaaaacggatggccgttaaaagtagagtggggcttgatcggttcttgtacaaactcttcttacgaagatttatcaagagctgcttctatcgcaaaacaagctattgctaaaggtttagtgacaaaagctgaattcggtatcaacccgggttctgaacaggttcgttatacggcagacagagatggtttgttgggtacgttcacagacctgaatgcaaaaatatttacaaatgcctgcggcccatgtatcggtatgtgggaccgtgtaggtgcggagaaaaaagagaaaaacacaatcgttcactcgtttaaccgaaacttcgcaaaacgtgcagatggtaacccgaatacatttgcatttgtagcgtcccctgaaatggttgctgctattgctattgcaggtgatctttctttcaatccaatcacagattcattgatcaacgataaaggagagaaagtaaaattagaccctccattcggtgatgaacttcctacaaaaggttttgctgttgaagatgcaggcttccaggctccggctgctgatggctctgccgttcaggttgctgtttctccaacatctgatcgtttacagttattagatccgtttagtgcctgggaaggtacagaccttaaaggccttaaattattgatcaaagcaaaaggtaagtgtacaaccgatcatatttctatggctggtccatggttgaaatacagaggtcacttagataatatttctaataacatgttgatcggtgccgttaacttcttcaacgataaaacggatgatgttaaaaaccagttaacaggtacttatggtcctgtacctgctacgcagcgtgcttacaaagctcagggaatcggctctatcgttgtaggtgatgaaaactacggtgaaggttcttcaagagagcatgctgccatggaacctcgtcacttaggtgttcgtgcggtattggttaaatcatttgcacgtatccatgaaacaaaccttaaaaaacaaggtatgcttggtttaacgtttgcaaacaaagatgattacaataagattcaggaagacgattccatcgatatcttaggcttaacaacttttgcgccaaacgttccattaacactggtgttaaatcacaaagacggaagtaaagaagagattaaagtaaatcacagctacaacgaacaacagattgagtggttcaaatccggtggcgctttaaatatcatcagagctaatgttggagcttaa

SEQ ID NO: 67049 - protein, 755 aa, Cytophaga hutchinsonii ATCC 33406
MAFDLEMIKKVYSLMPQRIEAAKKLIGKPLTLTEKILYSHLDEGTATKVYERGVSYVDFNPDRVAMQDATAQMALLQFMQAGRPKVAVPSTVHCDHLITAKEGATKDLPFANKESKEVFDFLGSVSNKYGIGFWKPGAGIIHQVVLENYAFPGGMMIGTDSHTVNAGGLGMLAIGVGGADACDVMAGLPWELKFPKLIGVKLTGKLNGWTAPKDVILKVAGILTVKGGTGAIVEYFGEGATSMSCTGKGTICNMGAEIGATTSTFGYDESMERYLRATGRADVADLANGIKQHLNADPEVYASPEKYFDQVIEINLSELEPHLNGPFTPDLATPVSKMKEEAEKNGWPLKVEWGLIGSCTNSSYEDLSRAASIAKQAIAKGLVTKAEFGINPGSEQVRYTADRDGLLGTFTDLNAKIFTNACGPCIGMWDRVGAEKKEKNTIVHSFNRNFAKRADGNPNTFAFVASPEMVAAIAIAGDLSFNPITDSLINDKGEKVKLDPPFGDELPTKGFAVEDAGFQAPAADGSAVQVAVSPTSDRLQLLDPFSAWEGTDLKGLKLLIKAKGKCTTDHISMAGPWLKYRGHLDNISNNMLIGAVNFFNDKTDDVKNQLTGTYGPVPATQRAYKAQGIGSIVVGDENYGEGSSREHAAMEPRHLGVRAVLVKSFARIHETNLKKQGMLGLTFANKDDYNKIQEDDSIDILGLTTFAPNVPLTLVLNHKDGSKEEIKVNHSYNEQQIEWFKSGGALNIIRANVGA

SEQ ID NO: 67050 - DNA, 2592 bp, Shewanella sp. MR-4
  CDS (1)..(2592): transl_table=11
atgaatcgcctctatcgcaagcccttaccaggcacagcactcgactatttcgatacccgtgaagccattgaagccatcagccccggcgcctacgctaaactgccctacacctcacgagtgttagcggaaaacttagtgcgtcgctgcgagccagaagcactcacagactcgctaaaacaaattattgaatcaaaacaggaactggattttccatggttccctgcgcgtgtagtgtgccacgatattttagggcaaaccgcgctggtagacttagcgggtctgcgtgatgcgattgccgctaagggtggcgatccggcgcaggttaaccctgtggttccgacccagctgattgtcgaccattctctggctgtggaatatggtggtttcgataaggatgcctttgcgaaaaaccgcgccatcgaagatagacgcaacgaagacagattccactttatcaactggactcaaaaagcgtttaaaaacatcgatgtgatcccacaaggtaacggcatcatgcaccagattaacctagagcgtatgtcacccgtggtccatgcccgtgatggcgtggccttccccgataccttagtgggtaccgacagccatacgccacacgtagatgcgctgggtgttatcgccatcggcgtgggcggtcttgaggccgaaagcgtgatgttaggtcgcgcctcttatatgcgtctacccgacattatcggtgttgagctcacaggcaagcctcaaccgggcattaccgccaccgatatcgtattagccctgaccgaattcctgcgtaaggaaaaagtggtttcttcttaccttgagttcttcggcgaaggcgcagaggctttaacacttggcgatcgcgcgactatctctaacatgacaccagaatttggcgccaccgccgccatgttctatatcgaccaacagacgctggactacttaaccctgacgggtcgtagcgacgagcaagtgaagctggttgaaacctatgccaagaccacaggtttgtggagcgatgatctcaagcaggccgagtacccacgtaccctgcattttgacctgtcatcggtagtgcgtaccattgcaggcccatcgaatccccatgctcgcgttccgacttcagagttggccgcacgcggcatcagtggcgtggttgaaaacgagccaggcttaatgccagatggcgccgtgattattgcggccatcactagctgcactaacaccagtaacccacgcaacgtgattgcggcgggcctgcttgcacgtaacgccaatgccaaaggcttaagccgtaaaccttgggtgaaaacctcactcgcccccggctctaaggcggtacaactgtatttagaagaagccaacctgctgccagagctggagtcattaggcttcggtattgtcggttttgcctgcaccacctgtaacggtatgagcggcgcactcgacccagtgattcagcaggaagtgatcgaccgcgatctttacgccaccgccgtattatccggtaaccgtaacttcgacggccgtattcacccttacgctaagcaagctttcctcgcatcaccaccattagtcgtcgcctatgcaatcgcgggcaccattcgcttcgatatcgagaaggatgtgttaggccatgaccaaaacggtaacccagttcgccttatcgacatttggccaacggatgccgaaatcgatgccgtgattgcagcaagcgtgaagccagagcaattccgtaaggtctacgagccgatgttcgacctgagcgtcgactatggcgataaggtcagcccactgtacgactggcgtccacaatcgacctatatccgccgccctccttactgggaaggcgcattagcgggcgagtgcaccctcaagggcatgcgcccattggccgtgttgggtgacaacatcaccacagaccatttatcaccctcgaacgctattatgatggacagcgcggcgggcgaatacctgcacaagatgggtctgccagaggaagactttaactcctacgcgacccacaggggcgaccatctaacggcccagcgtgccaccttcgccaaccccaaactcaaaaacgagatggcggttgtcgatggcaaggtgaagcaaggctcactggcgcgtatcgagccagaaggccaagtgacccgcatgtgggaagccattgaaacctatatggatcgcaaacagccgctgattattatcgccggcgccgactacggtcagggttcatcccgtgactgggcggcaaaaggcgtgcgcttagcgggcgttgaggccattgtcgccgaaggcttcgagcgtattcaccgcactaacttagtcggcatgggcgtgttaccgctggagtttaaggcaggcgagaatcgcgctacctatggcatagatggtaccgaagtgtttgacgtttatggtgaaatcgcgccaagagcggatctcactgtcgtgattagccgtaaaaacggcgagcgcgtcgaagtaccagtgacctgtcgcctcgataccgcagaagaagtatctatctattctgccggcggcgtattgcagcgttttgcgcaggactttttagagtcgaatctgaagtaa

SEQ ID NO: 67051 - protein, 863 aa, Shewanella sp. MR-4
MNRLYRKPLPGTALDYFDTREAIEAISPGAYAKLPYTSRVLAENLVRRCEPEALTDSLKQIIESKQELDFPWFPARVVCHDILGQTALVDLAGLRDAIAAKGGDPAQVNPVVPTQLIVDHSLAVEYGGFDKDAFAKNRAIEDRRNEDRFHFINWTQKAFKNIDVIPQGNGIMHQINLERMSPVVHARDGVAFPDTLVGTDSHTPHVDALGVIAIGVGGLEAESVMLGRASYMRLPDIIGVELTGKPQPGITATDIVLALTEFLRKEKVVSSYLEFFGEGAEALTLGDRATISNMTPEFGATAAMFYIDQQTLDYLTLTGRSDEQVKLVETYAKTTGLWSDDLKQAEYPRTLHFDLSSVVRTIAGPSNPHARVPTSELAARGISGVVENEPGLMPDGAVIIAAITSCTNTSNPRNVIAAGLLARNANAKGLSRKPWVKTSLAPGSKAVQLYLEEANLLPELESLGFGIVGFACTTCNGMSGALDPVIQQEVIDRDLYATAVLSGNRNFDGRIHPYAKQAFLASPPLVVAYAIAGTIRFDIEKDVLGHDQNGNPVRLIDIWPTDAEIDAVIAASVKPEQFRKVYEPMFDLSVDYGDKVSPLYDWRPQSTYIRRPPYWEGALAGECTLKGMRPLAVLGDNITTDHLSPSNAIMMDSAAGEYLHKMGLPEEDFNSYATHRGDHLTAQRATFANPKLKNEMAVVDGKVKQGSLARIEPEGQVTRMWEAIETYMDRKQPLIIIAGADYGQGSSRDWAAKGVRLAGVEAIVAEGFERIHRTNLVGMGVLPLEFKAGENRATYGIDGTEVFDVYGEIAPRADLTVVISRKNGERVEVPVTCRLDTAEEVSIYSAGGVLQRFAQDFLESNLK

SEQ ID NO: 67052 - DNA, 2604 bp, Shewanella sp. MR-7
  CDS (1)..(2604): transl_table=11
atgaccacagctatgaatcgcctatatcgcaagcccttaccaggcacagcactcgactatttcgatacccgtgaagccgttgaagccatcagccccggcgcctatgctaaactgccctacacctcacgtgtattagcggaaaacttagtgcgtcgctgcgagccagaagcgcttaccgactcactaaaacaaattattgaatcaaaacaggaactggatttcccatggttccctgcgcgtgtagtgtgccacgatattttagggcaaaccgcgctggtagaccttgcgggtctgcgtgatgcaattgccgctaagggtggcgatccggcgcaggttaaccctgtggtcccgacccagctgattgtcgaccattccctagctgtggagtatggtggtttcgataaggatgcctttgcgaaaaaccgcgccatcgaagacagacgcaacgaagacagattccactttatcaactggactcaaaaagcgtttaaaaacatcgatgtgatcccgcagggcaacggtatcatgcaccagatcaacctggagcgtatgtcacccgtggtccatgcccgtgatggcgtggccttccccgataccttagtgggcaccgatagccatacgccccatgtggatgcgctgggtgttatcgccataggcgtgggcgggcttgaggccgaaagcgtgatgttaggccgcgcctcttatatgcgtctgcccgacattatcggcgttgaactcactggcaagcctcagccaggcattaccgccaccgatatcgtattagccctgaccgaattcctgcgtaaggaaaaagtggtttcttcttaccttgagttcttcggcgaaggcgcagaggctttaacacttggcgatcgcgcgactatctctaacatgacgccagaatttggcgccaccgccgccatgttctatatcgaccaacagacgctagactacttaaccctgacgggtcgtagcgacgagcaagtgaagctggttgaaacctatgccaagaccacgggtttgtggagcgatgatctcaagcaggccgagtacccacgtaccctgcattttgacctgtcatcggtagtgcgtaccattgctggcccatctaatccccatgctcgcgttccgacttcagagttggccgtgcgaggcatcagcggcgtggttgaaaacgaaccaggcctaatgccagatggcgccgtgattattgcggccatcactagctgtaccaacaccagtaacccacgcaacgtgattgcggcgggcctgctggcgcgtaacgccaatgctaaaggcttaagccgtaaaccttgggtgaaaacctcactcgcccccggctctaaggcggtacaactctatttagaagaagccaacctgctgccagagctggaatcattaggcttcggtattgtcggttttgcctgcaccacctgtaacggtatgagcggcgcactcgaccctgtgattcagcaggaagtgatcgaccgcgatctttacgccaccgccgtattatctggtaaccgtaacttcgacggccgtattcacccttacgctaagcaagccttcctcgcatcaccgccattagtggtggcctatgcaatcgcggggacgattcgcttcgatatcgagaaggatgtactcggtcaagataaagacggtaacccagtacgcttaatcgatatttggccaacggatgccgaaatcgatgccgtgattgcagcaagcgtgaagccagagcagttccgtaaagtttacgagccgatgttcgacctgagcgtcgactatggcgataaggtcagcccactgtacgactggcggccacaatcgacctatatccgccgccctccttactgggaaggcgcattagcgggcgagcgcaccctcaagggcatgcgcccattggccgtgctgggtgacaacatcaccacagaccatttatcgccatcgaacgcgattatgatggacagcgcagcgggcgaatacctgcacaagatgggtctgccagaggaagactttaactcctacgcgacccacaggggcgaccacttaacggcccaacgtgccaccttcgccaaccctaaactcaaaaacgagatggcaattgtcgatggcaaggtgaagcaaggctcactggcacgtatcgaaccagaaggccaagtgacccgcatgtgggaagccattgaaacctatatggatcgcaaacaaccgctgatcattatcgctggtgccgactatggtcagggttcatcccgtgactgggcggccaagggcgtgcgcttagcgggcgttgaggccattgtcgccgaaggcttcgagcgtattcaccgcactaacttagtcggcatgggtgtgttaccgctggagtttaaggcaggcgagaatcgcgcaacctatggcatagatggcacagaggtgtttgacgtttatggtgaaattgcgccaagagcggatctcactgtcgtgattagccgcaaaaatggcgagcgcgtcgaagtgccagtgacctgtcgcctcgataccgctgaagaagtgtctatctattctgccggcggcgtattgcagcgttttgcgcaggactttttagagtcgaacttgaagtag

SEQ ID NO: 67053 - protein, 867 aa, Shewanella sp. MR-7
MTTAMNRLYRKPLPGTALDYFDTREAVEAISPGAYAKLPYTSRVLAENLVRRCEPEALTDSLKQIIESKQELDFPWFPARVVCHDILGQTALVDLAGLRDAIAAKGGDPAQVNPVVPTQLIVDHSLAVEYGGFDKDAFAKNRAIEDRRNEDRFHFINWTQKAFKNIDVIPQGNGIMHQINLERMSPVVHARDGVAFPDTLVGTDSHTPHVDALGVIAIGVGGLEAESVMLGRASYMRLPDIIGVELTGKPQPGITATDIVLALTEFLRKEKVVSSYLEFFGEGAEALTLGDRATISNMTPEFGATAAMFYIDQQTLDYLTLTGRSDEQVKLVETYAKTTGLWSDDLKQAEYPRTLHFDLSSVVRTIAGPSNPHARVPTSELAVRGISGVVENEPGLMPDGAVIIAAITSCTNTSNPRNVIAAGLLARNANAKGLSRKPWVKTSLAPGSKAVQLYLEEANLLPELESLGFGIVGFACTTCNGMSGALDPVIQQEVIDRDLYATAVLSGNRNFDGRIHPYAKQAFLASPPLVVAYAIAGTIRFDIEKDVLGQDKDGNPVRLIDIWPTDAEIDAVIAASVKPEQFRKVYEPMFDLSVDYGDKVSPLYDWRPQSTYIRRPPYWEGALAGERTLKGMRPLAVLGDNITTDHLSPSNAIMMDSAAGEYLHKMGLPEEDFNSYATHRGDHLTAQRATFANPKLKNEMAIVDGKVKQGSLARIEPEGQVTRMWEAIETYMDRKQPLIIIAGADYGQGSSRDWAAKGVRLAGVEAIVAEGFERIHRTNLVGMGVLPLEFKAGENRATYGIDGTEVFDVYGEIAPRADLTVVISRKNGERVEVPVTCRLDTAEEVSIYSAGGVLQRFAQDFLESNLK

SEQ ID NO: 67054 - DNA, 2619 bp, Alkalilimnicola ehrlichei MLHE-1
  CDS (1)..(2619): transl_table=11
atgaacacgaaataccgtaaaaacctgcccggcaccgatctcgattatttcgacgtgcgcgccgccgtcgaggacatccagccgggcgcctacgacaaactgcccttcacctcccgcgtgctggccgaaaacctggtccgccgctgcgagcccgaacggctcaccgattcgctgaagcagatcatcgagcgcaagcgcgacctggacttcccctggtacccggcgcgggtggtctgccacgacatcctcggccagaccgccttcgtcgacctggccggcctgcgcgacgccatcgccgaacggggcggtgacccggccaaggtcaacccggtggtgcccacccagctcattgtcgaccactccctggcggtggagcacgccggcttcgagaaggacgccttcgagaagaaccgcgccatcgaggagcgccgcaacgaggaccgcttccacttcatcaactggaccaagaaggcgttcgagaacgtggacgtcatccccccgggcaacggcatcatgcaccagatcaacctggagcggatgtcccccgtggtgcacagcgtggacggggtggccttccccgacaccctggtggggaccgacagccacaccccccacgtggacgccctgggtgtgatcgccatcggcgtcggcggcctggaggcggagagcgtcatgctgggccggcccagctacatgcgcctgcccgacatcatcggcgtggagctcaccggcaagccggcaccgggcatcacctgcaccgacatcgtactggccctcaccgagttcctgcgcaaagagcgggtggtctccgcctacctggagttctacggcgagggggccgaggccctgagcgtgggcgaccgcgccaccatctccaacatgaccccggaattcggcgccaccgccgccatgttccacatcgaccagcagaccctggactacctgaccctcaccggccgcgagccggagcaggtggacctggtggagaagtacgccaggaccgccggcctctggggcgatgacctgaagggcgccgagtacgagcgggtgctgaccttcgacctgtccaccgtggtgcgtaacatggccggcccctccaacccccacaagcgggtggccaccactgatcttgccaaggctggcatcgccggtgaggtggagcagcgggacgacggcctgatgcccgatggagcggtaatcattgccgccatcaccagctgcaccaacaccagcaacccgcgcaatgtcatcgccgccggcctgctggcccagaaggccaacgaactgggcatgacccgcaagccctgggtgaagacctccctggcccccggctccaaggcggtgcagtactacctggaggacgccggcctgctgcccgagttggaaaaactcggcttcggcatcgtggccttcgcctgcaccacctgcaacggcatgagcggcgccctggacccgaagatccagcaggagatcatcgaccgggacctctactccaccgccgtgctctccggcaaccgcaacttcgacggccgcatccacccctacgccaagcaggccttcctggcctcgccggccctggtggtggcctacgccatcgccggcaccgtccgcttcgacatcgagaaggacgccctgggcaccgacaaggatggcaacccggtcaccctgaaggacctctggccctccgatgaggagatcgaccgcatcgtggccgagcacgtgaagccggaccacttccgcaaggtctacatccccatgttcgagaagaaggtggagaaggccgagcaggtgagcccgctctacgactggcggccccagagcacctacatccgccggcccccctactgggagggcgccctggccgccgagcgcaccctcaagggcatgcggccgctggcgatcctgccggacaacatcaccaccgaccacctctccccctccaacgccatcatgccggacagcgccgccggggagtacctggccaagatgggcctgccggaggaggacttcaactcctacgccacccaccggggcgaccacctgaccgcccagcgggccaccctggccaaccccaagctgttcaacgagatggtgcgggacgagaacggcgaggtgaagcagggctccctggcccggctggagccggagggcaaggtgatgcgcatgtgggacgtgatcgagacctacatggagcgcaagcagccgttgatcatcgttgccggcgccgactacggtcagggctcctcccgggactgggccgccaagggcgtacgcctggccggggtggaggccatcgtggccgagggcttcgagcgcatccaccgcaccaacctggtgggtatgggcgtgctgccactgcagttccaggaaggtaccacgcgcaagaccctgggcctggacggcaccgagacctatgacgtggagggcgatctggcccccggcgccaccgtcaccctgatcgtcaatcgccgggacggcggccgcgaggaagtcccggtgatctgccggctggataccgccgaggaggtctccatctacgaggccggcggtgtgctccagcgcttcgctcaggacttcctggaggcggaggccgaggagcagcagggccgccgcgcctga

SEQ ID NO: 67055 - protein, 872 aa, Alkalilimnicola ehrlichei MLHE-1
MNTKYRKNLPGTDLDYFDVRAAVEDIQPGAYDKLPFTSRVLAENLVRRCEPERLTDSLKQIIERKRDLDFPWYPARVVCHDILGQTAFVDLAGLRDAIAERGGDPAKVNPVVPTQLIVDHSLAVEHAGFEKDAFEKNRAIEERRNEDRFHFINWTKKAFENVDVIPPGNGIMHQINLERMSPVVHSVDGVAFPDTLVGTDSHTPHVDALGVIAIGVGGLEAESVMLGRPSYMRLPDIIGVELTGKPAPGITCTDIVLALTEFLRKERVVSAYLEFYGEGAEALSVGDRATISNMTPEFGATAAMFHIDQQTLDYLTLTGREPEQVDLVEKYARTAGLWGDDLKGAEYERVLTFDLSTVVRNMAGPSNPHKRVATTDLAKAGIAGEVEQRDDGLMPDGAVIIAAITSCTNTSNPRNVIAAGLLAQKANELGMTRKPWVKTSLAPGSKAVQYYLEDAGLLPELEKLGFGIVAFACTTCNGMSGALDPKIQQEIIDRDLYSTAVLSGNRNFDGRIHPYAKQAFLASPALVVAYAIAGTVRFDIEKDALGTDKDGNPVTLKDLWPSDEEIDRIVAEHVKPDHFRKVYIPMFEKKVEKAEQVSPLYDWRPQSTYIRRPPYWEGALAAERTLKGMRPLAILPDNITTDHLSPSNAIMPDSAAGEYLAKMGLPEEDFNSYATHRGDHLTAQRATLANPKLFNEMVRDENGEVKQGSLARLEPEGKVMRMWDVIETYMERKQPLIIVAGADYGQGSSRDWAAKGVRLAGVEAIVAEGFERIHRTNLVGMGVLPLQFQEGTTRKTLGLDGTETYDVEGDLAPGATVTLIVNRRDGGREEVPVICRLDTAEEVSIYEAGGVLQRFAQDFLEAEAEEQQGRRA

SEQ ID NO: 67056 - DNA, 2763 bp, Hyphomonas neptunium ATCC 15444
  CDS (1)..(2763): transl_table=11
atgccgtcaaaggacagctttaaatcgaaaagcacgctcacagcagctggcaagacctacacctattattcgctggaagcagcggcgaagaacggcggtctgggcgatgtatcccgtttgcccgccgcgctgaaggttctcctcgagaacatgctgcgcttcgaggacgggctgaccgtcaatgaagacgacatccgcgccttcggtgaatgggcagataaaggcggccagaacccgcgtgagatcgcctaccgccccgcccgcgtcctaatgcaggacttcaccggcgtgcccgccgtggtcgacctcgccgccatgcgcgacggcatcaaggcactgggcggcagcgccaagaaaatcaacccgctggtcccggtcgatctcgtgatcgaccactcggtcatgatcgacgaattcggcacgccccgcgccttccaggccaacgtagacctggaatatgagcgcaacatggagcgctacaccttcctcaaatggggtcagaaggcgttcaacaatttccgcgtcgttccgcccggcaccggcatctgccaccaggtaaacctcgaatacctcgcccagactatctggtccgccccgaatgaggcaggcgaactcgtcgcctatccggacacgctggtcggcacggacagccacaccaccatggtcaatggcctggccgtactcggctggggcgttggcggcatcgaagctgaagcggcgatgctcggccagcccgtctcgatgctcatcccggaagtcgttggcttcaaggtcaccggcgcgatgaccgaaggcgtcaccgcgacagacctggtgctcaaagtggtgcagatgctccgcaagcacggcgtcgtgaacaaattcgtcgaattctatggccccggcctcgacaacatgccgctcgcagaccgcgccaccatcgccaacatggcgcctgaatatggcgcgacctgcggcttcttcccgatcgacgacgagacgatccgttaccttcgccagaccggtcgcgatgaagaccgcatcgcgctggttgaagcctatgccaagcagaacggtttctggcgcggcgcggactatgcgcccgtctacacctcgacgcttcaccttgatctcggcgatgtcgttccggcgatctcgggcccaaaacgcccgcaggaccacgtcgcgctcgacgcggccgcccaggttttcggcgaatacatccacggcctgcgcaagcccgccaaggcgcctgagctgcagaagtcagagatgacggaagagggcggcgcgcctgcgccggccagcattccgggtgacgagatgggccccggccgcggccgcgtggacggccaggactatattctcaacgacggctcggtcgtgatcgcctcgatcacctcctgcaccaacacctccaacccgtatgttctgatcggcgccggtctcgttgcccgcaaggcgcgcgccctcggcctcacccgcaagccctgggtgaagacatcgctggcgcccggatcgcaggtggtttcagagtatctgaacgctgccggcctgcaggaagacctcgacgcgctcggcttcaacctcgtcggctatggctgcaccacctgtatcggcaactccggcccgctggcgcccgagatttccaagtcgatcaacgagaatgatctcgtggccgtctcggttctttcgggtaaccgcaacttcgaaggccgcatcagcccggacgtacgcgccaactatctcgcgtctccgccgctggttgtcgcctatgccatcgccggcgacatgaacatcgacatcaccaaggacgccattggcacctcgaaagacggcaagcctgtctatctgaaggacatctggccgacgaccaaggaaatcgccgacatggtccacgcgacggtgacccggcagatgttcatgtcgaaatatgccgacgtgttcaaaggcgacgagaaatggcagggcgttcagaccacggacgctgagacctatgactggccggtcagctcgacctacattcagaacccgccttacttccgcggcatgtcggccgagaagggcgacatccacccgatcaagggcgcgcgtgtgctcgccctcctgggcgacatgatcaccaccgaccacatctccccggccggttccttcaaggccaacagcccggctggcaaatatctgaccgagcgtcaggtgccggtgaaggatttcaactcctacggctcgcgccggggcaaccatgagatcatgatgcgtggtaccttcgccaacatccgtatcaagaacgagatgctcgacggcgttgagggcggctacaccctcggcccggatggcgagcagacctcgatctatgacgcggcgatggcctggatcgacaagggcgtgcccctcgtcatcatcggcggcatcgaatacggcgccggctccagccgtgactgggccgccaaaggcaccaaccttctcggcgtgaaggccgtcatcgctgaaagcttcgagcgtatccaccgctcaaaccttgtcggcatgggcgtcatcccgttcgagttcatcggtgagggccgcaaatctctggacctcaaaggcaccgaaaccttcgatatcgaaggcctcggcaacgacattcgcccgctctccaccgtgccctgcaagatcacctatgccgacggcaccgtgaagacgatccagatcaaatgccggatcgataccgagatcgaagtcgattacgtcaagcatggcggcgttctgcactatgtgctgcgcgaccttgtccgcgcctcgtaa

SEQ ID NO: 67057 - protein, 920 aa, Hyphomonas neptunium ATCC 15444
MPSKDSFKSKSTLTAAGKTYTYYSLEAAAKNGGLGDVSRLPAALKVLLENMLRFEDGLTVNEDDIRAFGEWADKGGQNPREIAYRPARVLMQDFTGVPAVVDLAAMRDGIKALGGSAKKINPLVPVDLVIDHSVMIDEFGTPRAFQANVDLEYERNMERYTFLKWGQKAFNNFRVVPPGTGICHQVNLEYLAQTIWSAPNEAGELVAYPDTLVGTDSHTTMVNGLAVLGWGVGGIEAEAAMLGQPVSMLIPEVVGFKVTGAMTEGVTATDLVLKVVQMLRKHGVVNKFVEFYGPGLDNMPLADRATIANMAPEYGATCGFFPIDDETIRYLRQTGRDEDRIALVEAYAKQNGFWRGADYAPVYTSTLHLDLGDVVPAISGPKRPQDHVALDAAAQVFGEYIHGLRKPAKAPELQKSEMTEEGGAPAPASIPGDEMGPGRGRVDGQDYILNDGSVVIASITSCTNTSNPYVLIGAGLVARKARALGLTRKPWVKTSLAPGSQVVSEYLNAAGLQEDLDALGFNLVGYGCTTCIGNSGPLAPEISKSINENDLVAVSVLSGNRNFEGRISPDVRANYLASPPLVVAYAIAGDMNIDITKDAIGTSKDGKPVYLKDIWPTTKEIADMVHATVTRQMFMSKYADVFKGDEKWQGVQTTDAETYDWPVSSTYIQNPPYFRGMSAEKGDIHPIKGARVLALLGDMITTDHISPAGSFKANSPAGKYLTERQVPVKDFNSYGSRRGNHEIMMRGTFANIRIKNEMLDGVEGGYTLGPDGEQTSIYDAAMAWIDKGVPLVIIGGIEYGAGSSRDWAAKGTNLLGVKAVIAESFERIHRSNLVGMGVIPFEFIGEGRKSLDLKGTETFDIEGLGNDIRPLSTVPCKITYADGTVKTIQIKCRIDTEIEVDYVKHGGVLHYVLRDLVRAS

SEQ ID NO: 67058 - DNA, 2817 bp, Nocardioides sp. JS614
  CDS (1)..(2817): transl_table=11
gtggccagtcaggacagcttcggtgccaagagcaccctggacgtggacggaaagtcctacgagatcttccgcctcgacgcggtgcagggcgaggggctcgacgtcgcgtcgctgccgttcagcctcaaggtgctgctggagaacctgctgcgcaccgaggacggcgcggacatcaccgcggacgacatccgcgcgatcgccgggtggaacgcggacgacgagccgagcaaggagatccagttcaccccggcgcgggtcatcatgcaggacttcacgggcgtgccgtgcgtggtcgacctggccaccatgcgcgaggcgatggccgagctcggcggcgacccgacgaagatcaacccgctcgcgcccgccgagatggtcatcgaccactcggtgatcgccgacgtgttcggcacccccgaggcgttcgcgcggaacgtcgagatcgagtaccagcgcaaccgcgagcgctaccagttcctgcgctgggggcagggcgcgttcgacgacttcaaggtcgtcccgccgggcaccggcatcgtgcaccaggtcaacatcgagcatctcgcccgcaccgtcttcacccgcgaggtcgacggacagctgcaggcctaccccgacacctgtgtcggcaccgactcccacaccacgatggtcaacggcatcggtgtggtcggctggggcgtcggcggcatcgaggccgaggccgcgatgctcggccagccggtgtcgatgctgatcccgcgcgtcgtcggcttcaagctccacggtgacctgcccgagggctcgaccgcgaccgacctggtgctcaccatcaccgagatgctgcgcgagcacggcgtggtcggcaagttcgtcgagttctacgggcccggtgtctccgtgctgccgctggccaaccgcgccacgatcggcaacatgagccccgagttcggctccacgatcgcggtcttcccgatcgacgccgagaccctcaagtacctcgagctgaccggccggtcgaaggagcagctcgcgctggtcgagacctacgccaagacgcagggcctctggcacgaccccgacgccgagccgcggttctccgagcagctcgagctcgacctggcgagcgtcgtgccgtcgatcgcgggccccaagcgcccgcaggaccgggtcgcgctgtccgacgccaagcagtccttccgcggtgccctccgggcgtacgtcgaccacgaggagtcggccatctcgggggcctacgacgaggcgctcgaggagtccttcccggcctccgacacgcccgccgcccacgaggacgtgcacgggcagacgccggcgcgcgactacctgtcgaccgcgccgaaggacaacgggcgggcgagcaaccccgctgtggtcaccctcagcgacggcaccgagtgcgagctcgaccacggcgcggtggccatcgcggcgatcacgtcgtgcacgaacacctcgaacccgtcggtgatgatcggcgccgcgctgctggcgaagaaggccgtggagaagggcctgcagcgcaagccgtgggtcaagaccacgctggcccccggctccaaggtggtctcggactactacgagcggtccgggctcacgccgtacctcgacaagctcggcttcaacctggtcggctacggctgcaccacctgcatcggcaactccggtccgctgatcccggaggtcagccaggcggtcaacgagaacgacctcgccgtcgcctcggtgctctcgggcaaccgcaacttcgagggccggatcaacccggacatcaagatgaactacctggcctcgccgccgctggtggtcgcctacgcgctggccggctcgatggacgtcgacctgttcaacgacccgctgggccaggaccaggacggcaacgacgtcttcatgagggacatctggccgacctcccaggaggtcgaggacgtgatccgcgacgcgatcacctccgacatgttctccaccgactacgccgacgtgttcgccggcgacgagcagtggcgctcgctgccgacccccgagggcaagacgttctcgtgggaggagagctcgacgtacgtccgcaagcctccgtacttcgacggcatgcccgaggagcccgagccggtcgccgacatctcgggtgcccgggtgctgctcaagctcggcgactcggtgaccaccgaccacatcagcccggccggtgcgatcaagaaggactcgccggcgggccgatacctctccgagcacggcgtcgagcaccgcgacttcaactcctacgggtcgcgccgaggcaaccacgaggtgatgatccgcggcacgttcgcgaacatccggctgcgcaaccagctggcgccgggcaccgagggcggcttcacccgtgacttcacggcgggcggcgaggtgaccacggtgttcgaggcctccgagaactacgtcgcggccggcacgccgctggtggtgctcgcgggcaaggagtacggctcgggctcctcgcgtgactgggccgccaagggcaccgcgctgctcggcgtgaaggccgtgatcgcggagtcctacgagcgcatccaccgctccaacctgatcggcatgggcgtgctgccgctgcagttccccgagggccagaccgcggagtcgctcgggctgaccggcgaggaggagttctccatcaccggtgtgacggcactcaacgacggcaccacgccccggaccgtgaaggtcaaggcgggggagaaggagttcgacgcggtcgtccgcatcgacacccccggcgaggcgaactactaccgcaacggcgggatcatgcagtacgtcctgcggaacctcctgaaggcctga

SEQ ID NO: 67059 - protein, 938 aa, Nocardioides sp. JS614
MASQDSFGAKSTLDVDGKSYEIFRLDAVQGEGLDVASLPFSLKVLLENLLRTEDGADITADDIRAIAGWNADDEPSKEIQFTPARVIMQDFTGVPCVVDLATMREAMAELGGDPTKINPLAPAEMVIDHSVIADVFGTPEAFARNVEIEYQRNRERYQFLRWGQGAFDDFKVVPPGTGIVHQVNIEHLARTVFTREVDGQLQAYPDTCVGTDSHTTMVNGIGVVGWGVGGIEAEAAMLGQPVSMLIPRVVGFKLHGDLPEGSTATDLVLTITEMLREHGVVGKFVEFYGPGVSVLPLANRATIGNMSPEFGSTIAVFPIDAETLKYLELTGRSKEQLALVETYAKTQGLWHDPDAEPRFSEQLELDLASVVPSIAGPKRPQDRVALSDAKQSFRGALRAYVDHEESAISGAYDEALEESFPASDTPAAHEDVHGQTPARDYLSTAPKDNGRASNPAVVTLSDGTECELDHGAVAIAAITSCTNTSNPSVMIGAALLAKKAVEKGLQRKPWVKTTLAPGSKVVSDYYERSGLTPYLDKLGFNLVGYGCTTCIGNSGPLIPEVSQAVNENDLAVASVLSGNRNFEGRINPDIKMNYLASPPLVVAYALAGSMDVDLFNDPLGQDQDGNDVFMRDIWPTSQEVEDVIRDAITSDMFSTDYADVFAGDEQWRSLPTPEGKTFSWEESSTYVRKPPYFDGMPEEPEPVADISGARVLLKLGDSVTTDHISPAGAIKKDSPAGRYLSEHGVEHRDFNSYGSRRGNHEVMIRGTFANIRLRNQLAPGTEGGFTRDFTAGGEVTTVFEASENYVAAGTPLVVLAGKEYGSGSSRDWAAKGTALLGVKAVIAESYERIHRSNLIGMGVLPLQFPEGQTAESLGLTGEEEFSITGVTALNDGTTPRTVKVKAGEKEFDAVVRIDTPGEANYYRNGGIMQYVLRNLLKA

SEQ ID NO: 67060 - DNA, 2607 bp, Neisseria meningitidis FAM18
  CDS (1)..(2607): transl_table=11
atggctgccaaccaacgttaccgcaaaccgctgcccggtacggatttggaatactacgacgcgcgtgcggcgtgtgaggacatcaagcccggctcttacgacaagctgccttatacaagccgtatcttggctgagaacttggtcaaccgcgcggacaaagtcgatttgccgacgctgcaaagctggctgggccagttgatagaagggaagcaggaaatcgactttccgtggtatcccgcgcgggtggtgtgccacgatattctggggcagaccgcgctggtggatttggcgggcttgcgcgatgcgattgccgaaaaaggcggcgatcctgccaaagtgaatccggtggtgcaaacccagcttatcgtcgaccactctctggcggtggagtgcggcggttacgatcctgatgccttccgcaaaaaccgcgaaatcgaagatcgacgcaacgaagaccgtttccacttcatcaactggacaaaaaccgcgtttgaaaatgtggacgtgattccggcgggcaacggcatcatgcaccaaatcaatctagaaaaaatgtcgccggttgttcaagttaaaaacggcgtggctttccccgatacctgcgtcggcacggattcgcacacgccgcacgtcgatgcgctgggcgtgatttccgtgggcgtgggcggattggaagcggaaaccgtaatgctgggacgcgcgtccatgatgcgcctgcccgatattgtcggcgttgagctgaacggcaaacggaaggcgggcattacggcgacggatattgtgttggcactgaccgagtttctgcgcaaagaacgcgtggtcggggcgtttgtcgaattcttcggcgagggcgcgagaagcctgtctatcggcgaccgcgcgaccatttccaacatgacgccggagttcggcgcgactgccgcgatgttcgctattgatgagcaaaccattgattatttgaaactgaccggacgcgacgacgcgcaggtgaaattggtggaaacctacgccaaaaccgcaggcttgtgggcagatgccttgaaaaccgccgtttatcctcgcgttttgaaatttgatttgagcagcgtaacgcgcaatatggcaggtccaagtaacccgcatgcccgttttgccaccgtcgatttggcggcgaaagggctggcgaagccttacgaagagccttcagacggacaaatgcccgacggcgcggtcatcatcgccgcgattaccagttgcaccaacacttccaacccgcgcaacgtcgttgccgccgcgctcttggcgcgcaacgccaaccgcttcgggctgaaacgcaaaccgtgggtcaaaacctcgtttgcccccggttcgaaagtggcggaaatttatttgaaagaagcaggcctgctgcccgaaatggaaaaactcggcttcggtatcgtcgccttcgcctgcaccacctgcaacggcatgagtggcgcgctggatccgaaaatccagaaagaaatcatcgaccgcgatttgtacgccaccgccgtattatcaggcaaccgcaacttcgacggccgtgtccatccgtatgcgaaacaggctttcctcgcttcgcctccgttggtcgttgcctacgcgctggcaggcagtatccgtttcgatattgaaaacgacgtactcggcgttgcagacggcaaggaaatccgcctgaaagacatttggcctgccgatgaagaaatcgatgccgtcgttgccgaatatgtgaaaccgcagcagttccgcgatgtgtatgtaccgatgttcgacaccggcacagcgcaaaaagcacctagtccgctgtacgattggcgtccaatgtccacctatatccgccgcccaccttactgggaaggcgcattggcaggggagcgcacattgagcggtatgcgtccgctggcgattttgcccgacaacatcaccaccgaccacctctcgccatccaatgcgattttggcaagcagtgccgcaggcgaatatttggcgaaaatgggtttgcctgaagaagacttcaactcttacgcaacccaccgcggcgaccacttgaccgcccaacgcgcaacctttgccaatccgaaactgtttaacgaaatggtgagaaacgaagatggcagtgtacgccaaggttcgctggcacgcgttgaacccgaaggccaaaccatgcgcatgtgggaagccatcgaaacctatatgaaccgcaaacagccgctcatcatcattgccggtgcggactacggtcaaggctcaagccgcgactgggctgcaaaaggcgtacgcctcgccggtgtggaagcgattgttgccgaaggcttcgagcgtatccaccgtaccaacttgatcggtatgggcgtattgccgctgcagttcaaaccgggtaccaaccgccacaccttgcaactggacggtacggaaacctacgacgtggtcggtgaacgcaaaccgcgctgcgatctgaccctcgtgattcaccgtaaaaacggcgaaaccgtcgaagttcccgttacctgccgcctcgatactgcagaagaagtattggtatatgaagccggcggcgtgttgcaacggtttgcacaggattttttggaagggaacgcggcttag

SEQ ID NO: 67061 - protein, 868 aa, Neisseria meningitidis FAM18
MAANQRYRKPLPGTDLEYYDARAACEDIKPGSYDKLPYTSRILAENLVNRADKVDLPTLQSWLGQLIEGKQEIDFPWYPARVVCHDILGQTALVDLAGLRDAIAEKGGDPAKVNPVVQTQLIVDHSLAVECGGYDPDAFRKNREIEDRRNEDRFHFINWTKTAFENVDVIPAGNGIMHQINLEKMSPVVQVKNGVAFPDTCVGTDSHTPHVDALGVISVGVGGLEAETVMLGRASMMRLPDIVGVELNGKRKAGITATDIVLALTEFLRKERVVGAFVEFFGEGARSLSIGDRATISNMTPEFGATAAMFAIDEQTIDYLKLTGRDDAQVKLVETYAKTAGLWADALKTAVYPRVLKFDLSSVTRNMAGPSNPHARFATVDLAAKGLAKPYEEPSDGQMPDGAVIIAAITSCTNTSNPRNVVAAALLARNANRFGLKRKPWVKTSFAPGSKVAEIYLKEAGLLPEMEKLGFGIVAFACTTCNGMSGALDPKIQKEIIDRDLYATAVLSGNRNFDGRVHPYAKQAFLASPPLVVAYALAGSIRFDIENDVLGVADGKEIRLKDIWPADEEIDAVVAEYVKPQQFRDVYVPMFDTGTAQKAPSPLYDWRPMSTYIRRPPYWEGALAGERTLSGMRPLAILPDNITTDHLSPSNAILASSAAGEYLAKMGLPEEDFNSYATHRGDHLTAQRATFANPKLFNEMVRNEDGSVRQGSLARVEPEGQTMRMWEAIETYMNRKQPLIIIAGADYGQGSSRDWAAKGVRLAGVEAIVAEGFERIHRTNLIGMGVLPLQFKPGTNRHTLQLDGTETYDVVGERKPRCDLTLVIHRKNGETVEVPVTCRLDTAEEVLVYEAGGVLQRFAQDFLEGNAA

SEQ ID NO: 67062 - DNA, 2637 bp, Rickettsia rickettsii
  CDS (1)..(2637): transl_table=11
atgtcagaagtacataattcagaatatatacaagagttatcagttgataatacttcatacaaaatttacgatataaataaagcggcaagcgatgtagatcttcccttaaaaaagcttccatatagtttaagagtattatttgagaatgtattacgttctaatggttcaaagcaaagcttacttttatttaaagaatggctaaaaactaaaaaatctgatgcggaaatagattttatgccggcaagagttttgatgcaggactttactggtgtgcctgctattgtagatttggcggctatgcgtgatgcgatgaagaaaataggaggtgatccgttaaaaattaacccgcttattcctgttgatttggtaatagaccattccgtaagcgttgattcttatgcagctaaggattcattcaataaaaatgttcaaatggaaatgaaacgtaatatagagcgttatgcatttcttaaatgggggcagcaagcatttaataattttaaagtagtgccgccgggtacgggtatttgtcatcaggtaaatttagaatatttagcaaaagtcgtgtggcataaagacggcaccctttatcctgatagtttagttggaacggatagccatacaactatggtaaacggtttatcggtgcttggttggggagtcggcggaatagaggcagaagctgccatgctaggtcaacctcttactatgattctgccagaggtaattggggtaaaactaacaggaaaattaacaggtatagctaccgcaactgatttagttttaaccgttaccgagatgttgcggaaaaagaaagtagtaggtaaatttgtcgagtttttcggtgagggtcttaaaaacctaatgattgccgatcgtgctactatttctaatatgtcgcctgaatacggtgctacttgcagctttttcccgattgatcaagaaactataaaatatctagagctaacaggtagagaaaaaacgcaaatcagattagtagagcaatacgcaaccgagcagaatctttggtatgattttgaacatgcggtagaatatactgaggttttagagctagatttatctatggtacatagttcacttgccggtccaaaacgtccgcaagatcgagtaaacttaaatgatgtagcaagtaattttaaatatgaattaccgaattttgctttagaaaataaagacattgataaaaaatatgccgtagcaaatcagaattacgaaattggtaacggcgatgtggtaattgcagcaattactagctgtactaatacttctaatccttcggttatgattggtgcagcacttcttgctaaaaaagcactagaacacgggttaaaggtaaaaccttgggttaaaacttctcttgctcctggttcaaaagtcgtaacggaatatttgaagcttagtggtcttgataaatatttagatgaattagggtttaatctagtaggttacggctgcactacttgcatcggtaattccggacctctcaatccagaaatagaggaaactattaacaaaaacgggttagttgttgcttctgttttatctggtaataggaattttgaagggcgaattaatccgcttactaaagcaagctatctcggttcgcctattttagtcgtagcatatgcacttagcggcactcttaatatagatctaacaaatatgcccataggagaaaatatttatttaaaagatctttggccaagaaaagaagagatagatgaagttattgcaaattcaattaattcctctatgtttatagaaaaatattctgatatatttagcggaacgacagagtggaaagatttacaggttactaatagttctacttataactggaataagaatagcacctatattaataatccgccttattttaaggatataggcagcaagaataatatacaagatataaaatctgcaaaaattctagcaattctcggtgattctattactaccgatcatatttcgccggcaggtagtattagtaaaaccagccctgctgctaaatatttaacggaccatcatatagagcctctagatttcaactcttacggatcacgtagaggaaatcatgaagtaatgatgcgtggcacatttgctaatattcgtataaaaaatgagatgtgtaaaggtgtagaaggcgggtttaccataaaccagttaaacggcacgcagcaaactatctacgatgcagctatggactacaaagctcatgatgtatcggtagtgatttttgcaggtaaagaatatggcagcggctcatctagagactgggcagcaaaaggacctggtttgcttggtgtaaaggcagtgattgccgagagctttgagcgaatacatcgatcaaatttagtaggtatgggtattttaccgctcacttttaccggcaataatacaagattagatttaaagttagacggttcagaaactattgacattacaggcttaagcgagaatataagctcttatcatcctgttaaatgcgtgatacaaaaacaaaccggtgcaataagaacaatcgatttaatattgcaaatatttacggataatgagataaattatataaagcacggcagtattatgcattttgtggtagagagtttgaaggggtag

SEQ ID NO: 67063 - protein, 878 aa, Rickettsia rickettsii
MSEVHNSEYIQELSVDNTSYKIYDINKAASDVDLPLKKLPYSLRVLFENVLRSNGSKQSLLLFKEWLKTKKSDAEIDFMPARVLMQDFTGVPAIVDLAAMRDAMKKIGGDPLKINPLIPVDLVIDHSVSVDSYAAKDSFNKNVQMEMKRNIERYAFLKWGQQAFNNFKVVPPGTGICHQVNLEYLAKVVWHKDGTLYPDSLVGTDSHTTMVNGLSVLGWGVGGIEAEAAMLGQPLTMILPEVIGVKLTGKLTGIATATDLVLTVTEMLRKKKVVGKFVEFFGEGLKNLMIADRATISNMSPEYGATCSFFPIDQETIKYLELTGREKTQIRLVEQYATEQNLWYDFEHAVEYTEVLELDLSMVHSSLAGPKRPQDRVNLNDVASNFKYELPNFALENKDIDKKYAVANQNYEIGNGDVVIAAITSCTNTSNPSVMIGAALLAKKALEHGLKVKPWVKTSLAPGSKVVTEYLKLSGLDKYLDELGFNLVGYGCTTCIGNSGPLNPEIEETINKNGLVVASVLSGNRNFEGRINPLTKASYLGSPILVVAYALSGTLNIDLTNMPIGENIYLKDLWPRKEEIDEVIANSINSSMFIEKYSDIFSGTTEWKDLQVTNSSTYNWNKNSTYINNPPYFKDIGSKNNIQDIKSAKILAILGDSITTDHISPAGSISKTSPAAKYLTDHHIEPLDFNSYGSRRGNHEVMMRGTFANIRIKNEMCKGVEGGFTINQLNGTQQTIYDAAMDYKAHDVSVVIFAGKEYGSGSSRDWAAKGPGLLGVKAVIAESFERIHRSNLVGMGILPLTFTGNNTRLDLKLDGSETIDITGLSENISSYHPVKCVIQKQTGAIRTIDLILQIFTDNEINYIKHGSIMHFVVESLKG

SEQ ID NO: 67064 - DNA, 2703 bp, Listeria monocytogenes str. 1/2a F6854
  CDS (1)..(2703): transl_table=11
atgactaattggaaagaaaaagcaagagcatcatttcagctgaacgacaaaacgtatcattattacaaacttaaaaccttagaagaggacaagcttacaaacatcgagaaattaccttattctgtacgtgttttacttgaatcagtattaaggcaagcagatggccgagtaattaaggactcacacgtagaagacttagcccattggtctaaagatggcaacgaaggcgaagtaccattcaaaccagcccgtgttattttacaagatttcacaggcgttccagcagtcgttgatttagcttctttacgtaaagcaatggcggaccttggcggcgatccagaaaaaatcaatccggaaatcccagttgacttagtagtcgatcactcggtacaagtggatagctatgcgaatccagaagcacttaaaatcaacatggaacttgaattcaaacgtaacatggaacgttaccagtttttaaattgggcgcaaaaagcatttgataactatcgtgctgttccacctgcaacaggtattgttcaccaagttaacttagagtatttagcaaacgtcgtgattgcgaatgaagtagcagacggcgaatttgtagcgttcccagactcgcttgtcggaacagatagccatacaacgatgattaacggtattggcgttttaggttggggcgttggcggtattgaagcagaagctggcatgctcggtcaaccttcttacttcccaattccagaagttatcggtgtgaaattgctaggtgctttaccaaacggcgcaacagcaactgattttgctttaaaagtaacccaagtcttacgggaacaaaaagtagtaggtaaatttgttgaattttatggtccgggtgttgcgacactaccacttgctgaccgcgcaaccgttgcgaatatggctccagaatacggcgcaacttgtggatttttcccagtcgataaagaagcgcttaactacctaaaactaactggccgtgacaaagaacaaatcgaattagtagaagcttatttagaagcaaatgatttattcttcactccggaaaaagtagaaccaaactacacgcaaacagtggaaatcgatctttctgcgattgaaccaaacttggcggggccaaaacgtccccaagatttgatccctctttcgaaaatgaaagaaacattccgcgaatcgattactgccaaagcaggcaaccaaggtttcggactagataaatcagccttagacaaagaagtaaccgttacttttggcaatggcgatcaatccactatgaaaactggttcggttgcaatcgcggctattacaagttgtacgaatacttctaacccatacgttatgttaagcgctggtttagttgctaaaaaagcagtcgaaaaaggcttagaagtaccaaaattcgtaaaaacttccttggcgccaggctccaaagttgtaacaggctacttggaaaaagccggcttacttccatatttagaaaaacttgggtttgaccttgttggctatggttgtacgacgtgtatcggtaactctggtccattaaaagaggaaattgaagaagcaatccaagatagcgatttactcgtttctgcagtattaagtggtaaccgtaactttgaaggacgaattcatgcccttgtgaaagcaaacttcttagcttcaccaccactagtcgttgcctatgcgcttgctgggacaacaaatgtcgacatgctaaccgaaccaatcggacgtggtaataatggcgaagaagtcttcttagacgatatttggccaagttcagaagaagtgaaggctcttgtagaagaaactgtaactccagaacttttccgtgaacaatatgcccatgtttttgatgaaaacgaagcttggaatgcaatcgaaacaacggaagacgccctatacaaatgggatgaaaattctacgtatatcgcgaatccgccattctttgacaatttagcaaaagaagctggtaaagtggaagcattatctggcctacgtattattggtaaatttggtgattccgttacaaccgaccatatttcaccagccggagcaatcggcaaagatacgccagctggaaaattcctgcaagaacaaggcgtagcgattcgcgattttaactcttatggctctcgtcgtggtcatcacgatgttatgatgcgtggaacatttgcgaatattcgaatcaaaaaccaaatcgcaccaggaactgaaggcggctatacgacttactggccaactggcgaagtgatgtcgatttatgacgcatctagaaaatatatcgaaaataacactggtttagtcattcttgctggtgacgattacgggatgggatcatcacgtgactgggctgccaaaggaacgaacttactaggaattaaaacagttattgcgaaaagctacgagcggattcatcgttctaacctcgttatgatgggtgttttaccgctccaattccaaccaggagaagatgcagaaaccttaggcctaactggctcagaaagcttacaagtggaaattggtgaagatgtagctccaagagaccttgtaaaagtaacagctatccgtgaagacggctcaagtattactttcgatgcgcttgcacgctttgactcagaagtagaaatcgattattaccgtcacggcgggattttaccaatggtcctacgtggcaaattgaaataa

SEQ ID NO: 67065 - protein, 900 aa, Listeria monocytogenes str. 1/2a F6854
MTNWKEKARASFQLNDKTYHYYKLKTLEEDKLTNIEKLPYSVRVLLESVLRQADGRVIKDSHVEDLAHWSKDGNEGEVPFKPARVILQDFTGVPAVVDLASLRKAMADLGGDPEKINPEIPVDLVVDHSVQVDSYANPEALKINMELEFKRNMERYQFLNWAQKAFDNYRAVPPATGIVHQVNLEYLANVVIANEVADGEFVAFPDSLVGTDSHTTMINGIGVLGWGVGGIEAEAGMLGQPSYFPIPEVIGVKLLGALPNGATATDFALKVTQVLREQKVVGKFVEFYGPGVATLPLADRATVANMAPEYGATCGFFPVDKEALNYLKLTGRDKEQIELVEAYLEANDLFFTPEKVEPNYTQTVEIDLSAIEPNLAGPKRPQDLIPLSKMKETFRESITAKAGNQGFGLDKSALDKEVTVTFGNGDQSTMKTGSVAIAAITSCTNTSNPYVMLSAGLVAKKAVEKGLEVPKFVKTSLAPGSKVVTGYLEKAGLLPYLEKLGFDLVGYGCTTCIGNSGPLKEEIEEAIQDSDLLVSAVLSGNRNFEGRIHALVKANFLASPPLVVAYALAGTTNVDMLTEPIGRGNNGEEVFLDDIWPSSEEVKALVEETVTPELFREQYAHVFDENEAWNAIETTEDALYKWDENSTYIANPPFFDNLAKEAGKVEALSGLRIIGKFGDSVTTDHISPAGAIGKDTPAGKFLQEQGVAIRDFNSYGSRRGHHDVMMRGTFANIRIKNQIAPGTEGGYTTYWPTGEVMSIYDASRKYIENNTGLVILAGDDYGMGSSRDWAAKGTNLLGIKTVIAKSYERIHRSNLVMMGVLPLQFQPGEDAETLGLTGSESLQVEIGEDVAPRDLVKVTAIREDGSSITFDALARFDSEVEIDYYRHGGILPMVLRGKLK

SEQ ID NO: 67066 - DNA, 2637 bp, Rickettsia akari str. Hartford
  CDS (1)..(2637): transl_table=11
atgtcaaaagtgcataattcagaatatataaaagagttatcagtcgataatagtttatacaaaatttatgatataaataaagcggtaagcgatatcgaacttcctttaaaaaagctaccatacagtttaagaatattatgtgaaaacgtgctacgtaccagtggtaataaagaaagcttacttgtatttaaagaatggctgaacactaaaaaatccgatgcagaaatagattttatgccggcaagagttttgatgcaggattttaccggtgtgcctgctattgtagacttggctgctatgcgtgatgcgatgacgaaaataggaggcgatccgttaaaaattaatccgcttattcctgttgatttgataatagatcattcagtaagcgttgattcttatgcagctaaggattcattcgatcaaaacgtgcaaatggaaatgaaacgtaatatagagcgttatgcatttcttaaatgggggcagcaggcatttaataattttaaagtagtgccgcctggtacgggtatttgtcatcaggtaaatttagaatatttagcaaaagtcgtgtggcatcaagacggacttgcttatcctgatagtttagttggaactgatagccatacaactatggtaaatggactatcggtaattggttggggagttgggggaatagaagcagaagctgcaatgctcggtcagccgcttactatgattttgccggaagtaatcggagtgaaactaacaggaaaattaacaggtatatctacagcaaccgatttagttttaaccattactgagatgttgcggaaaaagaaagtagtaggtaagtttgttgagtttttcggtgagggcttgaaaaacctcacgattgccgaccgtgctactatttctaatatgtcgcctgaatatggtgctacttgtggctttttcccgattgatcaagaaacgataaaatatctagagctaacgggtagagaaaaagcacaaatcaaattagtagagaaatatgcaaccgagcagaatctttggtatgattttgagcatgaggcagaatatagcgaaattttagagctggatttatctacggtacatagctcgtttgctgggccaagacgtccgcaagatagggtaaatttaaccgatgtagcaagtagttttaaacatgaattgccgaatttcggtatagaaagtaaaggtattgataaaaaatatgctgtagcaaatcagaattacgaaatcggtcacggtgatgtggtcattgcagcgatcactagttgtactaatacttcaaatcctagcgtgatgattggtgcagcacttcttgccaaaaaagcactagcacatgggttaaaggtaaagccttgggttaaaacttctcttgctcctggatcaaaagtcgtaacggaatatttgaagcttagcggtcttgataaatatttagatgagctagggtttaatctagtaggttatggctgcactacttgcatcggtaattctggtcctttaaatccggaaatagaggaaactatcaataaacacgggttagttattgcttccgttttatcgggtaataggaactttgaagggcgaattaatccccttactaaagcgagctatctcggatctcctattttagtcgtagcatatgcacttagcggcactcttaatatagatttaaatagacaaccaataggaaaaaatatttatttgaaagatatttggccaagtaaagaagagatagatgaagttattgcaaattcaattaattcctctatgtttatagaaaaatattccgatatatttagtggaacaaaagagtggcaaagtctagaggttactaatagtgctacttataactggagtaagaatagtacctatattaataatccgccttattttgaggatataggcagcaagaatagtataaaagatataaaatctgcgaaaattctagcaattttcggtgattctattactaccgatcatatttcgccggcaggaagtattagtaaaaccagccctgctgctaaatatttaacggactatcatatagagcctcgagatttcaactcttacggatcacgtagaggaaatcatgaagtgatgatgcgtggcacatttgctaatacacgtataaaaaacgaaatgtgtaaggtagtagaaggtggctttaccataaaccaattaagtagtacgcagcaaactatttacgatgcggctatggactataaagctaatgatgtaccggtagtaatttttgccggtaaagaatatggtagcggttcgtctagagattgggcggcaaaaggtccgcaactgcttggcgtaaaggcagtgattgccgagagctttgagcgaatacatcgttcaaatttagttggtatgggtattttaccgctaacttttacgggcaataatacaagattagatttaaagttagacggttcagaaactattgatatcataggcttaagtgaacaaataaagccttataatcctgttaaatgcgtgataaaaaaacaaactggcgaaacaagaacaatcgatttaatattgcaaatatttacggataatgagataaattatatacggcacggcagtattatgcattttgtggtagagagtttgaaaaaataa

SEQ ID NO: 67067 - protein, 878 aa, Rickettsia akari str. Hartford
MSKVHNSEYIKELSVDNSLYKIYDINKAVSDIELPLKKLPYSLRILCENVLRTSGNKESLLVFKEWLNTKKSDAEIDFMPARVLMQDFTGVPAIVDLAAMRDAMTKIGGDPLKINPLIPVDLIIDHSVSVDSYAAKDSFDQNVQMEMKRNIERYAFLKWGQQAFNNFKVVPPGTGICHQVNLEYLAKVVWHQDGLAYPDSLVGTDSHTTMVNGLSVIGWGVGGIEAEAAMLGQPLTMILPEVIGVKLTGKLTGISTATDLVLTITEMLRKKKVVGKFVEFFGEGLKNLTIADRATISNMSPEYGATCGFFPIDQETIKYLELTGREKAQIKLVEKYATEQNLWYDFEHEAEYSEILELDLSTVHSSFAGPRRPQDRVNLTDVASSFKHELPNFGIESKGIDKKYAVANQNYEIGHGDVVIAAITSCTNTSNPSVMIGAALLAKKALAHGLKVKPWVKTSLAPGSKVVTEYLKLSGLDKYLDELGFNLVGYGCTTCIGNSGPLNPEIEETINKHGLVIASVLSGNRNFEGRINPLTKASYLGSPILVVAYALSGTLNIDLNRQPIGKNIYLKDIWPSKEEIDEVIANSINSSMFIEKYSDIFSGTKEWQSLEVTNSATYNWSKNSTYINNPPYFEDIGSKNSIKDIKSAKILAIFGDSITTDHISPAGSISKTSPAAKYLTDYHIEPRDFNSYGSRRGNHEVMMRGTFANTRIKNEMCKVVEGGFTINQLSSTQQTIYDAAMDYKANDVPVVIFAGKEYGSGSSRDWAAKGPQLLGVKAVIAESFERIHRSNLVGMGILPLTFTGNNTRLDLKLDGSETIDIIGLSEQIKPYNPVKCVIKKQTGETRTIDLILQIFTDNEINYIRHGSIMHFVVESLKK

SEQ ID NO: 67068 - DNA, 2724 bp, Exiguobacterium sibiricum 255-15
  CDS (1)..(2724): transl_table=11
atgaagcaaacgcaaccaacgcaagacgtgtttggtgcacgccgttcgtttgaagcaaacggtaaaaattacaactattacagccttgaaaaattggaagaactcggtctgacggaagtcaaacgccttccatattctatccgtgtgctgcttgaatccgtccttcgtcaacaagacggtcgttcgattacacaagagcatgtcgaaaacttggcgaaatggggaactgcccaagtatcgaatgatatcgatgtgccgttcaagccgtcacgcgtcatcttacaggatttcacgggcgttccgacggtcgtcgatctcgcgtcactccgtaaagcgatgcaggacctcggtggagatccatcagtcatcaacccggaagttccggttgatctcgtcgttgaccactcggttcaagtcgattcttacggatttgccggtgcactcgctgaaaacatggatcttgagttcgaacggaacgaagaacgttacaaattgttacgctgggcaacaacagcattcgataactaccgtgctgtaccgcctgcaacaggaatcgtccaccaagttaacctcgagtacttggcatctgtcgttcttgaaaaagaaacagcagacggttcggttgatgtttacccggatacactcgtcggaacagattcgcacacaacgatgatcaacggacttggtgtccttggttggggtgtcggtggaatcgaagcagaagcaggcatgctcggacaaccttcattcttcccggttcctgaagttatcggtgtccgcatcacaggtgaaatgcaccctggaacaacagcaacggacgttgcgctccgcgtgacggaaatgttacgtcaacaaaacgttgtcggtaaattcgttgagttcttcggaccatcccttcacttgatgtcattgtctgaccgcgcgacaatcgccaacatggcgcctgaatacggtgcgacatgcggattcttcccggttgatacggaaacgttgacgtacctccgtttgacaggccgcgacgaagcattgattgaaaaagtcgaaaactactcaaaagcaaacggcttgttctacacgccgcaaaacgaagatccaacgttcacgaagacggttgaacttgatctgtcgacaatcgtccctgcccttgccggaccaaaacgtccacaagaccggatcgatttgacggacgtgcacacgtcattccaaaaagcgttgacagcaccacaaggaaacgccggttttggtcttgctgaagaagaagcaagcaaagtcgctgtcgttcaatttaaagacgaagcggttgagatgcgtacgggagacctcgcgattgcagcaatcacgagctgtacgaacacatcgaacccgtacgtcatgatcggtgccggactcgttgcgaaaaaagcaatcgatcttggactgacggttccgaaatacgtcaagacatcacttgcaccgggatcaaaagtcgttacggattaccttgagaaatcaggacttcaaccgtacctcgatcaactcggcttcaacacagttggttacgggtgtacgacatgtatcggaaactcgggtccacttgaccttgccgtcgaaaacgcgatcctcggatcagacctgcttgtctcgtctgtcctctcaggaaaccggaacttcgaaggacgggttcacccgctcgtgaaagccaactacttggcatcaccaccactcgtcgtcgcgtacgcgattgccggaacggttgacgtggacatcatgaacgcgtcactcggaacaggcaaagacggacaagaagtcttcttcgcggacatctggccgtcacgtgacgagattcaaacgatcatcaacacggtcgtcacaccggaaagcttccgtgccgagtatgactcggtcttcacaggaaacgaacgctggaacaaccttgatgtgccgacaggcgatcagtatgacttcgacgaagagtcgacatatatccaaaacccgccgttcttcgagaacttggcgaaagaagccggtcacgtcgaagccttaaacgatctccgtgtcttcggtaagtttgcggattctgtcacgacagaccacatctcaccagccggttcattctcgaaaacgacaccagccggacaatacctcgtcagcaaaggtgtcgcaccaaaagacttcaactcatacggttcacgccgtggtaaccacgagatcatgatgcgcggaacattcgcgaacatccggatccgtaaccaagtcgctccaggtactgaaggcggcttcacgacgtactggccgacaggcgaaacgatggcaatgtacgatgctgcaatgaagtacaaggaagatggcacaggtcttgtcatcctcgctggtaaagattacgggatgggttcatcacgtgactgggcagcgaaaggaacaaaccttcttggtgtcaaagccgtcatcgccgagagctttgagcggattcaccgttcgaacctcgtcatgatgggtgtcttgccactccaatacgcggccggcacatcggctgaatcgcttggcttaacaggcgaagaagcaatcagcatcgcgatcgacgagtcagttcgtccgcgtgacgtcgtcgaagtcacagcgacagcgaatgacggaaaagtcacgaagttcgaagcaatcgctcgtttcgattcagaagtcgatatcgattactaccgtcacggtggaatcctaccgatggttctccgcgaacgcttgcaaaactaa

SEQ ID NO: 67069 - protein, 907 aa, Exiguobacterium sibiricum 255-15
MKQTQPTQDVFGARRSFEANGKNYNYYSLEKLEELGLTEVKRLPYSIRVLLESVLRQQDGRSITQEHVENLAKWGTAQVSNDIDVPFKPSRVILQDFTGVPTVVDLASLRKAMQDLGGDPSVINPEVPVDLVVDHSVQVDSYGFAGALAENMDLEFERNEERYKLLRWATTAFDNYRAVPPATGIVHQVNLEYLASVVLEKETADGSVDVYPDTLVGTDSHTTMINGLGVLGWGVGGIEAEAGMLGQPSFFPVPEVIGVRITGEMHPGTTATDVALRVTEMLRQQNVVGKFVEFFGPSLHLMSLSDRATIANMAPEYGATCGFFPVDTETLTYLRLTGRDEALIEKVENYSKANGLFYTPQNEDPTFTKTVELDLSTIVPALAGPKRPQDRIDLTDVHTSFQKALTAPQGNAGFGLAEEEASKVAVVQFKDEAVEMRTGDLAIAAITSCTNTSNPYVMIGAGLVAKKAIDLGLTVPKYVKTSLAPGSKVVTDYLEKSGLQPYLDQLGFNTVGYGCTTCIGNSGPLDLAVENAILGSDLLVSSVLSGNRNFEGRVHPLVKANYLASPPLVVAYAIAGTVDVDIMNASLGTGKDGQEVFFADIWPSRDEIQTIINTVVTPESFRAEYDSVFTGNERWNNLDVPTGDQYDFDEESTYIQNPPFFENLAKEAGHVEALNDLRVFGKFADSVTTDHISPAGSFSKTTPAGQYLVSKGVAPKDFNSYGSRRGNHEIMMRGTFANIRIRNQVAPGTEGGFTTYWPTGETMAMYDAAMKYKEDGTGLVILAGKDYGMGSSRDWAAKGTNLLGVKAVIAESFERIHRSNLVMMGVLPLQYAAGTSAESLGLTGEEAISIAIDESVRPRDVVEVTATANDGKVTKFEAIARFDSEVDIDYYRHGGILPMVLRERLQN

SEQ ID NO: 67070 - DNA, 2721 bp, Prosthecochloris aestuarii DSM 271
  CDS (1)..(2721): transl_table=11
atgcatcatcacgatcctcttggcgcattgaaagagctcgctgtcgatgggcaacggtttcgtttctacagcttgcaggccctcgaagagaagggtttcggaaaggtttccgctcttccttccagcatcaaaatcctgcttgagtcagttcttcgtcattgcggtaatggtcttgtccgagaggaggatgttcgtgctgttgccggatggagggctgataatcccgggagcatagagattcctttcaatccgtcgagggtagtgttgcaggactttaccggcgtgccttcaattgtcgatcttgcagctctgcgcgatgcctgcattgacctcggtgctgacccgtcacgcatcaatcctctcgttccctgtgacctggtggtcgatcactctttgcaggttgacgcgttcgggacatccgatgccctgcagaagaatctggagcgggagtttgaacgcaatggcgaacggtacggttttctgaaatggggtcagcaggcatttagcaatttcaatgtggttcctccgggcacagggatcgttcatcaggtcaatctggagcatttttctccagtggtgcatgaggaggggggtgttctgtggcccgattctcttgtcggaaccgacagtcatacgcctatgatcaacgccctgggggttctgggatggggtgtcggcgggatagaagcggaggcggttatgctgggccagccggtctacatgcttcttcccgaggttgtgggcgtgaggtttacgggtcgtcttgcccggcatgtgacggctaccgatcttgttctgaccgttacccaggtattgagaaaagagggggttgttggagcttttgtcgagtttttcgggccgggtctttcgtcgcttacccttcccgacagggcagcaataagtaatatgtcgcccgagtatggagcgacggttggctattttccgattgaccgcataagtctggactatcttgctatgactgatcggggggcctcaaatgaacggatcgaacagtacgcaaaagcccaggggctctggcacgaggagggagacgagccgatctgttccagagtgatcgatctggaccttggttctgttgagccttcgcttgcaggcccgaaacgtccccaggaccgcatttcactctcctgtatggccggtcagtggaggcaggatctcgcggaggtgtacaaaaagccgcacactgccgaccatgatctttctgactctccccggaacggagatcaggggattgggttcatcatggatggcagggaattgactcttgatcacgggtcggtggtgatcgccgcgatcacctcgtgcaccaacaccagcaatccattcgtgcttgtcgcggcagctcttcttgcccgtcgggcccgagagaaaggtcttcgcgtcaagccgtgggtcaaaacctcttttgcgcccggttcgcgggttgtgatcgattatctcgaagccgcagggttgatggaggacctcgaagcacttggttttgccaatgtcggttttggttgtaccacctgcatcggtaattccggaccgctgcccgaaccggttgccgatgccatcaggcagggggatctcgtggtggcaggtgttctttcgggtaaccgcaatttcgagggacgtattaatccgctggtgaaagcaaactatcttgcaagccctctgcttgttgtggcctatgccattgcaggaacgatcgagcgggatcttgtcggcgagcctcttggcgtggataacgagggaaaggatatttttctccgggatatctggcctgctgacgaggatgttcgctcgattgtccgttcagaggttaaagccggatattttgccgatcgctatgcgaaagtgcatgacggaactccagagtggagggcgatcaatgccggagccggaagcatctacacctgggatctttcgtcgacctacatccggagacctccctttttcgaggggttgaagcttgaagcagagcctccggcagctatccgcgatgcgcgctgccttgcgcttttcggagatagcgtgaccactgatcatatcagcccggcgggcgcgatactgcctacgcagccggcaggagaatatcttctctctcgcggggttaatgtgtccgattttaacagttttggttcacgcagggggaaccatgaggtgatgattcgcggaacgttcgacaacattcgtatcagaaatcttctcgccccaggcaccgagggaggatggacaaggctttttctccggggtgctgcagctgatgctccggtcgtgaccatctatgacgcatcgaagcgatatcgtgaggaaggcgtccccctgatcgtgattgccggcagcgattacggaatgggcagcagtcgtgactgggccgccaaagggacttcactgcttggtgtcagagcggtcatcgcagagagtttcgagcgaattcaccgatccaatctggttggcatgggagtactgccattgcagttcatggagggagagtctgccgcatctctcggcctttgcggggaggagtgctatgaaattgtttcccgggagcctccttgtccccgtgaggagatctccgtcatagcccggcaccctgatacgggcaacgagactgttttcagcgttatctgccggatcgattcacccgttgaagtcgactattatcgccacggagggattcttccgatggtggtgaggtctatcgcgctttcctga

SEQ ID NO: 67071 - protein, 906 aa, Prosthecochloris aestuarii DSM 271
MHHHDPLGALKELAVDGQRFRFYSLQALEEKGFGKVSALPSSIKILLESVLRHCGNGLVREEDVRAVAGWRADNPGSIEIPFNPSRVVLQDFTGVPSIVDLAALRDACIDLGADPSRINPLVPCDLVVDHSLQVDAFGTSDALQKNLEREFERNGERYGFLKWGQQAFSNFNVVPPGTGIVHQVNLEHFSPVVHEEGGVLWPDSLVGTDSHTPMINALGVLGWGVGGIEAEAVMLGQPVYMLLPEVVGVRFTGRLARHVTATDLVLTVTQVLRKEGVVGAFVEFFGPGLSSLTLPDRAAISNMSPEYGATVGYFPIDRISLDYLAMTDRGASNERIEQYAKAQGLWHEEGDEPICSRVIDLDLGSVEPSLAGPKRPQDRISLSCMAGQWRQDLAEVYKKPHTADHDLSDSPRNGDQGIGFIMDGRELTLDHGSVVIAAITSCTNTSNPFVLVAAALLARRAREKGLRVKPWVKTSFAPGSRVVIDYLEAAGLMEDLEALGFANVGFGCTTCIGNSGPLPEPVADAIRQGDLVVAGVLSGNRNFEGRINPLVKANYLASPLLVVAYAIAGTIERDLVGEPLGVDNEGKDIFLRDIWPADEDVRSIVRSEVKAGYFADRYAKVHDGTPEWRAINAGAGSIYTWDLSSTYIRRPPFFEGLKLEAEPPAAIRDARCLALFGDSVTTDHISPAGAILPTQPAGEYLLSRGVNVSDFNSFGSRRGNHEVMIRGTFDNIRIRNLLAPGTEGGWTRLFLRGAAADAPVVTIYDASKRYREEGVPLIVIAGSDYGMGSSRDWAAKGTSLLGVRAVIAESFERIHRSNLVGMGVLPLQFMEGESAASLGLCGEECYEIVSREPPCPREEISVIARHPDTGNETVFSVICRIDSPVEVDYYRHGGILPMVVRSIALS

SEQ ID NO: 67072 - DNA, 2706 bp, Xylella fastidiosa Dixon
  CDS (1)..(2706): transl_table=11
atggttcccaaaggggggccgttatcaccccatcgacactcgcgctatgtagactacacagcagccgcagtgccttcccctatgcacaaccgctattgcaaacccctgccggggacaccgttccattactgcgatgctcgggccgccattgatgcgttgtgcccaggcgcttacgcagcgttgccatatgtcgctcgcgtgtatgcagaaaacgtgttgcgccgcgccgcgccggatcagtggcctgcgtatctgggccagcttattgggcggcgctgtgataccgatatcccgtggtttccagcgcggatcgtctgccatgacatccttggcctgacagcactggttgatttggctggattgcgtgatgcgattgcggcccagggaggggatgcctcccaggtcaaccccacagtgccggtacaactgattgttgaccactcattggcggtggaatacggcggcagcgatccggaggcggttgccaaaaaccgtgcgattgaagcacgccgcaacgcggatcgatttcattttatcgagtggacccgacacgcttttgaaaatgtcacggtgattcctccggggtacggcatcatgcaccaaatcaacctggaggcactgtcgcctgtcgtcgcagtccaggatggcgtggcgttcccagatacctgtatcggtacagatagccataccccgcatgtgaatgctctgggtgtggttgccattggtgttgggggcttagaggcggagagtgtgatgctgggccgtgcggtgtggctgcgctgtccagagagtgtgggcgtggagttacacggacgcccgcgccccgggatcaccgcaacggatattgtgctggcgctgacagcgtttttacgccaggcgcgtgtggtgggtgcgtatctggaattccgtggcgaaggcgtcgctgcgctcaccgtgggtgaccgtgccacgattgccaacatggctccggaatatggcgcaactgcggcgttgttctttattgatgcgcagaccgtggagtatttacggctgaccggacgcgacaaggcacaggtggcgttggtcgatacctacgccaaacaggccggactgtgggccgatacgcttgagggggcacagtacgcgcgcctgctgcatttcgacctctccagcgtcgcacgcaccatggctggcccgtccagcccacatcaccaattgcccacatccgcgttgacggagcgcggcattgctggcggcttggcgcaagcgcgggcagaggaagccgccgggcatctgcccgatggcgcagtcatcattgcggcaatcacctcatgcaccaatacctctaacccgcgtaacctcatcgctgccggtttattggcgcgtaatgctcatgcccggggactacgctgtaaaccttgggtcaaaacctccctagcgccgggttcccaagcggtgccattgtatttggaggcggccggactgttgtacgcgctacagcagcttggctttggcgtcgtcggttttgcttgcaccacctgcaatggcatgagtggtgcactcgatccgctgatccagcacgccatcatggcgcgtcatgtgcacaccgtggccgtgttgtcggggaaccgcaacttcgacggacgcattcatcctgatgccacacaagcttttttggcttcgccgcctctggtgattgcctatgcaatcgctggcaccatccgttttgatattgaacgagatgtgctcggtcatgatgccgatggtaccccggtgatgctcaaagatatttggcccggtgatgccgacattgatgcactggtgcgtcgcagcgttcacccggagcaattccgtcgtgtgtacatgccgctgttgcaagcgtctagacagtggcgtgaatgcgtcccgccgttgtacgcatggcacccccagagtacgtacatccgtcggcccccttattgggaaggcgtcttagccagtgcgcgcaccttgcgcgggttacggccgttggcggtgttgggcgataacatcaccaccgatcatctgtctccgtcgaatgccatcctgcccaatagtgcggctggagagtatctggcccgcatgggggtgccccaagaggactttaatagttatgcaacccgccgcggcgaccatttgaccgcccagcgcgccaccttcgctaatccgatgctgttaaacgagttggtgcgtgatgctgatggcaaggtgcgtcaagggtcgctgacccggcttgagccggatggcaccgtgatgcggatgtgggaagccatcgaaatctacatgcagcgcagccaacctttgatcatcattgctggtgcggattatgggcagggatcctcccgtgactgggcggccaagggcgtgcgtctggctggcgtggaggcgattgtggccgaagggttcgagcgtatccaccgcaccaatgtcattggcatgggcgtgttaccgctgacgtttcaccctggtaccacccgcatcacgttgcgcattgatggcacggaattgttcgatgtatgcggcgtgccgagtgtgggtgcggtgttgatcctgcgtatccagcgccgtgatggtagcgtcgcggaagtgccggtcacatgtcggctcgataccgctgaggagctgtcaatttatgcggccggtggcgtgttgcagcgtgttgcgcagcagatgcttgtcaccacctcaggcacctcacaacgcgtttga

SEQ ID NO: 67073 - protein, 901 aa, Xylella fastidiosa Dixon
MVPKGGPLSPHRHSRYVDYTAAAVPSPMHNRYCKPLPGTPFHYCDARAAIDALCPGAYAALPYVARVYAENVLRRAAPDQWPAYLGQLIGRRCDTDIPWFPARIVCHDILGLTALVDLAGLRDAIAAQGGDASQVNPTVPVQLIVDHSLAVEYGGSDPEAVAKNRAIEARRNADRFHFIEWTRHAFENVTVIPPGYGIMHQINLEALSPVVAVQDGVAFPDTCIGTDSHTPHVNALGVVAIGVGGLEAESVMLGRAVWLRCPESVGVELHGRPRPGITATDIVLALTAFLRQARVVGAYLEFRGEGVAALTVGDRATIANMAPEYGATAALFFIDAQTVEYLRLTGRDKAQVALVDTYAKQAGLWADTLEGAQYARLLHFDLSSVARTMAGPSSPHHQLPTSALTERGIAGGLAQARAEEAAGHLPDGAVIIAAITSCTNTSNPRNLIAAGLLARNAHARGLRCKPWVKTSLAPGSQAVPLYLEAAGLLYALQQLGFGVVGFACTTCNGMSGALDPLIQHAIMARHVHTVAVLSGNRNFDGRIHPDATQAFLASPPLVIAYAIAGTIRFDIERDVLGHDADGTPVMLKDIWPGDADIDALVRRSVHPEQFRRVYMPLLQASRQWRECVPPLYAWHPQSTYIRRPPYWEGVLASARTLRGLRPLAVLGDNITTDHLSPSNAILPNSAAGEYLARMGVPQEDFNSYATRRGDHLTAQRATFANPMLLNELVRDADGKVRQGSLTRLEPDGTVMRMWEAIEIYMQRSQPLIIIAGADYGQGSSRDWAAKGVRLAGVEAIVAEGFERIHRTNVIGMGVLPLTFHPGTTRITLRIDGTELFDVCGVPSVGAVLILRIQRRDGSVAEVPVTCRLDTAEELSIYAAGGVLQRVAQQMLVTTSGTSQRV

SEQ ID NO: 67074 - DNA, 2268 bp, Croceibacter atlanticus HTCC2559
  CDS (1)..(2268): transl_table=11
atggcattcgatattgacatgataaaaaaggtctatgaccaaatgacggaacgtgtagataaagcacgtgaggttgttggtaagcccttaacactttcagaaaaaatactttacagtcacctttgggacggtaatgcaactcaagcatttactagatctaaagattatgtagactttgcaccagaccgtatagcttgtcaagatgctacagcgcaaatggcgcttttgcaattcatgcaagctggaaaacctaatgtggcagtgcctactacagtacattgtgatcaccttatacaggcaaagcaaggagctaaagcagatttaaaacgagctaacgaaacaagtaatgaggtttttgattttcttgaatctgtatctaaaaaatatggtattggcttctggaaaccaggtgcaggtattattcaccaagtagtattagaaaattatgcatttcctggaggaatgatgattggtacagactctcacacagttaacgctggtggtttaggaatggtagctattggtgttggtggtgcagatgctgtcgatgttatggctggtatgccttgggaacttaagtttccaaaacttataggtgtaaagctaaccgggaaacttaatggttggacagctgctaaagatgttatcttaaaggttgctggtattcttaccgtaaaaggaggaacaggcgcaattattgaatactttgggccaggcgcaaaatctatgagctgtactggtaaaggaactatttgtaatatgggtgcagaagttggtgcaacaacatcaacatttggttatgacgaatctatggagcgtttccttagagcgacagacagaagtgatgtggcagatgctgctaacgctgttaaagattaccttactgcagatcctgaagtttatgaaactccagaagattattttgatgaggtaatcgaaataaatcttgacgagttacgtcctcacctaaacggaccttttactccagatttagcgacacctgtttcagaaatgaaagacaaggctaaaaagaacgactggccaattaaagtagattggggtcttataggatcttgtacaaactcatcttatgaagatttaactagagctgcatctatagctaaacaagctgtagataagaagatagtagcaaagtctgactttggtattaatccaggttcagagcaaatacgttacacagcagagcgtgatggtattcttaagatatttgaagaccttaatgcaacaatctttacaaatgcctgtggaccttgtattgggcaatgggatcgtagtgatttaaaaggcgatgaaaagaatactatagtgcactcttttaatagaaacttctctaaaagagcagatggtaaccctaatacacatgcctttgtaggatctccagaaatggtggctgcaattgcaatctcaggacgtttagattttgatccacttaacgatacgcttctaaatgaagatggtgaagaggtaaaattagatgtacctagcggtatagaactgcctccaaaaggttttgatgtagaagatgcaggttatgtagagccagtttcagatggtagcgatgtagatgtaaaagttgctgaagatagtgagcgtttacaactattaacaccttttgagccttgggatggtaaaaacttaacagacgctaaattgctaattaaagcatttggaaaatgtactacagaccatattagtatggctggtccttggttacgttatagaggtcacttagataatatttctaataactgccttatcggagctgtaaatgcttacaacaagcaaacaaactttgtgaaagaccaattaaccggagagtatgatgccgtgcctaaagtacagcgtcattacaaggaaaagggtataccaacagttgttgtaggagatcataactatggtgaaggttcttctagagagcacgctgcaatggagccaagacaccttggtgtgaaagtagtattggtaaaatcttttgcaagaattcatgaaacaaaccttaagaaacaaggtatgttaggaatcacttttgcaaatgaagctgactatgatttaatacaagaagatgatacgttcaactttatagatttagaagattttgcaccagataagcaattaactatcgagatagttcacgaagatggtagcaaggatacaattaaagcaaatcacacttacaaccttccacaaattgaatggtataaagaaggatctgcattaaatcttataaaaaaacagaacaggtcttaa

SEQ ID NO: 67075 - protein, 755 aa, Croceibacter atlanticus HTCC2559
MAFDIDMIKKVYDQMTERVDKAREVVGKPLTLSEKILYSHLWDGNATQAFTRSKDYVDFAPDRIACQDATAQMALLQFMQAGKPNVAVPTTVHCDHLIQAKQGAKADLKRANETSNEVFDFLESVSKKYGIGFWKPGAGIIHQVVLENYAFPGGMMIGTDSHTVNAGGLGMVAIGVGGADAVDVMAGMPWELKFPKLIGVKLTGKLNGWTAAKDVILKVAGILTVKGGTGAIIEYFGPGAKSMSCTGKGTICNMGAEVGATTSTFGYDESMERFLRATDRSDVADAANAVKDYLTADPEVYETPEDYFDEVIEINLDELRPHLNGPFTPDLATPVSEMKDKAKKNDWPIKVDWGLIGSCTNSSYEDLTRAASIAKQAVDKKIVAKSDFGINPGSEQIRYTAERDGILKIFEDLNATIFTNACGPCIGQWDRSDLKGDEKNTIVHSFNRNFSKRADGNPNTHAFVGSPEMVAAIAISGRLDFDPLNDTLLNEDGEEVKLDVPSGIELPPKGFDVEDAGYVEPVSDGSDVDVKVAEDSERLQLLTPFEPWDGKNLTDAKLLIKAFGKCTTDHISMAGPWLRYRGHLDNISNNCLIGAVNAYNKQTNFVKDQLTGEYDAVPKVQRHYKEKGIPTVVVGDHNYGEGSSREHAAMEPRHLGVKVVLVKSFARIHETNLKKQGMLGITFANEADYDLIQEDDTFNFIDLEDFAPDKQLTIEIVHEDGSKDTIKANHTYNLPQIEWYKEGSALNLIKKQNRS

SEQ ID NO: 67076 - DNA, 2775 bp, Sulfitobacter sp. EE-36
  CDS (1)..(2775): transl_table=11
atgaccatcttcgttggccaggacaccgccaaaacccgcaaaactctatcttcgggcagccaatccatcgcttattattcgattcctgcagcgcaggaagccggtctgggtgatttctctaacttgccagccgcgcttaaggtggtgcttgagaacatgctgcgtttcgaagatggcaaaactgtcaccgtcgatgacatcaaggccttcgccgaatggggtgccaagggcggccagaacccgcgcgagatcgcttaccgtcccgcacgcgtgttgatgcaggatttcaccggcgttcccgcagttgtcgaccttgcggcgatgcgcgacgggctggtcgccttgggtggcgatgccgacaagattaacccgctgaaccctgttgatcttgtcatcgaccactcggtcatgatcgacgaattcggcaacccgcgcgcgttccagatgaacgttgaccgcgaatacgagcgcaacatcgaacgctataccttcctgaaatggggccagaaggcgtttaacaacttccgcgttgtgccccccggtaccggcatctgccaccaggtgaaccttgaatatctggcgcagaccgtctggactgataaagaccaagacggcgtcgaagtcgcatatcctgacacgctcgtcgggaccgacagccacaccacaatggtaaacggcatggccgttctgggctggggcgttggcgggatcgaggccgaagccgcgatgctgggtcagccgatttcgatgttgatccccgaggttatcggctttgaactgaccggtgccatgatggaaggcaccaccgggaccgatctggtactgaaagtggtcgaaatgctgcgcgagaagggcgtggttggtaaattcgttgaattctacggtgccggccttgatagcctgcccctggcggaccgcgcgacaatcgccaacatggcccccgaatacggtgcgacctgtggcttcttcccgatcgatgccgaaaccctgcgttacatgcgcaccaccggccgtgatgaagaccgcatcgcgctggtcgaagcctatgccaaggaaaacggcatgtggcgcggcgatgactatgcgccggtttacaccgacacactgtcgctcgacatgggcaccatcgtgcctgcgatctcgggtccaaagcgtccgcaagactacattgcactgacctcggcacacactgcatttgcagaatacgtgaagggcgtgcgcgaaggtaaagacaccacagccaacgccgaagtccgctgggaaggtgagggcggccagccagagcctcaagacatccccggtgacgagggcaaccacaagcgtggctacgtccaaaccgaagatggcaactaccagctgcatgacgggtccatcgtcattgcgtcgatcacatcgtgcaccaacacatccaacccctatgtgatgatcggtgccggtctggttgcacgcaaggcacgcgccttgggcctgacacgcaagccttgggtcaagacgtcgctcgcgcccggtagccaggttgtgtccgcctatcttgaggccgcaaacctgcaagaggatctggacgccatcggcttcaacctcgtcgggtatggctgcaccacctgtatcggtaactccggcccgctcgaagcaccgatcagcaaggcgatcaatgactacgacctgatcgggacatcgatcctctcgggtaaccggaactttgaagggcggatttcgcctgacgtgcgcgccaactatctggcgtcgcctcccttggtcgtggcctacgcgctggtcggtgacatgaacgtcgatctggccaacagcccgctgggtcaggacaaggacggcaatgacgtctatctgaaagacatctggccaacatccaaggaagtcgctgatctggtcgagcagaccgtgacccgcgaagccttccaggaaaaatatgccgacgtcttcaagggcgacgaaaagtggcagtccgtcgaaaccaccgacgccaagacctatgactggccaccaacctcgacctatgtgcagaacccgccctacttccaaggcatgtcgccagagccgggtgtgatcaccaacatcgagaacgccaaagtgcttgccgttctgggtgacatgatcacgaccgaccacatctcgcctgccggttctttcaaggaaaccacgccagcgggtcagtatctggtggaacgtcaggtgcctgtgcgtgaattcaactcgtacggtagccgccgtggtaaccacgaggtcatgatgcgcggcacatttgccaacatccgtatcaagaacgaaatgctggacggtgttgagggcggctataccaaaggccccgatggcgaacagacctcgatctttgacgcggctatggcgcatcaggaaaacggcacgccgctggtcatcttcggtggtgaacaatacggcgcgggttcgtcccgtgactgggcggccaaaggcacggcgttgctgggcgtcaaggcggtcatcgccgagaactttgaacgtatccaccgctccaacctggttggcatgggtgttatcccgttcgaattcaccaacggcgacacccgcaagagcctgggcctgaccggtgacgaaaccgtttcgatcagcggtctggacaccatcaagccgctgcaagaagtgccttgcacgatcacaatggcagatggctcggtcaaagagatcatgatcaaatgccggatcgataccgcgatcgagattgaatacatcgaacacggtggcgttctgcactacgtactgcgcaacctcgcgaaatcggcctaa

SEQ ID NO: 67077 - protein, 924 aa, Sulfitobacter sp. EE-36
MTIFVGQDTAKTRKTLSSGSQSIAYYSIPAAQEAGLGDFSNLPAALKVVLENMLRFEDGKTVTVDDIKAFAEWGAKGGQNPREIAYRPARVLMQDFTGVPAVVDLAAMRDGLVALGGDADKINPLNPVDLVIDHSVMIDEFGNPRAFQMNVDREYERNIERYTFLKWGQKAFNNFRVVPPGTGICHQVNLEYLAQTVWTDKDQDGVEVAYPDTLVGTDSHTTMVNGMAVLGWGVGGIEAEAAMLGQPISMLIPEVIGFELTGAMMEGTTGTDLVLKVVEMLREKGVVGKFVEFYGAGLDSLPLADRATIANMAPEYGATCGFFPIDAETLRYMRTTGRDEDRIALVEAYAKENGMWRGDDYAPVYTDTLSLDMGTIVPAISGPKRPQDYIALTSAHTAFAEYVKGVREGKDTTANAEVRWEGEGGQPEPQDIPGDEGNHKRGYVQTEDGNYQLHDGSIVIASITSCTNTSNPYVMIGAGLVARKARALGLTRKPWVKTSLAPGSQVVSAYLEAANLQEDLDAIGFNLVGYGCTTCIGNSGPLEAPISKAINDYDLIGTSILSGNRNFEGRISPDVRANYLASPPLVVAYALVGDMNVDLANSPLGQDKDGNDVYLKDIWPTSKEVADLVEQTVTREAFQEKYADVFKGDEKWQSVETTDAKTYDWPPTSTYVQNPPYFQGMSPEPGVITNIENAKVLAVLGDMITTDHISPAGSFKETTPAGQYLVERQVPVREFNSYGSRRGNHEVMMRGTFANIRIKNEMLDGVEGGYTKGPDGEQTSIFDAAMAHQENGTPLVIFGGEQYGAGSSRDWAAKGTALLGVKAVIAENFERIHRSNLVGMGVIPFEFTNGDTRKSLGLTGDETVSISGLDTIKPLQEVPCTITMADGSVKEIMIKCRIDTAIEIEYIEHGGVLHYVLRNLAKSA

SEQ ID NO: 67078 - DNA, 2775 bp, Roseovarius nubinhibens ISM
  CDS (1)..(2775): transl_table=11
atgcccattaccgttggtcaggacaccgccaagacgcgcaagcaactcacggtcggtagccaatccgtatcctattactccatcgccgccgccgaggccgcaggtctgggcgatttttcgcgcctgcccgccgcgctcaaggtggtgctcgaaaacatgctgcgtttcgaggacggcaagaccgtcaccaccgatgacatcaaggcctttgccgattgggcagagaaaggcggcaagaacccgcgcgagatcgcctatcgtccggcccgcgtcttgatgcaggatttcaccggcgttccggcggtggtcgatctggccgcgatgcgcgacgggatcaaggcgctgggcggcgacgcgcagaagatcaacccgctcaaccccgtcgatctggtcatcgaccactcggtgatgatcgacgagttcggcaacccgcgcgcgttccagatgaacgtcgaccgcgaatatgaacgcaacatggagcgttaccagttcctcaaatggggtcagggcgcgttcaacaacttccgcgtcgtgccccccggcaccggcatctgccaccaggtgaacctcgaatatctggcccagaccgtctggaccgatgtcgaccaagacggcaccgaagtggcctatcccgacacgctcgtcggcaccgacagccacaccaccatggtcaatggcgcggcggttctgggctggggcgtcggcggcatcgaggccgaagccgccatgctcggccagccgatttcgatgctcatccccgaagtcgtgggctttgagctcaccggccagatggtcgaaggcaccaccgccaccgacctcgtgctcaaggtcgtggaaatgctgcgcgaaaagggcgtggttggcaaattcgtcgaattctacggcgccggtctcgacaacctgccgctggccgaccgtgccaccatcggcaacatggcgcccgaatatggcgcgacctgtggcttcttcccgatcgatcaggaaaccctgcgctatctggaactcaccggccgcgacaaggaccgcatcgcgctggtcgaagcctatgccaaggaaaacggcatgtggcgcggcgccgattacgcgccggtctataccgacacgctgagcctcgacatgggcaccgtggtgcccgccatctccggcccgaagcgcccgcaggaccatatcgcgctcgacgtggccgccaccgagttcggcaaatgggtcaagggcttccgcgaaggccgtgacgccggcgaacgggccgagatccgctgggaaggtgagggcggacagcctgaaccggccgagatccccggcgacgaaggccaccatcagcgcggctatgtgcccaccgatgacggccattatcagctccacgacggctcgatcgtgatcgcctcgatcacctcctgcaccaacacgtcgaacccctatgtgatgatcggcgcgggtctcgtcgcccgcaaggcgcgcgaactgggactcaaccgcaaaccttgggtgaaaacctcgctcgccccgggcagccaggtcgtgtcggaatatctcgaggccgccgggcttcaggacgatctcgacgccatcggcttcaacctggtcggctatggctgcaccacctgcatcggcaactccggcccgctggcgcccgagatttccaaatgcatcaatgattacgacctgatcggcgtctcggtgctctcgggcaaccgcaacttcgaaggccgtatctcgcccgacgtgcgcgccaactacctcgcgtcgccgccgctggtggtggcctatgcgctggccggtgacatgaatgtcgacgtcaccaaagacccgctcggcaccgacaaggacggcaacccggtctacctcaaggacatttggcccacctccaaggaaatcgccgatctggtgcaaaagaccgtcacccgcgacgccttccagtcgaaatatgccgatgtcttcaaaggcgacgagaaatggcaggcggtcgagacctccgagggcgagacctatgactggccgccgcaatcgacctatgtgcagaacccgccctatttccaaggcatgtccaaggatcccggcacgatctcgaacatcgaaggcgcccgcgtcctcgcggttctgggcgacatggtcaccaccgaccacatcagccccgccggctcgttcaaggacaccaccccggccggtcagtatctgatcgaccgtcaggtgcccgtgcgcgagtttaactcctacggctcgcgccgcggcaaccacgaggtcatgatgcgcggcactttcgccaatatccgcatcaagaacgagatgctggatggggtcgaaggcggctacaccaaaggccccgatggccaacagacggccatctacgacgccgccatggcctatcaggcgcaaggcacgccgctggtcgtctttggcggtgaacaatatggcgccgggtcgagccgtgactgggccgccaagggcaccgcgcttctgggcgtcaaggccgtcatcgccgagaatttcgagcgtatccaccgctcaaacctcgtcggcatgggcgttatccccttcgaattcaccggtggcgacacgcgcaagacgctcggcctcaccggcgaggaagaggtctcgatccacgggctcgacacgatcaagccgcagcaggaagtgccctgcacgatcaagatggccgatggcagcaccaaggaaatcactctcaagtgccgcatcgataccgccatcgagatcgaatatatcgaacatggcggcgtgctgcattacgtgctgcgcaacctcgccaaatcggcctga

SEQ ID NO: 67079 - protein, 924 aa, Roseovarius nubinhibens ISM
MPITVGQDTAKTRKQLTVGSQSVSYYSIAAAEAAGLGDFSRLPAALKVVLENMLRFEDGKTVTTDDIKAFADWAEKGGKNPREIAYRPARVLMQDFTGVPAVVDLAAMRDGIKALGGDAQKINPLNPVDLVIDHSVMIDEFGNPRAFQMNVDREYERNMERYQFLKWGQGAFNNFRVVPPGTGICHQVNLEYLAQTVWTDVDQDGTEVAYPDTLVGTDSHTTMVNGAAVLGWGVGGIEAEAAMLGQPISMLIPEVVGFELTGQMVEGTTATDLVLKVVEMLREKGVVGKFVEFYGAGLDNLPLADRATIGNMAPEYGATCGFFPIDQETLRYLELTGRDKDRIALVEAYAKENGMWRGADYAPVYTDTLSLDMGTVVPAISGPKRPQDHIALDVAATEFGKWVKGFREGRDAGERAEIRWEGEGGQPEPAEIPGDEGHHQRGYVPTDDGHYQLHDGSIVIASITSCTNTSNPYVMIGAGLVARKARELGLNRKPWVKTSLAPGSQVVSEYLEAAGLQDDLDAIGFNLVGYGCTTCIGNSGPLAPEISKCINDYDLIGVSVLSGNRNFEGRISPDVRANYLASPPLVVAYALAGDMNVDVTKDPLGTDKDGNPVYLKDIWPTSKEIADLVQKTVTRDAFQSKYADVFKGDEKWQAVETSEGETYDWPPQSTYVQNPPYFQGMSKDPGTISNIEGARVLAVLGDMVTTDHISPAGSFKDTTPAGQYLIDRQVPVREFNSYGSRRGNHEVMMRGTFANIRIKNEMLDGVEGGYTKGPDGQQTAIYDAAMAYQAQGTPLVVFGGEQYGAGSSRDWAAKGTALLGVKAVIAENFERIHRSNLVGMGVIPFEFTGGDTRKTLGLTGEEEVSIHGLDTIKPQQEVPCTIKMADGSTKEITLKCRIDTAIEIEYIEHGGVLHYVLRNLAKSA

SEQ ID NO: 67080 - DNA, 2673 bp, Erythrobacter sp. NAP1
  CDS (1)..(2673): transl_table=11
atgacagccaccggcaaggacaccctttcgacgcgttccactctcgatgtgaacggcaagagctacgcttactattcgctcgccaaagcggccgagcagcttggcgatgtgtcgaagctcccgacctcgatgaaagtcctgctggaaaacctccttcgcttcgaggacgaaggcttcaccgtgggccgcgatcacatccaggcgatcgtcgactggcagaacgatcccaagaccggcagcgaaatccagtaccgcccggcgcgcgttctgctccaggacttcaccggcgtcccttgcgtcgtcgaccttgccgccatgcgcgatgcgatcaaggagctcggcggcgacacccagaagatcaatccgcaggttcccgtgaacctcgtcatcgaccactcggtcatggtcgacgagttcggccaccccaaggcgatggaagccaacatggcgctcgaatatgagcgcaatgcagaacgttatgacttcctcaagtggggctcgaagagcttcgaaaacttctccgcggtccctccgggcaccggcatctgccaccaggtgaacctcgagcacatcgccaagggcatctggtcgagcgttgacgagaacggcgaaatggtcgcctatcccgacacctgcgtcggaaccgacagccacacaacgatgatcaacggccttggcgttcttggctggggcgttggcgggatcgaagccgaggctgcgatgctcggccagccgatctcgatgctgatccccgaagtcgtcggcttcaagctgaccggaaagatggccgaaggcgtgaccgcaaccgacctcgtgctcacctgcgtgcagatgctgcgcgaagtgggcgtggttggccgcttcgtcgaattctatggcgaaggcgttgccaacctcaccctcgccgaccgcgcaaccatcgccaacatggctcctgaatatggcgcgacctgcggcttcttcggcatcgatgccaagaccatcgagtacctgcgcctcaccggccgcagcgaagaagagatcgcgcttgtcgaagcctattccaaggaacagggcatgtggttcgatccggcgaatgagccggtcttcaccaagaccctcgaacttgatgtctcctcggtcgtcccgagccttgccgggcccaagcgcccgcaggaccgcgtgatccttcccgaggtagacgaactgttcaacggcgacctcaagacggtctatggcaaggatgcgccacaccgtaccggcgtcgatggcaaggaccacgacatcggcgacggcgacgtcgtgatcgccgccatcaccagctgcaccaacacatcgaaccccgacgtgctgattgctgccggtctcgtcgcgaagaaggcgaatgagcgcggcatgaagcccaagccctgggtgaagaccagcctcgcaccgggatcgcaggttgtgaccgattacctcgaaaagtcgggcctgcaagacgatctcgacgcgatcggctttgaccttgtcggctatggctgcaccacctgcatcggcaatagcggcccgctcgcgccgccgattagcgccgccatcaatggcaacgacatcgtcgcggccagtgtgctttcgggcaatcgcaacttcgaaggccgcgtgtcgcctgacgtgcgcgccaacttcctcgcatcgccgccgctggtggtcgcatacgcgctcaagggcaccgtcaccgaggacatcaccaccacgccgctcggtcaggatcaggacggcaacgacgtcatgctcgccgacctgtggccgaccaatgccgagatcgcagaacaccgcgctgccaacatcgatcgttcgatgttcgtgaagcgatacgccaacgtctatgacggcgacgagcactggcaggcgatcacggttgagccctctgacacctatcagtggcgcgcgggttcgacttatgtcgccaacccgccctacttcgaaggcatggacatgacgccggctccgatcaccgacatcgtcgatgcaaagccgctcgcgatcctcggcgacagcgtcaccaccgaccacatttcgcctgctggcgcgatcaaggaggactcgcctgccggtgagtatctcaagtcgaaccaggtgcagaagaaggacttcaactcctacggctcgcgccgcggcaaccacgacgtgatgatgcgcggcacctttgccaacatccgcatcaagaacgagatggtcccaggcgtcgaaggcggcgtgaccacctataatggcgagcagatgccgatctacgacgccgcgatgaagcacaaggcggacggcacgcagctgatcgtggtcggcggcaaggaatacggcaccggctcctcgcgcgactgggcggcgaagggcacgatccttctgggcgtgcgcgcggtcatcgtcgaaagcttcgagcgtattcaccgctccaacctcgtcggcatgggcgtcctgccgctgcagttcgaagagggcaccacgcgcgagacgcttgagctcgatgcggactgcaccttctcgatcaagggacttgccgacctcacgccgggccagacgatcgaaatcgaagccacacgcggcaacggcacgaccttcaccttcaacgcgctttgccgtatcgatacggcgaacgagatggagtattatcgcaacggcggcatcctccactacgtgctgcgcaagctcgccgcctaa

SEQ ID NO: 67081 - protein, 890 aa, Erythrobacter sp. NAP1
MTATGKDTLSTRSTLDVNGKSYAYYSLAKAAEQLGDVSKLPTSMKVLLENLLRFEDEGFTVGRDHIQAIVDWQNDPKTGSEIQYRPARVLLQDFTGVPCVVDLAAMRDAIKELGGDTQKINPQVPVNLVIDHSVMVDEFGHPKAMEANMALEYERNAERYDFLKWGSKSFENFSAVPPGTGICHQVNLEHIAKGIWSSVDENGEMVAYPDTCVGTDSHTTMINGLGVLGWGVGGIEAEAAMLGQPISMLIPEVVGFKLTGKMAEGVTATDLVLTCVQMLREVGVVGRFVEFYGEGVANLTLADRATIANMAPEYGATCGFFGIDAKTIEYLRLTGRSEEEIALVEAYSKEQGMWFDPANEPVFTKTLELDVSSVVPSLAGPKRPQDRVILPEVDELFNGDLKTVYGKDAPHRTGVDGKDHDIGDGDVVIAAITSCTNTSNPDVLIAAGLVAKKANERGMKPKPWVKTSLAPGSQVVTDYLEKSGLQDDLDAIGFDLVGYGCTTCIGNSGPLAPPISAAINGNDIVAASVLSGNRNFEGRVSPDVRANFLASPPLVVAYALKGTVTEDITTTPLGQDQDGNDVMLADLWPTNAEIAEHRAANIDRSMFVKRYANVYDGDEHWQAITVEPSDTYQWRAGSTYVANPPYFEGMDMTPAPITDIVDAKPLAILGDSVTTDHISPAGAIKEDSPAGEYLKSNQVQKKDFNSYGSRRGNHDVMMRGTFANIRIKNEMVPGVEGGVTTYNGEQMPIYDAAMKHKADGTQLIVVGGKEYGTGSSRDWAAKGTILLGVRAVIVESFERIHRSNLVGMGVLPLQFEEGTTRETLELDADCTFSIKGLADLTPGQTIEIEATRGNGTTFTFNALCRIDTANEMEYYRNGGILHYVLRKLAA

SEQ ID NO: 67082 - DNA, 2592 bp, Pseudoalteromonas tunicata D2
  CDS (1)..(2592): transl_table=11
atgaatagccaatttcgcaaacctttacctggcacttcccttgattattttgatacccaagccgctgttaatgctattgctccgggtgcgtatgccaaactgccttacacctcaaaagtattggctgagaatttagttcgccgctgcgaacctgaaaaactaactgattcgcttaagcaactgattgaacgtaaacgcgatttggactttccatggtttcctgcacgtgttgtttgccacgacattttaggacaaaccgcgttagttgatttagcagggcttcgtgacgcgattgccgaaaaaggcggcgatccgtcaaaagtaaaccctgtggtaccaacccagctaattgttgatcactcattagctgttgagcatgccggtttcgaaaaagatgcatttgctaaaaatcgcgcgatagaagaccgtcgtaacgacgaccgttttcattttattaattggactaaaaccgcgtttaaaaatgtagatgttattccgcctggtaatggcatcatgcatcaaatcaacttagagcgcatgtcacctgtggtgcaaagtcgcggcggtgtggcgttcccagatacactcgttggcaccgacagccatacacctatggttgatgcgcttggcgtaattgcaattggtgttggcggccttgaagccgaaagcgtgatgcttggccgtgcttcgtatatgcgcttgcctgatattattggtgttgagttagtggggaaacccgcagaagggatcaccgcaaccgatgtggtattagcattaactgaatttttacgcgctgaaaaagtggtgagctcttaccttgagttttacggtgaaggtaccaagcatttaacccttggcgaccgcgcgacaatttcaaatatgaccccagaatacggtgcaacagctgccatgttctacatcgatgagcaaaccattgattatttacgtttaacaggccgtgaagatgagcaagttaaactggtcgaaacctatgccaaacaaacgggtttatgggcagatgactgcaaagctgccgagtatgagcgtattttacgttttgatttaacaaccatttgtcgcaatattgcagggccttcaaatccgcataatagagtaccgacatcagagcttgccaagcgcggcattagtggtgtggttgaaaacgatggcgataaaattccagatggcgcagtaataattgcagccatcaccagctgtaccaataccagtaatccacgcaatatgattgctgcaggtttattggcgcgtaacgccaatgccaaagggttaactcgcaaaccttgggtaaaatcgtcactggcacctggatctaaaacagtacaaatgtatcttgaagatgccaatttattaccagaattagaagatttaggttttggtgtcgttgcatttgcctgtaccacctgtaatggcatgagcggggcgcttgaccctgtgattcaaaaagaagtgcttgaacgtaaactgtataccacagctgtattgtcgggtaatcgtaactttgatggtcgtattcacccccatgcaaatcaggcgtttttagcttcgccaccattagtggtagcctatgccattgcagggaccattcggtttgatatcgaaaaagatattttaggttatgaccaagcaggccaagcggtcacgcttaaagatatttggccaaccgatgctgaaattaatgcagtggttgccagctcagtcaaacctgaacaatttagaagtgtatataacccaatgttcgacttaaaagtggaatatggtgaccacattaatccgcaatatgattggcgcccacaaagtacctatattcgccgtccaccttattgggaaggcgcattagcgggggagcgcacgatgaaaggcatgcgcccacttgcggtattgggagataacatcaccaccgatcatttatcgccatcaaatgcgattcaaatgaacagcgccgcaggtgaatatctgcataaaatgggtttaccagaagaagactttaactcctatgcaacgcatcgtggcgatcacttaacagcgcagcgtgcaacgtttgccaatcctaaattattcaatgaaatggtcaaagaaaacggccaagtgaaacaaggttcattagcgcgccttgagccagaaggcacagttacgcggatgtgggaagcaattgaaacctatatggcgcgtaaacagccacttattattattgcaggtgctgattatggtcagggttcatctcgtgattgggctgcaaaaggtgtgcgtttagccggtgttgaagtgattgtggcagagggatttgagcgaattcaccgcaccaacttggttgggatgggggttttaccgctggaatttgttgatggtgaaaatcgccatacttatgcgatagatggtactgaaacctatgatgtggtgggtgaaccaacaccaggcgcgatgctgactgtagtgattaatcgaaccgatggcacgcaaacagcggttgcggtgaagtgtcgtttagataccgctgaagaagtctctatttatgcggcaggtggcgtattacaacgctttgcacaagactttttagagttaaaccaagcctaa

SEQ ID NO: 67083 - protein, 863 aa, Pseudoalteromonas tunicata D2
MNSQFRKPLPGTSLDYFDTQAAVNAIAPGAYAKLPYTSKVLAENLVRRCEPEKLTDSLKQLIERKRDLDFPWFPARVVCHDILGQTALVDLAGLRDAIAEKGGDPSKVNPVVPTQLIVDHSLAVEHAGFEKDAFAKNRAIEDRRNDDRFHFINWTKTAFKNVDVIPPGNGIMHQINLERMSPVVQSRGGVAFPDTLVGTDSHTPMVDALGVIAIGVGGLEAESVMLGRASYMRLPDIIGVELVGKPAEGITATDVVLALTEFLRAEKVVSSYLEFYGEGTKHLTLGDRATISNMTPEYGATAAMFYIDEQTIDYLRLTGREDEQVKLVETYAKQTGLWADDCKAAEYERILRFDLTTICRNIAGPSNPHNRVPTSELAKRGISGVVENDGDKIPDGAVIIAAITSCTNTSNPRNMIAAGLLARNANAKGLTRKPWVKSSLAPGSKTVQMYLEDANLLPELEDLGFGVVAFACTTCNGMSGALDPVIQKEVLERKLYTTAVLSGNRNFDGRIHPHANQAFLASPPLVVAYAIAGTIRFDIEKDILGYDQAGQAVTLKDIWPTDAEINAVVASSVKPEQFRSVYNPMFDLKVEYGDHINPQYDWRPQSTYIRRPPYWEGALAGERTMKGMRPLAVLGDNITTDHLSPSNAIQMNSAAGEYLHKMGLPEEDFNSYATHRGDHLTAQRATFANPKLFNEMVKENGQVKQGSLARLEPEGTVTRMWEAIETYMARKQPLIIIAGADYGQGSSRDWAAKGVRLAGVEVIVAEGFERIHRTNLVGMGVLPLEFVDGENRHTYAIDGTETYDVVGEPTPGAMLTVVINRTDGTQTAVAVKCRLDTAEEVSIYAAGGVLQRFAQDFLELNQA

SEQ ID NO: 67084 - DNA, 2718 bp, Oceanospirillum sp. MED92
  CDS (1)..(2718): transl_table=11
atgacaagcccaatcgatttcgatccatccagctctgttaaaacactccccggtacagagcacaactaccatagtctgccagcaacggctgagcagtttggtatcgaccttgatgcactccccttttcccttcgccctattcttgagggtatcgctcgcaatgttggccagaacggcataacggctgagcaggttaaagcgctgggtagctggactgaacatcaaggcaaagagccgattgagattcctttcactgccggtcgcgtaatcatgcatgacctgagtggcacgcctgcgattgttgattttgcagcgatgcgttcagccgtacagcgcatggatctggacccggcgattatcgaacccctggttcgtgcagatctggttatcgaccacacagtcacaatggataacaccggtagccctgcttcgttaagaatcaatggcgagctggaagctgaacgaaacaaagagcgttatgccttcctgaaatggggcgcacaggcctttgaaactatccgcattattccgccacaaaccggtatcgtgcatcaggtaaaccttgagtatctggctcagggctatctaaacaacaataacctgatgatccccgacacgctgatcggtatggacagccacacgcctatggcaaacgcactgggtattgttggctggggtgttggtggtattgaagccggtgcatccatgctaggccagcctatgcagatgctggcacctgaagtagtcggcgtagaactaaccggcgcattaagagaaggtgtgaccgcaactgacctggtgctaaccattactgaaatgctacgtaacttcccaggtggcgtcgtcggtaagttcgttgaatacgtcggtgaaggctgtgccaacctgtccctgccagaccgtgcgacgattgccaacatgtcgcctgaatatggcgcgaccatgggcttcttcccattcgataagatctctgccgattatatgaaagcaacgggcagagacggcgacctgccactggaattctacaaagcgcagaacatggcatggaaacagggtcaggcgctgcctcgctacacggatctgctgcagcttgatctatccaccgttgagccttctgttgcaggtcctaaacgaccgcaagacagacttccactggctgagatcggtaatgtattccgtaaagcggctgctgaaggcgagcgcaacccagaagttgtaaaagttacgccaatgaaggcagacgaagcgggtattttcgcaccgctgcctgagcgagaactaaaagacggcgatatcgtgattgccgcgattaccgcctgcaccaacacctctaaccctggcctattgattgccgcaggtctgctggcgaagaaagccaacgaactgggcatgaaggtacctgacggcgttaaaacatccctggctccggggtcccctgttgcaacagacttcctgactaaggcagggctgcagcaacacctggatgctttgggctttaatacggcaggttacggctgtaccacttgtgtaggtaactcaggtccgctggcaccaagcatcgaagacgccctgcaaaaccacgacattatcgccgcgtcggtattgtccggtaaccgtaacttcgaaggccgtgtccacccggatgttgataccaacttcctgatgtcgccaccactggtagtggcaatggcgatggctggcaacgtgaatatcgatgtcactaaagaaccgatcagtcaggatgctaaaggcaacgatgtctacctaaaggatatctggccgagcaacgctgaaatcagccaaaccatgcttgagtgcatggatccgaaagcgttccgtgaaacctatgaaaacgcgttggacggccctgctacatggcagaacctggaatcacctaccggccctgtatatgactgggcgccggattctacctacattcaggagatctcattcttcgatggtttctcactggaaacacctaaagattcactgaacaacatctcggctgcgcgtatgctggtaatgtgtgatgacaacacaacgaccgaccatatttcgccggtaagccgtattcgtccggattcccctccaggtgaatacctgagctcgcaaggcgtagctgacgaagacatgacatcattgggtgcccgtcgtggtaaccaccacgtgatgctgcgcagtattttcggtaacgtcaaagcccgaaacctgctactgccaggcaccacaggtgcggtaactaactactactcatctgacagtgctccggcacagatgtctatctacgatgccgctgagcgctaccgtaacgaaggcacatcgactgtggtattcggcggtaagctgtatggtactggttcctcccgtgactgggcggcgaaaggccctgcactgctgggcgttaaagcgattatcgcagaaagctttgagcgtattcacaaatccaacctggtcggcatgggcgtattaccgctacagatgcctgaaggtataacacgtgcatcgctgaacctggacggtaccgaaaccttcgacctgaacggtatcgatactctggagccacgcggcacagttagcctgaccattaacagagcagacggctcatctcagcagttggagctaacctcccgtgttgatacctcctctgagctggatcagatccgccacaaaggtatcctgccaatggtactgcgcgatattatcgctgcgaatagctaa

SEQ ID NO: 67085 - protein, 905 aa, Oceanospirillum sp. MED92
MTSPIDFDPSSSVKTLPGTEHNYHSLPATAEQFGIDLDALPFSLRPILEGIARNVGQNGITAEQVKALGSWTEHQGKEPIEIPFTAGRVIMHDLSGTPAIVDFAAMRSAVQRMDLDPAIIEPLVRADLVIDHTVTMDNTGSPASLRINGELEAERNKERYAFLKWGAQAFETIRIIPPQTGIVHQVNLEYLAQGYLNNNNLMIPDTLIGMDSHTPMANALGIVGWGVGGIEAGASMLGQPMQMLAPEVVGVELTGALREGVTATDLVLTITEMLRNFPGGVVGKFVEYVGEGCANLSLPDRATIANMSPEYGATMGFFPFDKISADYMKATGRDGDLPLEFYKAQNMAWKQGQALPRYTDLLQLDLSTVEPSVAGPKRPQDRLPLAEIGNVFRKAAAEGERNPEVVKVTPMKADEAGIFAPLPERELKDGDIVIAAITACTNTSNPGLLIAAGLLAKKANELGMKVPDGVKTSLAPGSPVATDFLTKAGLQQHLDALGFNTAGYGCTTCVGNSGPLAPSIEDALQNHDIIAASVLSGNRNFEGRVHPDVDTNFLMSPPLVVAMAMAGNVNIDVTKEPISQDAKGNDVYLKDIWPSNAEISQTMLECMDPKAFRETYENALDGPATWQNLESPTGPVYDWAPDSTYIQEISFFDGFSLETPKDSLNNISAARMLVMCDDNTTTDHISPVSRIRPDSPPGEYLSSQGVADEDMTSLGARRGNHHVMLRSIFGNVKARNLLLPGTTGAVTNYYSSDSAPAQMSIYDAAERYRNEGTSTVVFGGKLYGTGSSRDWAAKGPALLGVKAIIAESFERIHKSNLVGMGVLPLQMPEGITRASLNLDGTETFDLNGIDTLEPRGTVSLTINRADGSSQQLELTSRVDTSSELDQIRHKGILPMVLRDIIAANS

SEQ ID NO: 67086 - DNA, 2268 bp, Flavobacteria bacterium BBFL7
  CDS (1)..(2268): transl_table=11
atggcttttgatattgatatgattaaaaaggtgtatgctgagatgccagctcgcgtaaataaagcgcgtgagattactggtaaacctcttacactagctgagaaaattttatattctcacctttgggatggaacacctggtaaaccttttactagaggtaaagactatgtagactttgcaccagatcgtatcgcatgtcaagatgctacggctcaaatggctttacttcaatttatgcaagctggtaagactgaagtagcagttcctacaacagttcattgtgatcacttgattcaagcaaaaaatggagctagttctgaccttcaaaatgcattaaatacttctaacgaagttttcaatttcttagaatcagtatctgataaatatggtattgggttttggaaacctggtgctggtattattcaccaagtagttcttgaaaactatgcattccctggaggaatgatgataggaactgattcccatactgttaatgcaggtggattaggaatggttgctataggtgtaggtggagcagatgctgtagatgtgatggctggtatggcttgggaattgaaattccctaagcttattggtgttaaattaacaggtaagttatctggttggacagctcctaaggatgtaattcttaaagttgctgaaattctaactgttaaaggtggaaccggagcaattgtagaatattttggtgatggtgctgctaacctttcttgtactggaaagggaactatctgtaacatgggagcagaaataggtgcaacgacatctacttttggatatgacgcctctatggaacgttatcttcgtgcgacagatcgttcagatattgcagatgctgcaaatgatgtgaaagaataccttactggtgatgatgaagtatatgctaatccagaacaatattttgatcaagttattgaaattaatcttgatactttaatgcctcacttaaatggaccatttactccagatttagctactgaagtaggttcaatgaatgcaaaggctactgagaacgattggcctcttaaagtagaatggggacttataggttcttgtactaactcttcttatgaagatctttctcgtgcaagttctattgcgcagcaggctattgataaaaaattaaaaactaaagcagaattcggaatcaatcctggatctgaaaaagtacgttatactacagagcgtgacggaatactaggaatatttgaagaattagatgcaaaaatctttaccaatgcttgtggaccatgtataggtcaatgggcacgttatgaagatcctaaaaatgcacctaagaactctattatccattcatttaatagaaactttgcaaaacgtgccgatgggaaccctaacactcatgcctttgtagcttctccagagatggtggctgctatagctatcgccggtagactagactttaatcctatcactgataagttaattaatgaagatggagaagaagtgatgttagatgagcctacaggatgggaattaccacctaaaggttttgaagtaaaagatgatggttatttagctccacaagaagatggaagcggtgttgttgtaaatgttgcagaagactctgaaagattgcaattgctagaaccttttactcctataggtactaatgtgaataatgcaaaattattaataaaggcttttggtaaatgtacaacagatcatatttctatggctggaccatggttacgttatagaggtcacttagataacatctcaaataactgtttaataggagcggttaatgcctataataagcaaaccaatcttgttaaaaatcagttagatggtgagtatggagctgttccagcaacagctagagcctataaagcagcaggtgtaccgtcagtagtagtaggagatcataactatggtgaaggttcttcacgtgaacatgcagcaatggaaccacgtcatttaggtgttgtcgcggtaattgtaaagtcatttgcacgtatacatgaaactaaccttaagaaacaagggatgttgggtcttacatttgcaaatgaagcagactatgatttaatacaagaagatgatacgttcaactttgttgatcttgctaactttactccagatgtgccattaactattgagatcactcatgcagatggttccaaggataccattaaggcaaatcacacttataacgctgctcaaattgagtggttccataaaggaagtgctttgaacaaaattaaagaagataacgcagcataa

SEQ ID NO: 67087 - protein, 755 aa, Flavobacteria bacterium BBFL7
MAFDIDMIKKVYAEMPARVNKAREITGKPLTLAEKILYSHLWDGTPGKPFTRGKDYVDFAPDRIACQDATAQMALLQFMQAGKTEVAVPTTVHCDHLIQAKNGASSDLQNALNTSNEVFNFLESVSDKYGIGFWKPGAGIIHQVVLENYAFPGGMMIGTDSHTVNAGGLGMVAIGVGGADAVDVMAGMAWELKFPKLIGVKLTGKLSGWTAPKDVILKVAEILTVKGGTGAIVEYFGDGAANLSCTGKGTICNMGAEIGATTSTFGYDASMERYLRATDRSDIADAANDVKEYLTGDDEVYANPEQYFDQVIEINLDTLMPHLNGPFTPDLATEVGSMNAKATENDWPLKVEWGLIGSCTNSSYEDLSRASSIAQQAIDKKLKTKAEFGINPGSEKVRYTTERDGILGIFEELDAKIFTNACGPCIGQWARYEDPKNAPKNSIIHSFNRNFAKRADGNPNTHAFVASPEMVAAIAIAGRLDFNPITDKLINEDGEEVMLDEPTGWELPPKGFEVKDDGYLAPQEDGSGVVVNVAEDSERLQLLEPFTPIGTNVNNAKLLIKAFGKCTTDHISMAGPWLRYRGHLDNISNNCLIGAVNAYNKQTNLVKNQLDGEYGAVPATARAYKAAGVPSVVVGDHNYGEGSSREHAAMEPRHLGVVAVIVKSFARIHETNLKKQGMLGLTFANEADYDLIQEDDTFNFVDLANFTPDVPLTIEITHADGSKDTIKANHTYNAAQIEWFHKGSALNKIKEDNAA

SEQ ID NO: 67088 - DNA, 1926 bp, delta proteobacterium MLMS-1
  CDS (1)..(1926): transl_table=11
atgggccaaacggttaccgaaaagattctggccgctcacctggtggaaggtgagcttaagcggggcgcggagatcggtatccgcattgatcaaaccttaacccaggatgccaccggcaccatggcctacctggagtttgaggccatcggcctgccccgggtgcagaccgagctgtcggtctgctatgtcgatcataacctgatccagtccgatttccgcaatgccgacgaccatcgttttttgcagtcggtggcccgcaggttcggcctttactactcgccgccgggcaacggtatctctcaccaggtgcacctggaacgcttcggcctgccgggcaagaccctgctgggctccgacagccatacccccaccggcggcggtctgggcatgctggccatgggggccggcggcctggatgtggccatggccatggccggcaaacccttttatctggtgatgcccaaggtgtacggagttaagctcaccggcaaactctcgccctgggtttcggcccgggacgtgctgctggaggtgctgcggcggctgtcggtcaagggcggggtgggttacgtgatggaatatttcggccccggggtggccgagctgtcggtgaccgaccgggcctccatcaccaacttcggcgccgagctgggggccaccagctcggtcttccccgccgatgccaacaccaaagaatttctcgccagccaggggcgggaagatggctgggtggaactgatcgccgatgccgatgccgaatatgatgaggtgatggagatcgatctgggcgccttggagccgctgatcgcctgtccttcctcgccggacaacgtggtaccggtgcgggaagtggccggcaagccggtggcccaggtgctggtgggctcctgttccaactcttcgctgcgtgatttgatggtggtggccaagaccctggagagccgcgaggtgagccgggatctgagctttgaaatcaaccccggcagccgccaggtgctggagaatctcaccgcccagagcgacatgctgaccctggtcagggccggcgcccgggtgcaccaggccggttgcctgggctgcatcggcatgggccaggcgccgcccaccggcgctatttcgctgcgcacctttccccgcaacttccccggccgcagcggcaccaaggacgaccaggtctatctttgcagccccgaggtggcggtggcggcggcgattaccggcaagatcaccgatccccgggagttgggcgagtaccccgccttcagcatgccgcaaaaatatctccccggtgacgcccgcatcgaggcgcccctgaccgccgccgagggtgagcgggtggagatcgtccgtgggcccaacatcgcccccttccccgttttcgagccggcccccgaagagtggcagggcgaggtgctgctcaaggtggaggataatatcaccaccgaccacatcatgcccgccggcgcccgggtgttgccgctcaggagcaacgtgccggccatcagcgagtttgtttacgaggcggtggatggtaagttcgttaagcgggcccgggagcgcggtcccggcctggtggtgggcggcgacaactacggccagggctcgtcgcgggagcatgccgccctggcaccccgctatctcggggtggaggttaagctggtcaagagttttgcccgcattcacaaggccaacctgatcaacttcggcattatccccctaacctttgttgatcccgccgactacgaccggctcaagcagggggagaaggtacggattcccggcctgcgccaccgcttggcggccggggccgaaaccctgaaggtggtggtcggcgaccgggaaatcccggtccggctggaggtttccccccggcaccgggagatcctgctggccgggagtttgctcaactgggccgcccggcaataa

SEQ ID NO: 67089 - protein, 641 aa, delta proteobacterium MLMS-1
MGQTVTEKILAAHLVEGELKRGAEIGIRIDQTLTQDATGTMAYLEFEAIGLPRVQTELSVCYVDHNLIQSDFRNADDHRFLQSVARRFGLYYSPPGNGISHQVHLERFGLPGKTLLGSDSHTPTGGGLGMLAMGAGGLDVAMAMAGKPFYLVMPKVYGVKLTGKLSPWVSARDVLLEVLRRLSVKGGVGYVMEYFGPGVAELSVTDRASITNFGAELGATSSVFPADANTKEFLASQGREDGWVELIADADAEYDEVMEIDLGALEPLIACPSSPDNVVPVREVAGKPVAQVLVGSCSNSSLRDLMVVAKTLESREVSRDLSFEINPGSRQVLENLTAQSDMLTLVRAGARVHQAGCLGCIGMGQAPPTGAISLRTFPRNFPGRSGTKDDQVYLCSPEVAVAAAITGKITDPRELGEYPAFSMPQKYLPGDARIEAPLTAAEGERVEIVRGPNIAPFPVFEPAPEEWQGEVLLKVEDNITTDHIMPAGARVLPLRSNVPAISEFVYEAVDGKFVKRARERGPGLVVGGDNYGQGSSREHAALAPRYLGVEVKLVKSFARIHKANLINFGIIPLTFVDPADYDRLKQGEKVRIPGLRHRLAAGAETLKVVVGDREIPVRLEVSPRHREILLAGSLLNWAARQ

SEQ ID NO: 67090 - DNA, 2583 bp, Oceanobacter sp. RED65
  CDS (1)..(2583): transl_table=11
atgaacacccaataccgtaaaccctttaaagattttggtatcgacttttacgatactcgcgaggccgttgaagccattcaaccgggttcctacgatacactgccctacacctcgaaaattttagccgagcaattggtgcgcaagtgcgagcctgaagctctggccgattctcttaagcaattaatcgaacgcaagcaggacttggattttccttggtaccctgctcgcgtggtatgtcacgatatccttggtcaaactgcacttgtagacttagccggtttacgcgatgccattgcagagaaaggcggcgatccagcacaagttaatcctgttgtacccacgcagttaatcgtcgatcactctttggctgttgagcacgctggttttgaaaaagatgcatttgataaaaaccgtgaaatcgaaaaccgtcgtaacgaagatcgctttcattttattgagtggaccaagactgcgtttgaaaacgtggatgtaattcctgccggtaacggcatcatgcaccaaatcaatttagaaaagatgtctcctgtcattcaaagccgtgacggtgtggcctacccagatacctgtgtcgggaccgatagccataccccgcacgtagatgcattaggtgttattgccattggtgtaggtggcctagaggcagaaaatgtaatgctaggtcgtccttccatgatgcgccttccagacattgtcggtgtcgagctcatcggcgaacgtcagcccggtattaccgcaacagatatcgtgttatcactcacggaatttttacgaaaagagcgtgttgtatcctcttatcttgaattttttggtgaaggtaccaagggtctcaccattggtgatcgcgccactatctcgaacatgacacccgaatacggtgccactgcggcgatgttctacattgatgagcaaaccattgattatttaaaactcacaggtcgtgaaccagagcaaataaaattggttgaagaatacgccaaggaaacaggactgtgggcagacgccatgacggaagccaaatacgaacgtgtattgcagttcgatttaagcaaagtcactcgcaccatggcgggcccctctaacccacatcgcaaagtagaaacaactgatcttgcaaaaaatggtattgccggtaaatgggaagaaacggaaggcgaaatgccagatggcgccgtgatcattgcggccattacttcctgtactaataccagtaacccgcgcaatgtcgttgcggccggattattagcgaaaaaagccaatgagcttggtttgattcgtaagccttgggtgaaatcgtcattcgcccccggttcaaaagtggctcgtctttatcttgaagaggcaggcctgcttcccgaactggaaaaactgggttttggtattgtcgcctatgcttgcacaacatgtaacggcatgagtggtgcattggaccctaagattcagcaagaaatcattgatcgcgacttgtattcaaccgccgttttatccggcaaccgtaactttgacggtcgaattcacccttatgccaagcaagcattcttagcctcaccgccgttagttgtggcttacgctattgctggtaccgtgcgctttgatatcgagaaagatgtacttggcaaagaccaaaacggtaatgacattaccttaaaagatctttggccaagtgatgaagaaatcgatgctattgttggcgagcatgtaaagcctgaacaatttaaacaggtttatattccaatgtttgatttggataaaggtcaagcggcagaaagcccgctttacgaatggcgtccgcagagtacctatattcgtcgtccaccttattgggaaggtgcattggcaactgaaccaacattaaaaggtatgcgcccgttagctgtactgggtgataacatcaccacggatcacttatcgccttccaatgcgatcatggcatccagtgccgccggggaatatcttgccaaaatgggggttccggaagaggactttaactcctacgcaacccaccgtggtgatcacttaaccgcacagcgtgcaacgtttgccaatccaaaactattgaatgaaatggttcaagaaaatggtgaagtaaaacaaggttccctcgcacgcattgagcctgaaggcaaagaaacccgtatgtgggaagccattgaaacctatatggaacgcaagcagcctttaatcattgtggcaggtgcggattatggtcaaggctccagccgtgactgggcagctaaaggtgttcgcctagctggtgttgaagccattgtcgcagaaggttttgaacgtattcaccgcaccaatctaattggaatgggcgtattaccccttgaatttaaacctggtgtaacacgcaaaacattagagatagatggaacagaaacctttgatgttgtaggcacaccatcacctcgctccgacttaacattgattattcatcgcaaagatggctcaagtgttgaaactacagtgacgtgtcgcttggatacgcaagcagaggtggatgtgtatggtgcaggcggcgtgctacaaaagtttgcccaagacttcttagctgctaactaa

SEQ ID NO: 67091 - protein, 860 aa, Oceanobacter sp. RED65
MNTQYRKPFKDFGIDFYDTREAVEAIQPGSYDTLPYTSKILAEQLVRKCEPEALADSLKQLIERKQDLDFPWYPARVVCHDILGQTALVDLAGLRDAIAEKGGDPAQVNPVVPTQLIVDHSLAVEHAGFEKDAFDKNREIENRRNEDRFHFIEWTKTAFENVDVIPAGNGIMHQINLEKMSPVIQSRDGVAYPDTCVGTDSHTPHVDALGVIAIGVGGLEAENVMLGRPSMMRLPDIVGVELIGERQPGITATDIVLSLTEFLRKERVVSSYLEFFGEGTKGLTIGDRATISNMTPEYGATAAMFYIDEQTIDYLKLTGREPEQIKLVEEYAKETGLWADAMTEAKYERVLQFDLSKVTRTMAGPSNPHRKVETTDLAKNGIAGKWEETEGEMPDGAVIIAAITSCTNTSNPRNVVAAGLLAKKANELGLIRKPWVKSSFAPGSKVARLYLEEAGLLPELEKLGFGIVAYACTTCNGMSGALDPKIQQEIIDRDLYSTAVLSGNRNFDGRIHPYAKQAFLASPPLVVAYAIAGTVRFDIEKDVLGKDQNGNDITLKDLWPSDEEIDAIVGEHVKPEQFKQVYIPMFDLDKGQAAESPLYEWRPQSTYIRRPPYWEGALATEPTLKGMRPLAVLGDNITTDHLSPSNAIMASSAAGEYLAKMGVPEEDFNSYATHRGDHLTAQRATFANPKLLNEMVQENGEVKQGSLARIEPEGKETRMWEAIETYMERKQPLIIVAGADYGQGSSRDWAAKGVRLAGVEAIVAEGFERIHRTNLIGMGVLPLEFKPGVTRKTLEIDGTETFDVVGTPSPRSDLTLIIHRKDGSSVETTVTCRLDTQAEVDVYGAGGVLQKFAQDFLAAN

SEQ ID NO: 67092 - DNA, 2745 bp, Alteromonadales bacterium TW-7
  CDS (1)..(2745): transl_table=11
atgaaaaatagtttcgatacccaacatgagctcacaattaatggtgagcaatataatattcattctctgaaagggcttggcgacaaagcaaaacgactccccttctccttaaaagtcttgctagaaaatttgctgcgcaacgaagacggcgaaaacatcaaagaacaagacattaatgcgctattaaattgggacccaaaagcaaaaccatcatctgaagttgcatttacccctgcacgagtagtaatgcaagactttaccggcgtacctgccattgttgatttagctgcaatgcgagatgcaatggaaaagctcggcggagatcctgcaaaaataaacccactgtcaccggccgaactcgtaatagaccattcagtacaagttgacggctatggaaatgatggtgcctttgatttaaatgcgaaacttgaatacgaccgcaacaaagaacgatacgaatttttacgctggggccaaacggcatttgataatttaaaagtggtaccacccgcaaccggcattgttcaccaagttaatttagaatacctggctcgcgttatttttaacgaagatagcaatggtaaaaagtttgcctaccccgatactctggttggcactgactcgcacacaaccatgattaatggcttaggcgtacttggctggggtgtaggcggcattgaggctgaagctgcaatgcttggccagcctattagcttactgattccacaggtagttggtatgaagcttaatggccgattaccagaaggcacaacagcaactgatttagtactcacggtaactgaaattttgcgtaaccacggcgtggtgggtaaatttgtagaattttatggcgatggccttgcagatctcccccttgccgatagagcaaccattgctaatatggcacctgaatatggtgctacatgtggtatttttccaattgatgacgaaacgattaattatttacgtcttaccaaccgtgatgaagaccaactaaagcttattgaagattatgcaaaacaccaaggcttgtggcgtaacgatggcgacgaagctcgctataccgacacactagaactaaagctcgatgatgttgtaccaagccttgcaggcccaaaacgcccacaagatagaatagcgcttaacaaagccggcgaggaaatctctcagcacctaaaaggttttcaagaagagcgtatagcacatcgcgataaaagtgatgacgagcaatcgcgtattgaaagcgaaggcccaacaaccaaccctgatgaacctgtaaacgaagcgcaatttatgggggcggcaaaagttaactacaaaggccaagagtttgaacttaacgacggtgcatgcgttattgcagctataacaagctgtactaacacgtctaatccaagtgttattttagcagcaggccttgtggctaaaaaagcaaaacaactaggtattaacgttaaaccttgggttaaaacatcactggcacctggctcaaaagtagttaccgactacttagaaaaagcggggttaatggacgacttagaaagcctaggttttaatttagtcggttacggttgtactacgtgtataggcaactcaggaccgctggctgatgaaatctcacaagctattcaaaaacacaagctggtagtcagctctatcttatcgggcaatcgaaattttgaagggcgtatacaccaagatgttaaaatgaactttttagcttctcctcctttggttgttgcttacgcaattgcaggtagaacagacatagatgtttataacgagccccttgcacaagatgaaaacggtaacgatatttaccttaaaaacatttggccaagtgtgaaagaggttagcgacttagtaaaagaaacggttaccaaagagatgtttgcaacaagctacgccaatgtttatgaaggcgatagccgctggcaacaaattcaaatacctgatggtaagttgtatgattggaacgacgcatctacctatattaaaaaagcaccattttttgatggcatgaccgtagagccaccgggtattcctactattgaaagggctcgctgtttagccaagctaggagactcagtaacaaccgatcacatctctcctgcaggcgcgattaaagcggatgcacctgctggtctttatctacaagagcacaatgtagaaaaagcacagtttaattcttacggctctcgtcgaggtaaccatgaagtaatgatgcgtggcacctttgctaacgtgcgactaaaaaacttgttagcaccgggcacagaaggcggtgtaacacgcacgcaaccagacaatagcttagaaagtatttacgatgcggccatggcatatcaaaaaaatgatacaccgcttattattttagccggaaaagaatatggtactggctcgtcacgcgattgggctgcaaaaggttcattgttgctaggtgtgaaagctgtttttgcacaaagctatgaacgtattcaccgctctaacttaattgggatgggtgtactgccattacaatttaaagagggtgaaagctatgagtcgcatggtttaactggccaagaagagtttgatattcaaggtctgtacgataaagctgacgaggttacactgatagcaaccgatgccggtggcaaaaaaacaagcgtaaaagccgatgtacgtattgatactcctaaagagtgggattactacaagcatggcggtattttacaatatgtactgcgtaacatgcttaactaa

SEQ ID NO: 67093 - protein, 914 aa, Alteromonadales bacterium TW-7
MKNSFDTQHELTINGEQYNIHSLKGLGDKAKRLPFSLKVLLENLLRNEDGENIKEQDINALLNWDPKAKPSSEVAFTPARVVMQDFTGVPAIVDLAAMRDAMEKLGGDPAKINPLSPAELVIDHSVQVDGYGNDGAFDLNAKLEYDRNKERYEFLRWGQTAFDNLKVVPPATGIVHQVNLEYLARVIFNEDSNGKKFAYPDTLVGTDSHTTMINGLGVLGWGVGGIEAEAAMLGQPISLLIPQVVGMKLNGRLPEGTTATDLVLTVTEILRNHGVVGKFVEFYGDGLADLPLADRATIANMAPEYGATCGIFPIDDETINYLRLTNRDEDQLKLIEDYAKHQGLWRNDGDEARYTDTLELKLDDVVPSLAGPKRPQDRIALNKAGEEISQHLKGFQEERIAHRDKSDDEQSRIESEGPTTNPDEPVNEAQFMGAAKVNYKGQEFELNDGACVIAAITSCTNTSNPSVILAAGLVAKKAKQLGINVKPWVKTSLAPGSKVVTDYLEKAGLMDDLESLGFNLVGYGCTTCIGNSGPLADEISQAIQKHKLVVSSILSGNRNFEGRIHQDVKMNFLASPPLVVAYAIAGRTDIDVYNEPLAQDENGNDIYLKNIWPSVKEVSDLVKETVTKEMFATSYANVYEGDSRWQQIQIPDGKLYDWNDASTYIKKAPFFDGMTVEPPGIPTIERARCLAKLGDSVTTDHISPAGAIKADAPAGLYLQEHNVEKAQFNSYGSRRGNHEVMMRGTFANVRLKNLLAPGTEGGVTRTQPDNSLESIYDAAMAYQKNDTPLIILAGKEYGTGSSRDWAAKGSLLLGVKAVFAQSYERIHRSNLIGMGVLPLQFKEGESYESHGLTGQEEFDIQGLYDKADEVTLIATDAGGKKTSVKADVRIDTPKEWDYYKHGGILQYVLRNMLN

SEQ ID NO: 67094 - DNA, 2607 bp, Alteromonadales bacterium TW-7
  CDS (1)..(2607): transl_table=11
atgaccataattaataacactcagtaccgcaaaccgcttgcgggttcaaatgtagattactacgatacccaagccgctgttgatgccattaaaccaggcgcttatgccacacttccttatagctcgcgtgtatttgcagaaaacttagtacgccgctgcgatcctgccatgcttaccgatgcacttagccaaataattgagcgtaaacaagatttagattttccgtggtatccggcgcgtgtggtatgccacgatattttaggacaaacggctcttgttgatttagcaggcttgcgcgatgcgattgcggctaaaggtggcgatccgtctaaagttaacccagtggtgccaacgcagctaattgttgaccactcgttagcggttgaacatgcagggtttgatcctgaggcatttgaaaaaaaccgtgctattgaagaccgccgaaacgatgaccgttttcattttataaactggactaaaaccgcgtttaaaaatattgatgttatcccgcctggtaacggcattatgcatcaaattaaccttgaaaaaatgtcgcccgttattcaaaaccgcgatggcattgcattccccgatacgcttgtaggtaccgacagccacaccccgcatgttgatgcattaggtgttattgctgtaggtgtaggcgggcttgaagctgaaagcgttatgcttggccgtgcgtcgtacattcgtttacccgatattgtaggcgtagagcttacgggtactcgccagcctggtattaccgctaccgatattgtgttggcgattactgagtttttacgcgagcagcgtgttgtatcgacctatttagaattttacggcgaaggcgccgatgctttaacgcttggtgacagagcaactatttcgaacatgacgccagaatttggtgcgactgcggcgatgttttatatcgacgataaaacaatagactatttacgtttaacagggcgcgatgaagagcaaatagcccttgtagaaaactacgctaaaacggctggcctttggagcgatagcttaaaaaccgcaaaatacgagcgtgttttgacctttgatttatcaagcgttggccgcaatattgcggggccttctaatccacatcgtcgtgtttcaaccagcgatttagcgaaagaaggtatttcgggcgttgttgaaaacgaagaaggcttaatgccagacggtgcgtgtattattgcggcaattaccagctgtactaatactagcaacccgcgcaatgtaatagctgcaggtttgttagcgcgtaatgcgaatgcaaaagggttaatgcgcaaaccttgggttaaaacgtcgttagcgccaggctcaaaagccgtgcaatcgtaccttgaagacgcaaacctattgccagagcttgagcagcttggttttggtattgttggttttgcgtgtactacctgtaacgggatgagcggggcgcttgaccctgttattcaaaaagaagtaatagaacgcgatttatacacaacggctgtgctttcgggtaatcgtaactttgacgggcgtattcacccttatgcaaaacaagcgtttttggcatcgccgcctttggttgtagcttatgctattgcgggcacgattcgttttgatattgaaaaagatattttaggacaagatcaacaaggtaatgatgtaacgcttaaagatttatggccaaccgatgaagaaatagattcggtaattcagcaaagcgttaagcctgagcaatttaaaaaagtgtacgagcctatgtttgacttaaccgtagattacggtgaagacaacgacccactttatgattggcgagcgcaaagtacctatattcgccgcccgccttattgggaaggtgcattagcaggggagcgaagcatgacaggtatgcgcgctttagcggttttaggtgacaatattacgaccgatcatttatcaccttcaaacgcgattatggcaagcagtgctgcgggtgaatacctcactaaaatgaacgttccagaagaagattttaactcatatgctactcaccgcggtgaccatttaactgcgcaacgcgccacatttgcaaacccaaaactacttaatgaaatggtagttgatgaaaacggtgacgttaagcaggggtcatacgcgcgaatagagcccgagggtaaaaacacgcgtatgtgggaagcaatcgaaacttatatggggcgtaaacaaccgcttattattgttgctggtgctgactacgggcaaggatcgtcgcgcgattgggcggcaaaaggcgtaaggcttgctggtgttcaggttatagccgctgaaggctttgagcgtattcaccgtactaatttaattggcatgggcgttttaccgcttgagtttacaccaggcactacgcgtaaaacactaaaccttgatggtagtgaaagttacgatgtaaaaggcgcaccagcaccgggcgcgacattagagcttgtgatcacccgtaaaaatggtgaagtgctaacagcagcaatgaaatgcagattagatacgcaagaagagctttctatttatgctgctggtggtgtattacagcgttttgctcaagactttttagaagcgacaaacgcgtaa

SEQ ID NO: 67095 - protein, 868 aa, Alteromonadales bacterium TW-7
MTIINNTQYRKPLAGSNVDYYDTQAAVDAIKPGAYATLPYSSRVFAENLVRRCDPAMLTDALSQIIERKQDLDFPWYPARVVCHDILGQTALVDLAGLRDAIAAKGGDPSKVNPVVPTQLIVDHSLAVEHAGFDPEAFEKNRAIEDRRNDDRFHFINWTKTAFKNIDVIPPGNGIMHQINLEKMSPVIQNRDGIAFPDTLVGTDSHTPHVDALGVIAVGVGGLEAESVMLGRASYIRLPDIVGVELTGTRQPGITATDIVLAITEFLREQRVVSTYLEFYGEGADALTLGDRATISNMTPEFGATAAMFYIDDKTIDYLRLTGRDEEQIALVENYAKTAGLWSDSLKTAKYERVLTFDLSSVGRNIAGPSNPHRRVSTSDLAKEGISGVVENEEGLMPDGACIIAAITSCTNTSNPRNVIAAGLLARNANAKGLMRKPWVKTSLAPGSKAVQSYLEDANLLPELEQLGFGIVGFACTTCNGMSGALDPVIQKEVIERDLYTTAVLSGNRNFDGRIHPYAKQAFLASPPLVVAYAIAGTIRFDIEKDILGQDQQGNDVTLKDLWPTDEEIDSVIQQSVKPEQFKKVYEPMFDLTVDYGEDNDPLYDWRAQSTYIRRPPYWEGALAGERSMTGMRALAVLGDNITTDHLSPSNAIMASSAAGEYLTKMNVPEEDFNSYATHRGDHLTAQRATFANPKLLNEMVVDENGDVKQGSYARIEPEGKNTRMWEAIETYMGRKQPLIIVAGADYGQGSSRDWAAKGVRLAGVQVIAAEGFERIHRTNLIGMGVLPLEFTPGTTRKTLNLDGSESYDVKGAPAPGATLELVITRKNGEVLTAAMKCRLDTQEELSIYAAGGVLQRFAQDFLEATNA

SEQ ID NO: 67096 - DNA, 2268 bp, Aspergillus niger
  CDS (1)..(2268)
atggtcagaacacgagtgagctgtcccaagttagccagaggctatgcctcccacacccaagtgccaataagtcgacttgaacaacataaaataaacatctcccaatacgaccgccccctcacatacgccgaaaaagtcctttacagccatcttgacatcacttttgacgagcgcatcgagcgcggcaaaacccaactcaaactacgcccgcaacgcatagcatgccaagatgcgacagcccaaatggcatttatccagttcatgtccgcgggactagacacagcggccgtaccaaccacagtccactgcgatcatttgatcgtcagtcgtgacggcgaaacacaggacctcgctcgagcgctggacaaccataaagaagtgtacgatttcctcgagtctgcctgccagaaatacaacatggggttctggaagcccggcgcgggaatcattcaccagattgtgctggagaactacgccttccctagtggaatgatgatcgggacggactctcatactcccaacgcaggaggccttggcatgatagccatcggagttggtggtgccgatgcagtagacgtgatggctggattgccgctggaactccaagcgccgcaggtattgggtgtccgtttgacggggcagttgtccggatgggcttcgccgaaggatattatcaatgctgtagccgggacgctttccgttaacggaggtactggatccattattgagtactttggacctggggcgcagactctgtcagccacaggcatggcaactgtttgcaatatgggtgcggagacgggtgccacaacgtccatcttcccttatgcgccacagatggcggattatcttcgtgcgaatcatcgccatgagatggctgatgctgttaagagcattgcaccggaattgcaggccgatgagggggctgagtatgataatgttattgagctcgatttgtccactctcgagccacggatcaatggacctttcacgccggacttttcgactccggtgtcgcggttcggtgaagccgcggcggagaaccagtggccgggtgaattgacggcggctttgattggatcttgtactaactcttcgtttgaagatatgggacgtgcagctagtcttgcccagcaagcattggatgcaggactggaaccaaagatgccgctgttggtgtctccgggtagtgttcagacgcgcgagacactgaaagatgccggtattctgccggtcttcgagagactcggggcgacgatgcttcccaacgcctgcggtccatgctgtgggtcgtgggatcgagttgatatgccaaagggcgcccccaactccataataacctcctacaaccggaacttctccggccgtctagattccaacccagcaaccaacgtcttcctagcatcgcccgagctcgtcattgcaaaggccttctcccgcgacctctccttcaacccaacaactgactcgctcccaaccccatccggcgagcaattccacttcctccctccaaccagcgattccctcccctcaaagggctacctctcctccgactccgcctacgcacccccaccggcaaaccgggataacatctccgtcaaaatcgacccgtcatccctccgcctccagaaattgtccccattcccaccctggcccggccacgacttcaaagactgcgccatcctaatcaaaacagccgggaaatgcacaacggaccacatcacccccgctggcccgtggttccgctatagaggccacctagaaaacatctccaacaataccctcatcggcgcaaccaacgccgagaacggcaaggtgaacagtatccggaaccagctcacgaagcaagatggacaggaagtgcctgctacagcacgccactacaaagagaacagcgtgccgtgggtggttatcgctgaccataactacggggagggcagttcgcgggaacatgcggcgctgcagccgaggtatctaggtggtgtggcgattatcgcgaagtcatttgcaagaatccatgaggcgaatttgaagaagcaggggttgttggcactgactttcgacaatgagaaggattatgaaaggattagggctgaggatcgggttagtattttggggcttagggagggggagtttgttccggggagcactttgaggttggtagttaatgggggcgagtgggaggctgtgctcaggcatagttttacggaggagcagattgggtattttagaagtgggagtgcgttgaatgttatggcggggaagtag

SEQ ID NO: 67097 - protein, 755 aa, Aspergillus niger
MVRTRVSCPKLARGYASHTQVPISRLEQHKINISQYDRPLTYAEKVLYSHLDITFDERIERGKTQLKLRPQRIACQDATAQMAFIQFMSAGLDTAAVPTTVHCDHLIVSRDGETQDLARALDNHKEVYDFLESACQKYNMGFWKPGAGIIHQIVLENYAFPSGMMIGTDSHTPNAGGLGMIAIGVGGADAVDVMAGLPLELQAPQVLGVRLTGQLSGWASPKDIINAVAGTLSVNGGTGSIIEYFGPGAQTLSATGMATVCNMGAETGATTSIFPYAPQMADYLRANHRHEMADAVKSIAPELQADEGAEYDNVIELDLSTLEPRINGPFTPDFSTPVSRFGEAAAENQWPGELTAALIGSCTNSSFEDMGRAASLAQQALDAGLEPKMPLLVSPGSVQTRETLKDAGILPVFERLGATMLPNACGPCCGSWDRVDMPKGAPNSIITSYNRNFSGRLDSNPATNVFLASPELVIAKAFSRDLSFNPTTDSLPTPSGEQFHFLPPTSDSLPSKGYLSSDSAYAPPPANRDNISVKIDPSSLRLQKLSPFPPWPGHDFKDCAILIKTAGKCTTDHITPAGPWFRYRGHLENISNNTLIGATNAENGKVNSIRNQLTKQDGQEVPATARHYKENSVPWVVIADHNYGEGSSREHAALQPRYLGGVAIIAKSFARIHEANLKKQGLLALTFDNEKDYERIRAEDRVSILGLREGEFVPGSTLRLVVNGGEWEAVLRHSFTEEQIGYFRSGSALNVMAGK

SEQ ID NO: 67098 - DNA, 2334 bp, Aspergillus niger
  CDS (1)..(2334)
atgggtgcgctggcccctaagtcccgccttatgctcggggctcggggtatggccaccgtcaccgactctcccctcgacaagaaggtcgagatgtccaacctggagaagggtaactacatcaactacaagaagatgtccgagaacctcgacatcgttcgtcgtcgtctgagccgtcctctcacatacgccgagaaggttctgtactctcaccttgacgacccccacggacaggagatcgagcgtggcagctcctacctcaagctgcgccccgaccgtgtcgcttgccaggatgccactgcccagatggctatcctccagttcatgtccgctggcatgccctccgtcgctactcccactaccgtccactgtgaccacttgattgaggcccaggtcggtggtgacaaggatcttgctcgtgccaacgacatcaacaaggaagtctacgacttccttgcctctgctactgccaagtacaacatcggtttctggaagcccggttccggtatcatccaccagatcgttctggagaactacgctttccccggtggtctcatgatcggtaccgactctcacacccctaacgctggtggtctcgccactgctgccatcggtgttggtggtgctgatgccgtcgacgttatggctggtctcccttgggagctgaaggcccccaaggtcatcggtgttaagctcaccggtcagatgtccggctggactactcctaaggatatcatcctcaaggttgctggtctcctcaccgtcaagggtggtactggcgctatcatcgagtaccacggacctggtgtcaactccctgtcctgcactggtatggccaccatctgtaatatgggtgctgagattggtgccaccacctccatgttccccttcaacgaccgcatgtacgattacctgaaggccaccaagcgtcagcacattggtaacttctcccgcgagtacgccaaggagctccgcgaggatgagggtgctgagtacgaccagctgattgagatcaacctgtccgagctcgagccccatgtcaacggtcccttcactcctgacttggccacccccatctccaagttcaaggaggccgttgaggccaacaagtggcccgaggagctcaaggttggtcttatcggctcttgcaccaactcctcctacgaggacatgtcccgcgctgcctccattgctcaggacgcccttgaccacggtctgaagtccaagtccctcttcaccgtcacccccggttccgagcagatccgtgctaccattgagcgcgatggtcagctcaagacccttgaggagtacggtggtgttatccttgccaacgcctgcggtccttgcattggacagtgggatcgtaaggacgtcaagaagggtgaggccaactctatcatctcctcctacaaccgtaacttcaccggtcgtaacgatgccaaccccgccacccacgctttcgtcgcctctcccgacctggtcgtcgccatgactgttgccggtaccctcaagttcaaccctctcaccgacaagctgaaggacaaggacggcaaggagttcatgctcaagcccccctccggcgagggtctccctgctcagggctacgaccccggccgtgacacctaccaggctcctcccaccaaccgcgagggcgtcaacgtcgctgtcgctcccaccagtgaccgtctccagatccttgctggtttcgagaagtgggatggcaaggatgccactggcatccctatcctgatcaagtgccagggcaagaccaccaccgaccacatctccatggctggcccgtggttgaagtaccgtggtcaccttgacaacatctccaacaacatgctgattggtgccatcaacgccgagaacggtgaggccaacaaggtcaagaacgccttcaccggcgagtacgatgccgtccccgctactgcccgtgactacaaggcccgtggcgtcaagtgggttgtcatcggtgactggaactacggtgagggttcttcccgtgagcacgctgctctggagccccgccaccttggtggtcttgccatcatcacccgctccttcgctcgtattcacgagaccaacctgaagaagcagggtatgcttcctcttaccttctccgaccccgccgactacgacaagatcaagcccgaggacaaggtcgacctcctctgcactgagctcgaggttggcaagcccgtcactctgcgtgtccaccccaaggacggtgcctccttcgacatcaagctcagccacaccttcaacgagtcccagattgagtggttccgcgatggttccgccctcaacaccatggcccgcaaggctggcaactaa

SEQ ID NO: 67099 - protein, 777 aa, Aspergillus niger
MGALAPKSRLMLGARGMATVTDSPLDKKVEMSNLEKGNYINYKKMSENLDIVRRRLSRPLTYAEKVLYSHLDDPHGQEIERGSSYLKLRPDRVACQDATAQMAILQFMSAGMPSVATPTTVHCDHLIEAQVGGDKDLARANDINKEVYDFLASATAKYNIGFWKPGSGIIHQIVLENYAFPGGLMIGTDSHTPNAGGLATAAIGVGGADAVDVMAGLPWELKAPKVIGVKLTGQMSGWTTPKDIILKVAGLLTVKGGTGAIIEYHGPGVNSLSCTGMATICNMGAEIGATTSMFPFNDRMYDYLKATKRQHIGNFSREYAKELREDEGAEYDQLIEINLSELEPHVNGPFTPDLATPISKFKEAVEANKWPEELKVGLIGSCTNSSYEDMSRAASIAQDALDHGLKSKSLFTVTPGSEQIRATIERDGQLKTLEEYGGVILANACGPCIGQWDRKDVKKGEANSIISSYNRNFTGRNDANPATHAFVASPDLVVAMTVAGTLKFNPLTDKLKDKDGKEFMLKPPSGEGLPAQGYDPGRDTYQAPPTNREGVNVAVAPTSDRLQILAGFEKWDGKDATGIPILIKCQGKTTTDHISMAGPWLKYRGHLDNISNNMLIGAINAENGEANKVKNAFTGEYDAVPATARDYKARGVKWVVIGDWNYGEGSSREHAALEPRHLGGLAIITRSFARIHETNLKKQGMLPLTFSDPADYDKIKPEDKVDLLCTELEVGKPVTLRVHPKDGASFDIKLSHTFNESQIEWFRDGSALNTMARKAGN

SEQ ID NO: 67100 - DNA, 2418 bp, Aspergillus niger
  CDS (1)..(2418)
atggtgaggcagcttgtatggcagcgggccaccgcctctcagaggttggccccgaagtgcctctctccgcaacgactgttcagtcgccgtggcctggccacggaggcttctccggcagcttcttcccgcttgcctccctacccgaagatcgttcagaacctcgaaaacgtccgtcgcgtgctcggccaggaccgcaacctgaccctggcggagaagatcctctacgcccatttggacaaccccgaggagtcccttctgaccggcaccaacaatggccgtgatattcgcggcaaggccaacttgaagttgaagcccgatcgcgtggcgatgcaggatgcctcggcccagatggctctgttgcagttcatgtcttgcggactgccctcgacggccgtgcccgctagtatccactgtgaccacatgatcgttggtgagcgtggtgctgacactgatctgccggcgtccatcaagggtaacagcgaggtgtttgactttctggagagtgcggccaagcgctacggtattgagttctggccccctggtgccggtatcattcaccagagtgttctggagaactacgctgctccgggtctgatgatgctgggaactgacagccatacccccaatgctggtggtctgggtgccattgccattggtgtcggtggtgctgatgccgtcgatgcgctggttgacgctccctgggagctcaaggcgccccgcgtcctgggtgtgcgtctggagggcaagctcaacggctgggcggcccccaaggatatcatcctccacctggctggcaagctcaccgttcgtggtggaactggcttcattattgagtaccacggacctggtctggagaccctgagctgcactggtatggccaccatctgtaacatgggtgctgaggtgggcgcgacgacctccgtgttccccttctcccccaaccacgtcccctacctgcaggcgactcaccgggctgatgttgcccgtgctgcctctgagatcgcctcttctggtcccaggaacctcctccgtgccgatggcggtgcggagtatgacgagctgatcaccatcgacctgtcgacgctggagcctcacatcaacggtcccttcactcccgatttctccgttcccctgtctgctttcgccgacaccgttcgcgagaagcaatggcccgaatcccttggagcgggtttgattggtagctgcacgaacagttcctacgaggacatgacccgtgcggagaacctggtcaagcaggcctctgctgccggccttaagcccaagtccgacttcttcatcactcccggtagtgagcagattcgcgccaccctggaccgcgatcagactctgtcgaccttctcccaggccggcggtaccgtcctggcgaacgcctgcggtccctgcattggtcagtggaagcgcacggacggtgtccccaagggcgaggataacgccatccttacttcctacaaccgtaacttccccggtcgtaacgacggcaaccggagaaccatgaacttcctggcctcccctgagctcgtcaccgccatggtttactctggaagcaccaccttcaaccccatgaccgacagcatcaccacccccagcggtgaggagttccgcttccagcctcctaccggctacgctctccccagtgacggctttgccgatggcaaccctgacttccagcccactgctgctgtgcccgatccttcctgtgaagtgattgtctcccccacctcggatcgtctggccctgctcgagcccttcgcccccttccccaagggcgacctgtccggcctcaaggtcctgtacaaggtccgtggccagtgcacgactgacaccatctcggcggctggtccgtggttgaagtacaagggtcatctgcccaacatttccgccaacaccctgatcggtgccgtcaacgccgccactggcgagaccaacgtcgcctacgacgaggctggcaaacagtactccattccggacctggctgcccagtggaaggccgacggagttgagtggcttgtcgtggctgaggagaactacggcgagggtagcgctcgtgagcacgctgctctgcagccccgctacctgggtggacgcatcatcgtggccaagagctttgcccgtatccacgagacgaacctgaagaagcagggtgtcgtgcccttgaccttcgagaacccggccgactatgacaagatcgacgcttgtgaccaggtggccacggagggactatatgaagtgctgcaggctggcggacagggctccatccagctgcgggtgaccaagcgcagtggcgagtcggtggtgatccccgtcaagcacactctcagtccggaccagtgtgctttcgtcctggctggtagtgcgttgaacttgctggctcagaaggccaacaagaaaagtgcttga

SEQ ID NO: 67101 - protein, 805 aa, Aspergillus niger
MVRQLVWQRATASQRLAPKCLSPQRLFSRRGLATEASPAASSRLPPYPKIVQNLENVRRVLGQDRNLTLAEKILYAHLDNPEESLLTGTNNGRDIRGKANLKLKPDRVAMQDASAQMALLQFMSCGLPSTAVPASIHCDHMIVGERGADTDLPASIKGNSEVFDFLESAAKRYGIEFWPPGAGIIHQSVLENYAAPGLMMLGTDSHTPNAGGLGAIAIGVGGADAVDALVDAPWELKAPRVLGVRLEGKLNGWAAPKDIILHLAGKLTVRGGTGFIIEYHGPGLETLSCTGMATICNMGAEVGATTSVFPFSPNHVPYLQATHRADVARAASEIASSGPRNLLRADGGAEYDELITIDLSTLEPHINGPFTPDFSVPLSAFADTVREKQWPESLGAGLIGSCTNSSYEDMTRAENLVKQASAAGLKPKSDFFITPGSEQIRATLDRDQTLSTFSQAGGTVLANACGPCIGQWKRTDGVPKGEDNAILTSYNRNFPGRNDGNRRTMNFLASPELVTAMVYSGSTTFNPMTDSITTPSGEEFRFQPPTGYALPSDGFADGNPDFQPTAAVPDPSCEVIVSPTSDRLALLEPFAPFPKGDLSGLKVLYKVRGQCTTDTISAAGPWLKYKGHLPNISANTLIGAVNAATGETNVAYDEAGKQYSIPDLAAQWKADGVEWLVVAEENYGEGSAREHAALQPRYLGGRIIVAKSFARIHETNLKKQGVVPLTFENPADYDKIDACDQVATEGLYEVLQAGGQGSIQLRVTKRSGESVVIPVKHTLSPDQCAFVLAGSALNLLAQKANKKSA

SEQ ID NO: 67102 - DNA, 2379 bp, Aspergillus niger
  CDS (1)..(2379)
atgcagcgatgtcgccaaaaattaccggtgatgcaagcatcataccgatccctctgcctgaacggagctcggagctatgcgacaaccgttccaggtaacccaattctaggcgttcactaccccaaacagattcgggccatcgaagcgattaagcagggatcaaagcgcccgctcacgcttgctgaaaagacactatacagtcacttactggacacggatagcggtcgttggaacattgataagattacgcggggaaagaccattttggagctacgccctgatcgtgttgcctgccatgatgcgactgcaacaatggctttactacagtttatcagcgctggcctcccgcgtgtgatggtaccgacaacagtgcacagcgatcatcttattatctcagagaatggcgcggagaaagatatgcagcgtgcgaccacagaacacgcagaggtatatgatttcttgagtagcgcttcgaagaagtacgggatcggcttctggaagcctggatctggaatcatccatactgtcatttttgagaactacgcgatgcctggaggtttgattatcggtacggattctcatacgcccaatgcaggtgggatgggcatgcttggaattggcgttggcggagccgatgctgttgacgcaatgtcggggatggcttgggagttggttgcgccgaaagtcattggagtcgaacttacgggcgagcttcaaggttgggcgtcaacaaaagatattatctgtaaactggcaggaatactcagtgtatcgggcgggaaaggtcgcatcattgaattcttcggtcctggtacgaagaccctgggcgcgacagctatggctaccatttgcaacatgtctgcggaaattgggtcgacttcttgtatcttcccctactcggatgcgatcgcccgctatttgagtgccactgcgcgcgatcatgttgtgaaagcggcaaactcagtcaaagaccttctactcaccgcagatgagggctccgaggagtactacgacgaaatcatcaagatcgatttggacactctggagccgcatgttaacggtcctttcacaccggatctagctcatcccatctcgaagctgtctactgcggtcgctgagagcgattggcctgtgaacctaagccacgccatggtgggtagctgtaccaacagctcctatgaggatttggacaaggctcggcagctggttaaccaagcccgggcggccggaataacaaagttcaagactcctttcttggtttcaccaggtagcgaaagaattcgggctaccgccgaggaggctggtatcctgcaggatctcgaggacgctggtgctatgatcctcagcagctcttgcggaccgtgtgtcgggtcgtgggaccgcaaggacgtggatgtccgcggaaaagagaagaactcggtgatctccagctacaaccgtaactttgtggggcgccacgacagcaatccggccacgcactcattcgtcacgtcgccggagctagtcacagcctttgcttatgctggtcgcctggactttaaccctgtcactgacagtatctctgcggaaggatctcagccactgcggcttacgcctcctgtaggtcaggaattgccagaatcattcaattccggtgcagatcgctttcaagagcctccgtcagatggctcatcctactcggttattatcgatgagaagtccgacaggctacaactcttgaagcccttcccggcgtggaagcacggaaatgcaacggacatggagttgctgatgaaggtaaagggcaagtgtacgacggatcacatatccccggctggcccgtggtacaaatatcgcggtcatctggagaacatcagccacaacatgctcaccaccgcaaccaatgcattcttagacaatgacccgcaaatgctaggccatacgacacatccgctaacgcgcaaggtccagcttactcatgaagtggcccgagacttgaagcaccgttccattcgttggtgcgtggttggagacaacaactacggtgagggtagttcgcgagagcatgccgcactggagcctcgcttcctcggtggcattgccatcatagcccggtctttcgctcgtatccacgagacgaatctgaagaaacagggaatgcttccgctcacattcgctgatcctgctgactacgaccgagtgcaggagggagatcgcatcactctgattggcgtagaagatggagagctgcaaccggggaagaatgtcaccatgcgggttactccgcgccatggagacgcctgggaggctgagttgtgccacagctatcatgccggacagctcccgtggctccgggctggtagtgccttgaaccatatcaaggctactgtacgcagctga

SEQ ID NO: 67103 - protein, 792 aa, Aspergillus niger
MQRCRQKLPVMQASYRSLCLNGARSYATTVPGNPILGVHYPKQIRAIEAIKQGSKRPLTLAEKTLYSHLLDTDSGRWNIDKITRGKTILELRPDRVACHDATATMALLQFISAGLPRVMVPTTVHSDHLIISENGAEKDMQRATTEHAEVYDFLSSASKKYGIGFWKPGSGIIHTVIFENYAMPGGLIIGTDSHTPNAGGMGMLGIGVGGADAVDAMSGMAWELVAPKVIGVELTGELQGWASTKDIICKLAGILSVSGGKGRIIEFFGPGTKTLGATAMATICNMSAEIGSTSCIFPYSDAIARYLSATARDHVVKAANSVKDLLLTADEGSEEYYDEIIKIDLDTLEPHVNGPFTPDLAHPISKLSTAVAESDWPVNLSHAMVGSCTNSSYEDLDKARQLVNQARAAGITKFKTPFLVSPGSERIRATAEEAGILQDLEDAGAMILSSSCGPCVGSWDRKDVDVRGKEKNSVISSYNRNFVGRHDSNPATHSFVTSPELVTAFAYAGRLDFNPVTDSISAEGSQPLRLTPPVGQELPESFNSGADRFQEPPSDGSSYSVIIDEKSDRLQLLKPFPAWKHGNATDMELLMKVKGKCTTDHISPAGPWYKYRGHLENISHNMLTTATNAFLDNDPQMLGHTTHPLTRKVQLTHEVARDLKHRSIRWCVVGDNNYGEGSSREHAALEPRFLGGIAIIARSFARIHETNLKKQGMLPLTFADPADYDRVQEGDRITLIGVEDGELQPGKNVTMRVTPRHGDAWEAELCHSYHAGQLPWLRAGSALNHIKATVRS

SEQ ID NO: 67104 - DNA, 2769 bp, Xanthomonas campestris
  CDS (1)..(2769): transl_table=11
atgagcgattccttttccacccgcacctcgctagaggtcaacggccagcgctacgactactacagcctgcccaaactgggcgagcgcttcgatgtcgcccgcctgccctactcgatgaagatcctgctggagaacctgctccggcatgaagacggtggcgtcaccgtcggcaaggaccacatcgaagcggtcgccaagtgggacccgaccgccgaacccgatatcgaaatcgccttcatgccggcgcgcgtggtgctgcaggacttcaccggcgtgccctgcgtggtcgacctggccgcgatgcgcgatgcggtggtcaagctcggcggcaatgccgaccagatcaatccgcagattccctccgaactggtcatcgaccactcggtgcaggtggacgtgttcggtaagcccgaggcgctggacctcaacggcaagatcgaattccagcgtaaccaggagcgctacggcttcctgcgctggggccagaaggccttcgacaacttcaaggtggtgccgcccaacactggcatcgtccaccaggtgaacctggagaatctggcacgcgtggtgatgagcgcggacaaggacggcacccagatcgcctatccggacaccgtgttcggcaccgacagccataccaccatgatcaacggtatcggcgtgctgggctggggcgtgggcggcatcgaggcggaagcggcgatgctcggccagccctcctccatgctgattccgcaggtggtgggcttcaagctcaccggcaagctgcccgaaggcgccaccgccaccgacctggtactcacggtcacccagatgctgcgcaagcacggggtggtgggcaagttcgtggagttctacggtgaaggcctgcagcacctgccgctggccgaccgcgccaccatcggcaacatggcgccggaatacggtgccacctgcggcatcttcccggtcgataacgaatcgctgacctacctgcgcctgtccggccgcagcgaggagcagattgcactagtggaggcctatgccaaggcacagggcctgtggcacgacgccgataccccgcatgcgcagtacagcgccacgctggagctggacatgggcgacgtcaaaccgtcgctggccggccccaagcgcccgcaggaccgcgtgctgctggaagacatgcagtccaactaccgcgaaagcctcaagccgttcgccgaggcgcgcagcaagcgcttggccgataccaagcaggaagaccggctcaagaacgaaggcggcggcggcaccgcggtgggcgccaaggcctcgcaggccgaaagcgctggcgacagcggtgcgggctggcagctgcgcgatggctcggtggtgatcgcggcgatcacctcgtgcaccaacacctccaacccggcagtgatgctgggcgccggcctgctcgcccgcaatgccgcggccaagggcttgaaggcgcagccctgggtgaagacctcgcttgggccgggctcgcgcgtggtcaccgactatctgagcaaggccggcgtgctggccgacctggaacaactcggcttctacgtggtgggctacggctgcacgacctgcatcggcaactccggcccgctgccggaagacgtctcggcggcgattgccaaggatgatctggtggtgacttcggtgttgtcgggcaaccgcaacttcgaaggccgcgtgcatcccgaggtcaagatgaactacctcgcttcgccgccgctggtggtggcgtatgcgatcgccggcaccaccgacatcgacctcaacccgcgacccgttcggcaccggcaggacggccagccggtgtacctgcgcgacatctggcccagcaacaaggaaatcggcgacaccatcgccgccaccgtcggcccggaaatgttcaagcagaactacgccgatgtattcaagggcgatacgcgctggaacaccatcgcctcgccggatggcgcgctgtacgaatgggatgccgggtccacctacatcaagaacccgccctatttcgaaggcatgacgatgcaggtgggccacgtcgacgacgtgcatggcgcgcgcatcatgggcttgttcggcgactcgatcaccaccgaccacatctccccggccggcaacatcaagaaggattcgcccgcgggccgtttcctgcaggagcgcggcgtgcagccggccgacttcaacagctacggcagccggcgcggcaacgacgatgtgatggtgcgcggcaccttcgccaatattcgcatcaagaacctgatgttcggtggcgaggaaggcggcaacacgctgtatttcggcaaggacggcgccacgcctgagaagctggccatctacgacgcggcgatgaagtacaaggccgacggcgtgccgctggtggtgctggccggcaaggaatacggcaccggctcctcgcgtgactgggccgccaagggcaccaacctgctgggcgtcaaggccgtggtcgccgaaagcttcgagcgcatccaccgctccaacctggtcggcatgggcgtgctgccactgcagttcctggaaggcgaaaatgcgcaaaccctgggcctggatggctccgaggtgctggacatcaccggcctgcaggacggcgccagccgtcgcgctaccatcgatgcgaagaagtccgatggcagcgtcaagcagttccaggtcaaggtgctgctgctgacgccgaaggaagtggagtacttcaagcacggcggcctgctgcagtacgtgctgcgccaactagccgcccgcaaggcagcctga

SEQ ID NO: 67105 - protein, 922 aa, Xanthomonas campestris
MSDSFSTRTSLEVNGQRYDYYSLPKLGERFDVARLPYSMKILLENLLRHEDGGVTVGKDHIEAVAKWDPTAEPDIEIAFMPARVVLQDFTGVPCVVDLAAMRDAVVKLGGNADQINPQIPSELVIDHSVQVDVFGKPEALDLNGKIEFQRNQERYGFLRWGQKAFDNFKVVPPNTGIVHQVNLENLARVVMSADKDGTQIAYPDTVFGTDSHTTMINGIGVLGWGVGGIEAEAAMLGQPSSMLIPQVVGFKLTGKLPEGATATDLVLTVTQMLRKHGVVGKFVEFYGEGLQHLPLADRATIGNMAPEYGATCGIFPVDNESLTYLRLSGRSEEQIALVEAYAKAQGLWHDADTPHAQYSATLELDMGDVKPSLAGPKRPQDRVLLEDMQSNYRESLKPFAEARSKRLADTKQEDRLKNEGGGGTAVGAKASQAESAGDSGAGWQLRDGSVVIAAITSCTNTSNPAVMLGAGLLARNAAAKGLKAQPWVKTSLGPGSRVVTDYLSKAGVLADLEQLGFYVVGYGCTTCIGNSGPLPEDVSAAIAKDDLVVTSVLSGNRNFEGRVHPEVKMNYLASPPLVVAYAIAGTTDIDLNPRPVRHRQDGQPVYLRDIWPSNKEIGDTIAATVGPEMFKQNYADVFKGDTRWNTIASPDGALYEWDAGSTYIKNPPYFEGMTMQVGHVDDVHGARIMGLFGDSITTDHISPAGNIKKDSPAGRFLQERGVQPADFNSYGSRRGNDDVMVRGTFANIRIKNLMFGGEEGGNTLYFGKDGATPEKLAIYDAAMKYKADGVPLVVLAGKEYGTGSSRDWAAKGTNLLGVKAVVAESFERIHRSNLVGMGVLPLQFLEGENAQTLGLDGSEVLDITGLQDGASRRATIDAKKSDGSVKQFQVKVLLLTPKEVEYFKHGGLLQYVLRQLAARKAA

SEQ ID NO: 67106 - DNA, 2337 bp, Aspergillus terreus
  CDS (1)..(2337)
atgggtgcgctggcccccaagtcccgtcttcttctcgggacccggggtctggccaccgttgctgattcccctctggacaagaaggtcgagatgaccaaccacgagaagggtaactacatcaactacaagaagatgtccgagaacctggacattgtccgtcgccgtctgagccgccctctcacctacgccgagaaggttctctattctcaccttgatgatcctcatggtcaggacatcgagcgtggtgtttcttacctgaagctccgccccgaccgtgtcgcttgccaggatgctactgctcagatggctatcctgcagttcatgtccgctggcatgccttccgtcgctacccccaccaccgtgcactgcgaccacttgattgaggctcaggttggtggtgagaaggatcttgctcgtgccaacgagatcaacaaggaggtctacgacttcctggccaccgccaccgccaagtacaacatcggtttctggaagcccggttccggtatcattcaccagatcgtcctggagaactatgcgttccccggtggtctgatgatcggtactgactctcacactcctaacgctggtggtcttgctatggctgccattggtgtcggtggtgctgatgccgtcgatgtcatggctggtctcccttgggagttgaaggcccccaaggtcattggtgtcaagctgactggtgagatgtccggatggaccactcctaaggatatcatcctgaaggtcgctggtctcctgactgtcaagggtggtactggtgccatcattgagtaccacggtcctggtgtcaactccctgtcttgcactggtatgggtaccatctgtaacatgggtgctgaaattggtgctaccacctccatgttccccttcaacgaccgcatgtacgactacctgaaggccaccaagcgtcagcacattggtgagttcgcccgctcctacgccaaggagctccgcgaggatgagggtgccgagtacgaccagctcattgagatcaacctctctgagcttgagccccacatcaacggtcccttcacccccgacttggccacccccatctccaagttcaaggaggctgttgatgccaacgggtggcccgaggagctcaaggtcggtctgatcggctcttgcaccaactcctcttacgaggatatgtcccgtgcggcctccatcgcccgtgacgccctcaaccacggcgtgaagtccaagtctctcttcactgtcacccccggttctgagcagatccgcgccaccattgagcgtgacggccagctccagaccctcgaggagttcggcggtgtcatccttgccaacgcctgcggtccttgcatcggtcagtgggatcgtaaggacgtgaagaagggtgagcccaactccatcatctcttcttacaaccgtaacttcaccggtcgtaacgatgccaaccctgccactcacgctttcgtcgcctcccctgaccttgtcgttgccatgtgtgttgctggcaccctcaagttcaaccctctcaccgatactgtgaaggacaaggatggcaaggagttcaagcttgctcctccttctggtgatggtctccccagcaagggctacgacgccggccgcaacacctaccaggctcctcctcaggaccgtgcgtccatcaacgtcgctgtctcccccactagcgaccgtctccagctcctcgctggctttgaggcctgggatggcaaggatgccaacggcattcccatcctgatcaagtgccagggcaagaccaccactgaccatatctccatggctggcccatggttgaagtaccgtggccacttggacaacatctccaacaacatgcttatcggtgccgttaacgctgagaacggcgaggccaacaaggtcaagaacaagttcaccggcgaatacggtgccgtccccgctaccgctcgtgactacaaggcccgtggtgtgaagtgggttgtcattggtgactggaactacggtgagggctcttctcgtgagcacgctgctcttgagccccgtcaccttggtggtctggccatcatcacccgttctttcgcccgtatccacgagaccaacctgaagaagcagggtatgcttcctctgaccttcgctgaccccgccgactacgacaagatccagcctgaggacaccgtcgacctcctctgcaccgagcttgaggtcggcaagcccatgaccctccgtgtccaccccaagaatggctctaccttcgacgtcaagctcaaccacacctttaacgagtcccagatcgagtggttcaaggacggatccgcccttaacaccatggcccgcaaggctgctagcaactaa

SEQ ID NO: 67107 - protein, 778 aa, Aspergillus terreus
MGALAPKSRLLLGTRGLATVADSPLDKKVEMTNHEKGNYINYKKMSENLDIVRRRLSRPLTYAEKVLYSHLDDPHGQDIERGVSYLKLRPDRVACQDATAQMAILQFMSAGMPSVATPTTVHCDHLIEAQVGGEKDLARANEINKEVYDFLATATAKYNIGFWKPGSGIIHQIVLENYAFPGGLMIGTDSHTPNAGGLAMAAIGVGGADAVDVMAGLPWELKAPKVIGVKLTGEMSGWTTPKDIILKVAGLLTVKGGTGAIIEYHGPGVNSLSCTGMGTICNMGAEIGATTSMFPFNDRMYDYLKATKRQHIGEFARSYAKELREDEGAEYDQLIEINLSELEPHINGPFTPDLATPISKFKEAVDANGWPEELKVGLIGSCTNSSYEDMSRAASIARDALNHGVKSKSLFTVTPGSEQIRATIERDGQLQTLEEFGGVILANACGPCIGQWDRKDVKKGEPNSIISSYNRNFTGRNDANPATHAFVASPDLVVAMCVAGTLKFNPLTDTVKDKDGKEFKLAPPSGDGLPSKGYDAGRNTYQAPPQDRASINVAVSPTSDRLQLLAGFEAWDGKDANGIPILIKCQGKTTTDHISMAGPWLKYRGHLDNISNNMLIGAVNAENGEANKVKNKFTGEYGAVPATARDYKARGVKWVVIGDWNYGEGSSREHAALEPRHLGGLAIITRSFARIHETNLKKQGMLPLTFADPADYDKIQPEDTVDLLCTELEVGKPMTLRVHPKNGSTFDVKLNHTFNESQIEWFKDGSALNTMARKAASN

SEQ ID NO: 67108 - DNA, 2697 bp, Citrus limon
  CDS (1)..(2697)
atggctcctgaaaatgctttcaagggaattctcaccagtcttcccaagcctggtggtggagagtttggaaaattcttcagcttaccagctttgaatgatccgagaattgacagactaccttactctataaggatccttttggaatctgcaattcggaattgtgacaatttccaagttacgaaggatgatgtagagaagattattgattgggaaaatacttcacccaagcaagttgaaattcccttcaagcctgctcgggttctcttgcaggattttactggagtgccggctgcagttgacttggcttgcatgagagatgccatgaagaatctcaacagtgatcccaagaagataaatccattggttcctgttgaccttgtcgtagatcattcagttcaggttgatgtggcacgatctgaaaatgcagtacaggccaatatggaatttgaatttcagaggaaccaagagaggtttgcttttcttaagtgggggtcatctgcttttcataacatgcctgttgttcctcctggttcaggaattgtccatcaggttaacttggaataccttggacgggttgtctttaatactgatggcatcctctaccctgatagtgtgggtggtactgattctcacacaaccatgattgatgggttaggagtagctggttggggagttggaggaattgaggctgaggcagcaatgcttggtcagcccatgagcatggttttgcctggtgttgttgggttcaagttgactggcaagttacgagatggggttacagctactgatttggttttgactgtcacgcaaatgttgaggaagcatggtgttgttggcaagtttgtagagttctatggggaaggcatgggtcaactaccattggctgacagggccaccattgcaaatatgtctcctgagtatggagcaaccatgggcttctttcctgtggaccatgttacattgcagtatcttaagttgactggaaggagtgacgagacagtctctatgatagaagagtatttgcgtgcaaacaaaatgtttgttgactacaacaagcctgaacaagaaagatcatactcatcatatctgcagttggatctagcagatgttgaaccctgtatttcaggaccaaaaaggcctcatgatcgagttcctctgaaagacatgaaggctgactggcatgcatgtcttgaaaatcaagttggattcaagggttttgctgtacccaagcaagagcaggataaagtggcaaaattttcattccatggacagcctgctgaacttaaacatggtagtgttgtcattgcagccatcaccagctgtacaaacacatcaaaccctagtgtcatgcttggggctggtcttgtggctaaaaaggcttgtgaactaggtttggaggttaagccatgggtcaaaacaagccttgcaccaggctctggtgttgttacaaagtatctgcaacagagtggcctgcaaaagtacttgaaccaacaaggttttcacattgttggctatggctgcactacttgtattggaaactctggagatcttgatgaatcagttgctactgcaattacagaaaatgacattgttgcagctgctgtgctttccggtaatcggaactttgaaggtcgtgtacatcctttgacaagagctaactatcttgcatctcctccattagttgttgcttatgcccttgctggcacagttgacatagactttgaaaaggagccaattggaactgggaaagatggaaagggtgtttactttaaggatatatggcccagtaatgaagaaattgcagaggttgttcaatctagcgtcttacctgacatgttcaagagtacttatgaggctatcacaaagggcaaccctatgtggaatcagctgtctgtttcccacttccatgctttactcttggatccaaactcaacgtacattcacgagcctccatatttcaagaacatgactatggagccaccaggtccccatggagtgaaggatgcctattgcttgctcaattttggtgacagtattactaccgatcatatctctccggcaggaagtatccacaaggacagccctgctgcaaaatatctgcttgagcgtggagtggatcgcaaggacttcaattcttatggtagtcgtaggggtaatgatgaagtgatggcaaggggtacctttgccaatattcgcattgttaacaagctcttgaatggagaagttggcccaaaaacagttcatattccaacaggagagaagctttatgtttttgatgcagcaatgaggtacaaggctgctggccatgataccattgtcctagctggagcagagtatggaagtggcagttctcgtgattgggctgctaagggtccaatgcttctgggtgtgaaagcagtgattgccaagagctttgagagaattcatcgtagtaatcttgttggtatgggcatcattcttctttgcttcaagcctggggaggatgcagacacactggggttagctggtcatgagcgctacacaatcaacttaccaaataaagtcagtgagataaggcctggccaagacattactgtcacaaccgacactgggaaatccttcacatgtacagtgcgctttgatacggaggtggaactggcatatttcgaccatgggggcattcttccatatgttatccggaatctgattaaacagtaa

SEQ ID NO: 67109 - protein, 898 aa, Citrus limon
MAPENAFKGILTSLPKPGGGEFGKFFSLPALNDPRIDRLPYSIRILLESAIRNCDNFQVTKDDVEKIIDWENTSPKQVEIPFKPARVLLQDFTGVPAAVDLACMRDAMKNLNSDPKKINPLVPVDLVVDHSVQVDVARSENAVQANMEFEFQRNQERFAFLKWGSSAFHNMPVVPPGSGIVHQVNLEYLGRVVFNTDGILYPDSVGGTDSHTTMIDGLGVAGWGVGGIEAEAAMLGQPMSMVLPGVVGFKLTGKLRDGVTATDLVLTVTQMLRKHGVVGKFVEFYGEGMGQLPLADRATIANMSPEYGATMGFFPVDHVTLQYLKLTGRSDETVSMIEEYLRANKMFVDYNKPEQERSYSSYLQLDLADVEPCISGPKRPHDRVPLKDMKADWHACLENQVGFKGFAVPKQEQDKVAKFSFHGQPAELKHGSVVIAAITSCTNTSNPSVMLGAGLVAKKACELGLEVKPWVKTSLAPGSGVVTKYLQQSGLQKYLNQQGFHIVGYGCTTCIGNSGDLDESVATAITENDIVAAAVLSGNRNFEGRVHPLTRANYLASPPLVVAYALAGTVDIDFEKEPIGTGKDGKGVYFKDIWPSNEEIAEVVQSSVLPDMFKSTYEAITKGNPMWNQLSVSHFHALLLDPNSTYIHEPPYFKNMTMEPPGPHGVKDAYCLLNFGDSITTDHISPAGSIHKDSPAAKYLLERGVDRKDFNSYGSRRGNDEVMARGTFANIRIVNKLLNGEVGPKTVHIPTGEKLYVFDAAMRYKAAGHDTIVLAGAEYGSGSSRDWAAKGPMLLGVKAVIAKSFERIHRSNLVGMGIILLCFKPGEDADTLGLAGHERYTINLPNKVSEIRPGQDITVTTDTGKSFTCTVRFDTEVELAYFDHGGILPYVIRNLIKQ

SEQ ID NO: 67110 - DNA, 2976 bp, Sorghum bicolor
  CDS (1)..(2976)
atgcctcccctcacgagctccctcctctcccgctccaccaccggcggctcctccgcccgcggcgtggcggcggccgctgcgatctccaggcccgccgcggacgccgccccttcctcctcgtccccgcctgcccgctcgaccccgaccccgaggccgcgccccagcacggcgtcgcccttcgcgtccggcctcgcgggccgcctcttcggcggccaccgcgccgccgcccgctccgcgtcgtctgcgactgccgtcttcgagcgccggttcgcctcagccgcgaccaggaacacgtacgatgaaatcctgacggggctcaagagaccaggagccggagatgagttcggcaagtactacagcctgcctgcgctctccgatccgcggattgatcggctcccatattctataagaattcttctcgagtcggcaatcaggaactgcgatgacttccaggtcaccgggaacgatgttgagaagatcttggattgggagaaaagtgcaccgaagctagttgaaatcccattcaagcctgcccgcgtcctcctccaggattttactggtgtcccagctgttgttgatcttgcctgcatgagggatgccatgagcaaacttggcagtgatccgaacaaaattaatcctctggtacctgtcgaccttgttattgatcattcagtacaagtcgatgtggcaagatcagcaaatgctgctcaggcaaatatggagcttgagttccatcgtaacaaggaacggtttgggttcttgaaatgggggtcgtctgcattccgcaacatgcttgttgttccacctggatctggcattgtccaccaggtgaatcttgaatatctggccagggttgtgtttaacaatggtgggatcctttaccctgacagcgtcgtaggcactgactctcacacaactatgatagatggtcttggagttgctgggtggggagttggtggcatagaggcggaagctgcaatgcttggccagccaatgagcatggtcttgccaggtgttgttggctttaagttatcaggcaagctgaagaatggagttacagccacagacttggttctaacagtaactcaaatgcttcggaaacatggtgttgttgggaaatttgttgagttttatgggcaaggcatgagtgaattgtcacttgctgatcgggcgaccattgcaaatatgtctccagaatatggtgcaactatgggtttcttcccagttgatgcaaagacactggactatttgaagcttactggccgaagtgatgatacagtggccatggttgagtcctacctgcgcgcaaataagatgtttgttgatcacagccaggttgaagctgaaagagtatattcttcctatctagaacttaacctggaagaggtagaaccatgtctatcgggaccaaaacggcctcatgatcgagtgacattgaagaatatgaagtctgattggctttcttgcttggacagcgatgtgggattcaagggttttgctgtccccaaagaatcacagggcaaagttgcagaattttcgttccatggaactcctgcaaagataaaacatggtgatgttgtaattgcagcaataaccagttgcacaaacacatcaaatcctaatgtaatgctgggagctgctttggttgccaagaaggcttgtgagttaggcctggaggtaaagccatggattaagacgagtcttgcacctggttccggtgttgtgaagaagtacttggataagagtggtttgcagaaatatctcgaccagcttggcttccatattgttggctatggttgcacaacctgcattggaaattctggagagcttgatgaatccgtgtctgctgcaattactgagaatgatgttgttgctgctgctgtattgtccggaaacaggaattttgaaggacgtgtgcatcctttaaccagagcaaattaccttgcttcccctcctctagttgtggcttatgccttggctggcacggttaatattgattttgagaaagaacctattggcatctcaaaagatgggaaagaggtttacttccgggatgtttggccatccacagaagaaatagccgaggttgtcaagtcaagtgtgctcccagacatgttcaagagcacatatgagtccatcaccaaaggaaatcctatgtggaatgagctctcagtctcaacaagcactctctacccctgggatccaacatctacatacatccatgagcctccttacttcaaggatatgacaatgactcctcctggcccgcggccagtgaaggatgcatattgccttctgaactttggagacagtatcacaactgatcacatctcacctgccggaaacattcacccagacagcccagctgcaaaatatctgaaggagcgtggtgttgaaaggaaggacttcaactcatatggtagccgaagaggaaatgatgagatcatggctaggggaacctttgccaacattcgtcttgtgaataagttcttgaagggtgaggttggacccaagacaatccatgttccatctggggagaagcttgcagtttttgatgctgctatgaaatacaagaatgaagggcatgacactattatcctggctggtgccgagtacgggagtggaagctctcgggattgggctgcaaagggcccaatgctgcagggagtgaaggctgtgatagcgaagagctttgagaggattcaccgcagcaatcttgctggcatgggaatcatccctctatgcttcaaagcaggggaggatgcagacaccctgggcctaaccggccatgagcgctacacagtccaccttccaaccaacgtgagtgagataaagcctggccaagatgttactgtgacaactgataatgggaagtcattcacttgcacactcagattcgacactgaggtggagcttgcttactacgaccatggtggtattctaccatatgtcaccagaaagattgcggaacaatag

SEQ ID NO: 67111 - protein, 991 aa, Sorghum bicolor
MPPLTSSLLSRSTTGGSSARGVAAAAAISRPAADAAPSSSSPPARSTPTPRPRPSTASPFASGLAGRLFGGHRAAARSASSATAVFERRFASAATRNTYDEILTGLKRPGAGDEFGKYYSLPALSDPRIDRLPYSIRILLESAIRNCDDFQVTGNDVEKILDWEKSAPKLVEIPFKPARVLLQDFTGVPAVVDLACMRDAMSKLGSDPNKINPLVPVDLVIDHSVQVDVARSANAAQANMELEFHRNKERFGFLKWGSSAFRNMLVVPPGSGIVHQVNLEYLARVVFNNGGILYPDSVVGTDSHTTMIDGLGVAGWGVGGIEAEAAMLGQPMSMVLPGVVGFKLSGKLKNGVTATDLVLTVTQMLRKHGVVGKFVEFYGQGMSELSLADRATIANMSPEYGATMGFFPVDAKTLDYLKLTGRSDDTVAMVESYLRANKMFVDHSQVEAERVYSSYLELNLEEVEPCLSGPKRPHDRVTLKNMKSDWLSCLDSDVGFKGFAVPKESQGKVAEFSFHGTPAKIKHGDVVIAAITSCTNTSNPNVMLGAALVAKKACELGLEVKPWIKTSLAPGSGVVKKYLDKSGLQKYLDQLGFHIVGYGCTTCIGNSGELDESVSAAITENDVVAAAVLSGNRNFEGRVHPLTRANYLASPPLVVAYALAGTVNIDFEKEPIGISKDGKEVYFRDVWPSTEEIAEVVKSSVLPDMFKSTYESITKGNPMWNELSVSTSTLYPWDPTSTYIHEPPYFKDMTMTPPGPRPVKDAYCLLNFGDSITTDHISPAGNIHPDSPAAKYLKERGVERKDFNSYGSRRGNDEIMARGTFANIRLVNKFLKGEVGPKTIHVPSGEKLAVFDAAMKYKNEGHDTIILAGAEYGSGSSRDWAAKGPMLQGVKAVIAKSFERIHRSNLAGMGIIPLCFKAGEDADTLGLTGHERYTVHLPTNVSEIKPGQDVTVTTDNGKSFTCTLRFDTEVELAYYDHGGILPYVTRKIAEQ

SEQ ID NO: 67112 - DNA, 2670 bp, Yarrowia lipolytica
  CDS (321)..(2564)
  misc_feature (205)..(205): y is t or c
  misc_feature (220)..(220): r is g or a
  misc_feature (422)..(422): k is g or t
  misc_feature (471)..(471): y is t or c
ttagccgaggtattcgacagggaggaaaaacgacaacgaaaggaccgacagataccaaagcaacccaatcaccacctcaatcaatgatccccgcccgcgggaatgcggaaaaggcttctgcgacattacaacaaagccaactctgttgatttgttgtttgcgacattggctttgtgccggtcccaaaattacctcgaccaaccayacggcggcaattgargacaatgcaaattaaatagcacatactaacccagccccgccttgcacgatctctcgcgactaccactaatgcctccctcaacttggactccaaggtccgaatgaacaactgggaggccaacaacttcctcaacttcaagaagcacaccgagaacgtccagattgtcaaggagcgactcaaccgacccctgacctacgctgakaagattctctacggccatctcgacaagccccatgagcaggagattgtcygaggtcagtcctacctcaagctgcgacccgatcgagccgcctgccaggatgccaccgcccagatggccattctgcagttcatgtctgccggtatccccaccgtccagacccccaccaccgtccactgtgaccatcttatccaggcccaggttggtggtgagcaggatcttgctcgagccatcgacatcaacaaggaggtctacaacttccttggcaccgcctccgccaagtacgacattggtttctggaaggccggatccggtattatccaccagatcattctcgagaactacgccttccccggtgcccttctcattggttccgactctcatacccccaacgccggtggtctcggtatgctcgccatcggtgtcggtggtgccgatgtcgtcgacgtcatggccggtctcccctgggagcttaaggcccccaagattatcggtgtcaagctgaccggtaagctctctggctggacctcccccaaggatattatcctgaaggtcgctggtatcctcaccgtcaagggtggaaccggtgctatcgtcgagtacttcggtgatggtgtcgataacctgtcctgcactggtatgggaaccgtctgtaacatgggtgccgagattggtgctaccacctccaccttccccttcaacgagcgaatggccgactaccttaacgccactggccgaaaggagattgccgactttgctcgactttacaaccacttcctctctgccgatgagggttgtgagtacgatcagctcatcgagattgacctgaacacccttgagccttacgtcaacggtcccttcactcccgatcttgccacccccatctccaagctcaaggatgtcgccgtcgagaacggatggccccttgaggtcaaggtcggtcttatcggctcttgcaccaactcctcttacgaggatatggagcgatccgcctccattgccaaggacgccatggcccacggtcttaagtccaagtccatctacaccgtcacccccggttccgagcagatccgagccaccattgagcgagatggtcagctccagaccttcctcgacttcggtggtatcgtccttgctaacgcttgtggcccctgcattggtcagtgggaccgacgagacatcaagaagggtgagaagaacaccattgtctcttcttacaaccgaaacttcactggccgaaacgattctaaccctgccacccacgctttcgtcacctctcccgatctcgtcaccgctttcgccattgctggtgacctccgattcaaccctctcactgactccctgaaggattctgagggtaaggagttcaagctcaaggagcccactggaaagggtctgcccgaccgaggttacgaccccggcatggacacctaccaggctccccccgccgaccgatctgccgtcgaggttgatgtttcccccacttccgaccgactccagatcctcaagcccttcaagccttgggacggcaaggacggtattgacatgcccatcctcatcaagtctcttggtaagaccaccactgaccatatctctcaggccggtccctggcttaagtaccgaggccatctccagaacatctccaacaactacatgattggagccatcaacgctgagaacgaggaggccaacaacgtccgaaaccagatcactggcgagtggggaggagttcccgagactgccattgcttaccgagacaacggtatccgatgggttgttgtcggaggtgataacttcggtgagggttcttctcgagagcacgctgctcttgagccccgattcctcggtggtttcgccatcatcaccaagccttttgcccgaattcacgagactaacctgaagaagcagggtctcctgccccttaacttcgtcaacggtgctgactacgacaagatccagccctccgataagatctccattcttggtcttaaggaccttgcccccggcaagaacgtcaccattgaggttacccccaaggacggtgccaagtggaccaccgaggtttctcacacctacaactctgagcagctcgagtggttcaagtacggctctgccctcaacaagatggctgcctccaagaaataagtgtcttgtgtataaggctatctgaaaattttaatactatgatttgaaatgaaatgagacaagtgtagacgcgagaagaacgcgattgtgatattgattgtgatcc

SEQ ID NO: 67113 - protein, 747 aa, Yarrowia lipolytica
  misc_feature (34)..(34): The Xaa at location 34 stands for Asp, or Glu.
  misc_feature (51)..(51): The Xaa at location 51 stands for Stop, or Arg.
MNNWEANNFLNFKKHTENVQIVKERLNRPLTYAXKILYGHLDKPHEQEIVXGQSYLKLRPDRAACQDATAQMAILQFMSAGIPTVQTPTTVHCDHLIQAQVGGEQDLARAIDINKEVYNFLGTASAKYDIGFWKAGSGIIHQIILENYAFPGALLIGSDSHTPNAGGLGMLAIGVGGADVVDVMAGLPWELKAPKIIGVKLTGKLSGWTSPKDIILKVAGILTVKGGTGAIVEYFGDGVDNLSCTGMGTVCNMGAEIGATTSTFPFNERMADYLNATGRKEIADFARLYNHFLSADEGCEYDQLIEIDLNTLEPYVNGPFTPDLATPISKLKDVAVENGWPLEVKVGLIGSCTNSSYEDMERSASIAKDAMAHGLKSKSIYTVTPGSEQIRATIERDGQLQTFLDFGGIVLANACGPCIGQWDRRDIKKGEKNTIVSSYNRNFTGRNDSNPATHAFVTSPDLVTAFAIAGDLRFNPLTDSLKDSEGKEFKLKEPTGKGLPDRGYDPGMDTYQAPPADRSAVEVDVSPTSDRLQILKPFKPWDGKDGIDMPILIKSLGKTTTDHISQAGPWLKYRGHLQNISNNYMIGAINAENEEANNVRNQITGEWGGVPETAIAYRDNGIRWVVVGGDNFGEGSSREHAALEPRFLGGFAIITKPFARIHETNLKKQGLLPLNFVNGADYDKIQPSDKISILGLKDLAPGKNVTIEVTPKDGAKWTTEVSHTYNSEQLEWFKYGSALNKMAASKK

SEQ ID NO: 67114 - DNA, 2340 bp, Aspergillus oryzae
  CDS (1)..(2340)
atgatctccacaaggctcgcgcgcatgggtgcgctgtttctcggggcccggggtctggccactgccagcgaacaccctctcgacaagaaggtcgagatgtccaatgttgaaaagggcaactacatcaactacaagaagatgtctgagaacttggaaatcgttcgcaagcgtctgagccgtcctcttacgtacgccgagaagatcctctactctcaccttgacaaccctcatgagcaggatatcgagcgtggtgtttcctacctgaagctccgccccgaccgtgttgcttgccaggatgccaccgcccagatggccatccttcagttcatgtcggctggcatgccttccgtcgctacccctaccaccgtccactgtgaccacttgattgaggctcaggttggaggtgaaaaggatttggctcgtgccaatgagatcaacaaggaggtctacgactttcttgcctccgctactgccaagtacaacattggtttctggaagcctggctccggtatcatccaccagatcgttctggagaattacgctttccccggtggtctgatgatcggtaccgactctcacactcctaacggcggtggtctcggtatggctgccattggtgtcggtggtgctgatgccgtcgatgtgatggctggtctcccctgggaacttaaggctcctaaggtcattggtgtcaagctcactggtgagctgtccggatggaccactcctaaggatatcatccttaaggtcgctggcctcctcactgtcaagggtggtactggtgctatcgttgagtaccacggacctggtgtcaactctctttcttgcactggtatgggtaccatctgtaacatgggtgctgaaattggtgctactacctctcttttcccctacaatgaccgcatgtacgactacctgaaggccactaagcgtcagcacattggcgacttcgccaggtcctaccagaaggagcttcgcgaagatgagggtgccgagtatgaccagctgattgagatcaacctgtctgagctggagcctcacatcaacggtcccttcactcccgatcttgctacccccatctccaagttcaaggaggctgtcgaggccaacaagtggcctgaggagctcaaggtcggtcttatcggctcttgcaccaactcctcctatgaggacatgtcccgtgccgcctctatcgcccgggatgccctcgatcacggcttgaagtccaagtctctcttcaccattacccctggttctgagcagattcgcgctactatcgagcgtgacggtcagctgcagaccctcgaggagtacggtggtgtcatccttgccaacgcttgcggtccttgcattggacagtgggaccgtaaggatgtcaagaagggcgaggccaactccatcatctcctcctacaaccgtaacttcactggccgtaacgacgccaaccccgccactcactccttcgtcacctcccccgaccttgttgttgccatgactgttgccggtaccctcaagttcaaccctctcaccgataccctgaaggacaaggatggcaaggagttcaagctcaagcctcccaccggcgagggtctccccgctaagggctacgaccccggccgtaacacctaccaggcccctcctgtcgaccgttccactgtcaacgtcgctgtctcccctaccagtgaccgtctccaggtcctccagggattccaggcctgggatggcaaggatgccactaacatccctatcctcatcaagtgccagggcaagaccaccactgaccacatctccatggctggcccatggttgaagtaccgtggccatcttgacaacatctccaacaacatgctcattggtgccgtcaacgccgagaacggtgaggctaacaaggtcaagaacgctttcactggtgaatacgacgctgtccctgctactgcccgtgactacaaggctcgtggcgtcaagtgggttgtcattggtgactggaactacggtgagggtagctctcgtgagcacgctgctctggagcctagacaccttggtggtcttgctatcatcactcgcagcttcgcccgtatccacgagaccaaccttaagaagcagggtatgcttcccctgaccttcgctgagcctgccgactatgacaagatccagcccgacgacaaggttgacctgctctgcaccgagctcgaggtcggcaagcccatgactctccgcgtccaccccaaggatggcaagaccttcgacatcaagctcaaccacaccttcaacgagtcccagatcgagtggttcaaggacggttctgccctcaacaccatggcccgcaagggtggcaactaa

SEQ ID NO: 67115 - protein, 779 aa, Aspergillus oryzae
MISTRLARMGALFLGARGLATASEHPLDKKVEMSNVEKGNYINYKKMSENLEIVRKRLSRPLTYAEKILYSHLDNPHEQDIERGVSYLKLRPDRVACQDATAQMAILQFMSAGMPSVATPTTVHCDHLIEAQVGGEKDLARANEINKEVYDFLASATAKYNIGFWKPGSGIIHQIVLENYAFPGGLMIGTDSHTPNGGGLGMAAIGVGGADAVDVMAGLPWELKAPKVIGVKLTGELSGWTTPKDIILKVAGLLTVKGGTGAIVEYHGPGVNSLSCTGMGTICNMGAEIGATTSLFPYNDRMYDYLKATKRQHIGDFARSYQKELREDEGAEYDQLIEINLSELEPHINGPFTPDLATPISKFKEAVEANKWPEELKVGLIGSCTNSSYEDMSRAASIARDALDHGLKSKSLFTITPGSEQIRATIERDGQLQTLEEYGGVILANACGPCIGQWDRKDVKKGEANSIISSYNRNFTGRNDANPATHSFVTSPDLVVAMTVAGTLKFNPLTDTLKDKDGKEFKLKPPTGEGLPAKGYDPGRNTYQAPPVDRSTVNVAVSPTSDRLQVLQGFQAWDGKDATNIPILIKCQGKTTTDHISMAGPWLKYRGHLDNISNNMLIGAVNAENGEANKVKNAFTGEYDAVPATARDYKARGVKWVVIGDWNYGEGSSREHAALEPRHLGGLAIITRSFARIHETNLKKQGMLPLTFAEPADYDKIQPDDKVDLLCTELEVGKPMTLRVHPKDGKTFDIKLNHTFNESQIEWFKDGSALNTMARKGGN

SEQ ID NO: 67116 - DNA, 2349 bp, Aspergillus oryzae
  CDS (1)..(2349)
atgggcagcgtatcctccatattacagacgaaaggtccagcgcatagttttgcatctgtgacagactgtcagaaaaatagcatctccaatataaggagcactcagcaagatgatatatcatcaatagtcttctcacctatagaatcgagctggattatccctcataagcttttcccagacttcttcactacccacccagtctctcaaattttgcagaatcccaagattatcaatcgaacgaaacccttcttttacattgatgtccggattcttcaagcgagccgcaccatctcccaatcatatagagctcaaatggctctcatccagtttatgtctgcaggacttgaatctactgcggttccaacaacagtgcattgtgaccatctgatcgttagtcgggatggcgagactgaggatcttccccgggctctcgaagctcaccaagaggtgtacgacttcatggaaagtgcctgtcaaagatataatatgggcttctggaagccgggcgctggaatcattcatcagaatgtgctcgaaaactacgctttccccggtggcatgatggttgggactgattctcataccccaaatgcgggaggtataggtatgattgccatcggagttggtggcgctgatgctgtggatgttatggctggtttaccgttggagttaatagcacctcgtgtccttggtgttaaattgaccggagaactcactaaatgggcatctcctaaagatgtgatcaataagctcgccagtctgatatctgtcaagggagggactggatccattgtcgaatactttgggtcaggcacgaagggactctcggcgactggaatggccacaatctgtaatatgggggctgagacgggtgctaccacgtccatcttcccttactctccccagatggcagcgtatcttcgtgcaaacaacagaccagacatggctcaagcggtcgagacagtctcccatgaactgcgtgctgaccatggggcagagtacgatcgcgtgattgagattgacttgtcaaccttggaaccacaaattaatggacccttcactccagatcttgctactccattgtctaagtttcactcggctgtgaaagagaatgcgtggccaaagctcacggcgggtctgatcggatcgtgtaccaactcgtcatttgaagatatgacacgcgctgctagtgttgctcaacaagcattggatgctggtctcaaaccgaaggtgcctctactggtgtctcccggtagcttgcagactcgacggacactcgaaaacgccgggattgtcgacgttctcgaaaaggttggggctacgatgctgaccaatgcctgtggtccctgctgtggctcttgggaccgtactgacatgccaaaagggacacccaactccatcatcacctcatacaatcgtaacttttccggtcgattagattctaacccagcaacccatgtattcctttcatccccagaagttgtcatgggcaagatcttctccgacgatctttctttcgaccccaacgtggacagtctgacgactccctcaggagaggaattccgcttcactccccctgttggccagtcactccccagtcggggatacgaagattcagattctgcatacttagccccccctacagatgaccgcagtcatatacaagttcaaatttctccttcttctcaacgtctacagaagctcgccccattcaagccttggtccgggaatgatttcgaggactgcctcattctcatcaaaaccaagggcaagtgcaccaccgaccacatcactcctgcaggcccctggttccgctttcggggccacctcgagaacatctccaacaacaccttgatcggcgcagtcaacgcggaaaccgagcaagtcaatcagatccgcaatcgcttgacaggtgaagatggcggcgtgcccgacacggcccgcgactaccaagccaaaggtcgcccttgggtggtgattgccgaccataactacggggagggttcctcccgtgaacatgctgccctccagcctcgctaccttggaggcgtagctatcatcgccaagagcttcgctcgtattcatgaggccaatctgaaaaagcaaggcatgctgccactgactttcacaaatgaggcggactatgaccgcatccgctcttcggatcttgttagtatcaaaggtctggccgccctggctcctggccaaccgctcactctcttggtaactcccacggaatcatcgagtgagccctggcaggcggaggtttctcattcgtttacccatgagcagatcgagtactttaaggctggcagtgcactcaatctgatgtccaggcacctttcctag

SEQ ID NO: 67117 - protein, 782 aa, Aspergillus oryzae
MGSVSSILQTKGPAHSFASVTDCQKNSISNIRSTQQDDISSIVFSPIESSWIIPHKLFPDFFTTHPVSQILQNPKIINRTKPFFYIDVRILQASRTISQSYRAQMALIQFMSAGLESTAVPTTVHCDHLIVSRDGETEDLPRALEAHQEVYDFMESACQRYNMGFWKPGAGIIHQNVLENYAFPGGMMVGTDSHTPNAGGIGMIAIGVGGADAVDVMAGLPLELIAPRVLGVKLTGELTKWASPKDVINKLASLISVKGGTGSIVEYFGSGTKGLSATGMATICNMGAETGATTSIFPYSPQMAAYLRANNRPDMAQAVETVSHELRADHGAEYDRVIEIDLSTLEPQINGPFTPDLATPLSKFHSAVKENAWPKLTAGLIGSCTNSSFEDMTRAASVAQQALDAGLKPKVPLLVSPGSLQTRRTLENAGIVDVLEKVGATMLTNACGPCCGSWDRTDMPKGTPNSIITSYNRNFSGRLDSNPATHVFLSSPEVVMGKIFSDDLSFDPNVDSLTTPSGEEFRFTPPVGQSLPSRGYEDSDSAYLAPPTDDRSHIQVQISPSSQRLQKLAPFKPWSGNDFEDCLILIKTKGKCTTDHITPAGPWFRFRGHLENISNNTLIGAVNAETEQVNQIRNRLTGEDGGVPDTARDYQAKGRPWVVIADHNYGEGSSREHAALQPRYLGGVAIIAKSFARIHEANLKKQGMLPLTFTNEADYDRIRSSDLVSIKGLAALAPGQPLTLLVTPTESSSEPWQAEVSHSFTHEQIEYFKAGSALNLMSRHLS

SEQ ID NO: 67118 - DNA, 2421 bp, Aspergillus oryzae
  CDS (1)..(2421)
atggttaacacacagatgggagtacccgttcttgactaccatcatgctgttgtaataactcaatcccggtgtgtaattgatgtttcgtatactgacgtaggcttcgtgctgacttttgttggaccccagctgtttggtgtcaactatggcgagcaacttagcaacctagacacagtacggcaaagctcaaggcgccctctgacattgaccgagaagctgctgtacagccacttgatcccgagcgatgacaaagtatggtcattgcaggaaatcgaccgggggaagacgatcttggaattgcgaccggaccgcgttgcctgtcatgatgctaccgcgaccatggccctcctacagtttatcagtgcgggcctaccgcgagtcgcagtcccaacgacggtccatggtgaccacctcatagtttcagagaagggagcagagccagacatgaagcgtgcgcttacagaacatgccgaggtctatgaattcctgagcagcgcctctagaaagtatggaatcgggttttggaagcccggttcagggattatccatacagtgatttttgaaaaccacgccgttcctggcggcctgatcatcggtacggattctcacacgccgaatgctggtggcttggctatgatgggtattggcgttggcggttcggacgcagttgatgcaatgtcaggaatgccatgggaattagtcacgcctcagatagtcggggtgcgcctgacaggccaactatccggatgggcatccacaaaggacatcatctgcaagctcgccggcatcctgacagtttctggaggcaagggtcgcgtcattgagtttttcggtcccggcacggaaactctgggggccacggccatggcgacgatctgtaacatgtctgcagagattggctcgacttcctgtatattcccctacaccaccgcgatggggcggtaccttacagcgacgaggcgggcgcatgtagctcaggcggcacagggggtacaacaggcattgctgcaagccgatgaaggatcagataaatactatgaccaagttattgagattgacctcagcacgcttgaaccacacgtcaatgggccgtacacacccgatcttgcccaccccatatccgagttagggaaagcagtctcccagagtgaatggcctattaacctcagtcatgcgatggtaggaagctgtaccaacagctcctatgaagatcttgacaagacgcgtcagctcgtcgcgcaagcacgtgacgctgggttgccccgattcaaaacacccttccttgtcgcacctggcagcgagcaaatacgcgccacggctgaagaagacggtatactcaaagaattgcaagaagccggtgctgttgtgctgagcagctcttgtgggccatgcgttggttcgtgggatcgcaaggatgttgatgtacgtggcaaggaaaagaactcggtcgtatctagcttcaaccggaatttcgtgggccgacatgatagcaacccagcgactcactcatttgttacatctcctgagttggttaccgcgtttgcttacgctggtcgccttgacttcaacccgttaacggatagtattcctgtggagtctgttgagggagggaagtcctttctattcaaagcccctgtgagccgggagcttccagcgcatttcgctactggtgaagatacttttcaggagcccccaagcgacggttcatcattgtctgtaattatcgatccgcagtccgaccgcctgcaactcttaaccccgtttgcaccatggcagtccgggtgtgccactaacatggaactgctcatgaaagtcaagggcaagtgcaccacggatcacatctctccggcaggcccatggtataaataccggggtcacctagagaacattagcaacaacatgctcaccaccgcaagaaatgcattcctccctggcaatgatccgcagatgctcggccacactcgcaaccccattacctcaggcgtcgaggttgttcctcaggtggcccgtgacctccaagggcgcggcatccggtggtgcatcatcggcgacttcaactacggtgaaggaagctcacgtgaacacgctgccttggaacctcgttatctcggaggggtggccgtcattgctcgctcctttgcgcggatacacgaaactaacctgaagaagcaagggatgctacctcttacatttgatgatcctttagactatgatcggatcctggaaggcgatcgcattacattgactggagtcgaggatggtgaattggctcccggtcgacaggttaccatgcgtgtcactcctcggcagggagcatcttggaccgcgcagttgaaccacagctatcatgccggtcagttgcactggctgcgtgctggcagtgcgttgaaccacatcaagaatactgccctcgcgaagtag

SEQ ID NO: 67119 - protein, 806 aa, Aspergillus oryzae
MVNTQMGVPVLDYHHAVVITQSRCVIDVSYTDVGFVLTFVGPQLFGVNYGEQLSNLDTVRQSSRRPLTLTEKLLYSHLIPSDDKVWSLQEIDRGKTILELRPDRVACHDATATMALLQFISAGLPRVAVPTTVHGDHLIVSEKGAEPDMKRALTEHAEVYEFLSSASRKYGIGFWKPGSGIIHTVIFENHAVPGGLIIGTDSHTPNAGGLAMMGIGVGGSDAVDAMSGMPWELVTPQIVGVRLTGQLSGWASTKDIICKLAGILTVSGGKGRVIEFFGPGTETLGATAMATICNMSAEIGSTSCIFPYTTAMGRYLTATRRAHVAQAAQGVQQALLQADEGSDKYYDQVIEIDLSTLEPHVNGPYTPDLAHPISELGKAVSQSEWPINLSHAMVGSCTNSSYEDLDKTRQLVAQARDAGLPRFKTPFLVAPGSEQIRATAEEDGILKELQEAGAVVLSSSCGPCVGSWDRKDVDVRGKEKNSVVSSFNRNFVGRHDSNPATHSFVTSPELVTAFAYAGRLDFNPLTDSIPVESVEGGKSFLFKAPVSRELPAHFATGEDTFQEPPSDGSSLSVIIDPQSDRLQLLTPFAPWQSGCATNMELLMKVKGKCTTDHISPAGPWYKYRGHLENISNNMLTTARNAFLPGNDPQMLGHTRNPITSGVEVVPQVARDLQGRGIRWCIIGDFNYGEGSSREHAALEPRYLGGVAVIARSFARIHETNLKKQGMLPLTFDDPLDYDRILEGDRITLTGVEDGELAPGRQVTMRVTPRQGASWTAQLNHSYHAGQLHWLRAGSALNHIKNTALAK

SEQ ID NO: 67120 - DNA, 2313 bp, Cryptococcus neoformans
  CDS (1)..(2313)
atgttgcgactcatacgaagtcatcggccattacaacgacgagggctggccactatcaattcgagggtccaaggcagtccgctcgaacctagcacattcattgactatgagagagtatcgcagcagattgcacaagtgcggaagagacatgggaagcctctaacgcttgccgaaaagatcctatacggacatctcgaagatccaaacgcgcaagagctcaagcgtggttcctcgcagctcagactgagaccaaaacgtgtagctcttcatgatgccaatgcccaaatggctttgctgcagtacatgaccactggtatttccagagtccgtgtacctacatctgttcacaccgaccatctgatcatcgcccgcgaaggagcggggccagacatggaccgcgccatcgccgcgaacaaggaagtgtatgatttcttgcagacggcttgtgccaagtacgggattgctttctggaagcctggagcgggcatccttcaccaagtgattttcgagcaatacgcctaccccggaggtctcatgattggctccgactcccacactcccaatgctgcaggacttggtatgctaggtattggtgtaggcggtatggaggcagtcgacgtgatggccggtttggcttatgaggtgaaacatcccaatattattggtgtcaatctcactggcaagcttgggccatggtcaacaacgaaggatattattctaaaattggcatctatcttgacagtccgcggtggcacgggctcgatcattgaatattttgggcccggtgctcacagtctttcggctacgggtatgggtaccgtcggaaacatgggcgcagaagttggagctacgtgtagcgtcttcccattcaaccaagggatggccgattatctggagttgactggacgatctacaactgcgaggacagcagaggactatagggacgacttgaaggcggatgaaggagcagtatatgaccaattgattgatatcaatttgtccgaactcgaaccccacatcaatggtcctttcactcccgatctctcctggccaatttctggcatgggtgaagccgttaaaagtaccgactggccaacaaatatcagtgcagctctcatcggatcctgcaccaactcttcttacgaagacttatcccgagccgcttctattgctaagcaggctacagaggcgggcctaaaagcgaaaacggatttttttatcagtccagggtctgaggaaattcgatccactgtttcaagagatggtgttttggaggagctacagaaggctggaggaatggtcttggcaaatgcgtgcggggcttgtgtcggtcaatgggagaggccgtcgatgaagaagggcatgaagaacacgatcgtctcttcattcaaccgcaactttgtcggtcggcaggatggcaatccgggaacacactcttttgttgctagcccagagctcgtgaccgcgatggctttctccgggaatttaaatttcaaccctatgaaggacaatattcagcttcccgacggcacccacttccgttttactcctcctcaagggcctgctctccctgagaagggttacgagcgcactttgcaattctatgatgagccgcctgtggacggatcgagcgttgatctggctgtagatccaaattctagcaggattcagcttatcaagccgtttgaggcatggagtggaaagggtgagcaagacttgaccatgttgatcaaagtgagaggaaagtgcacaacggaccatatttccgctgctgggccttggtacaaatacagggggcatctacagaacatctctcaaaatcttttgatcggcgcaatcaatgatgagaatggcaaacccaattgtatacgaaacgtagatacaggagaatttgggaccgtccccgctaccgccgagtactaccgtgatactaaccggaaatgggccatcttggcgggcgataactatggggaaggctcatctcgagaagctgccgctttatcgcctcgatacatgggtggctttgctgttattgctcgctcaatggctcgtatacacgagacaaacttgaaaaagcaaggtctcttgccccttttcttccgtgacccggccgattatgacaaaattttgccaggcgcgcagctcaggttgactaacctgcaagctttggcccctggaagccccgtttacctcacctatacgaacgcaggacaagaacacattcagattgaactcttccactccttaactgaccgtcagatcacatggttcaaggctggttcagctctgaatactctccgtcccaaagactga

SEQ ID NO: 67121 - protein, 770 aa, Cryptococcus neoformans
MLRLIRSHRPLQRRGLATINSRVQGSPLEPSTFIDYERVSQQIAQVRKRHGKPLTLAEKILYGHLEDPNAQELKRGSSQLRLRPKRVALHDANAQMALLQYMTTGISRVRVPTSVHTDHLIIAREGAGPDMDRAIAANKEVYDFLQTACAKYGIAFWKPGAGILHQVIFEQYAYPGGLMIGSDSHTPNAAGLGMLGIGVGGMEAVDVMAGLAYEVKHPNIIGVNLTGKLGPWSTTKDIILKLASILTVRGGTGSIIEYFGPGAHSLSATGMGTVGNMGAEVGATCSVFPFNQGMADYLELTGRSTTARTAEDYRDDLKADEGAVYDQLIDINLSELEPHINGPFTPDLSWPISGMGEAVKSTDWPTNISAALIGSCTNSSYEDLSRAASIAKQATEAGLKAKTDFFISPGSEEIRSTVSRDGVLEELQKAGGMVLANACGACVGQWERPSMKKGMKNTIVSSFNRNFVGRQDGNPGTHSFVASPELVTAMAFSGNLNFNPMKDNIQLPDGTHFRFTPPQGPALPEKGYERTLQFYDEPPVDGSSVDLAVDPNSSRIQLIKPFEAWSGKGEQDLTMLIKVRGKCTTDHISAAGPWYKYRGHLQNISQNLLIGAINDENGKPNCIRNVDTGEFGTVPATAEYYRDTNRKWAILAGDNYGEGSSREAAALSPRYMGGFAVIARSMARIHETNLKKQGLLPLFFRDPADYDKILPGAQLRLTNLQALAPGSPVYLTYTNAGQEHIQIELFHSLTDRQITWFKAGSALNTLRPKD

SEQ ID NO: 67122 - DNA, 1938 bp, Thiobacillus thiooxidans
  CDS (1)..(1938): transl_table=11
atggctatgaacgtcacccagaaaattattgccgcgcacttggtgagtggcaccctcaaggcggggagtccgatagctatccgtattgatcagacgctcacccaggatgccaccggaaccatggcctatttgcagtttgaggcgttgggtctgcctcgggtacgcactgaactgtctgtttcctatgtcgatcataatatgctgcagtccggctttgaaaatgcggacgatcaccggtttctgcagagctttgccgcgaaatacggagtccatttcagtcggccgggcaatggtatttgtcatcaggtacatctcgaacggttttccaagccgggtggtaccttgttgggttcggattcccatacgccgacttctggcggtgccggaatgctggctattggcgcgggcggactggacattgccctggccatgggtggtttgcccttcaacctgaatatgccggaagtggtgggtgtcaaactgacggggaaattgcaaccctttgtcagtgccaaggacatcattcttgaagtattgcggctgaaaaccgtcaaaggcggggtgggcaaggtgtttgagtatttcggcccgggggtcgctcatttgagtgttcctgcgcgcgcgaccatcaccaacatgggggcggaactgggggctaccaccagtgttttccccagtgatagcgtgacccgggactatcttgctgcccaggggcgtggagcgacctggtccgagtgggtggctgatgcggatgcgagttacgacgaagtgctcgaaatcaatctggatacgctggagcccctgattgcctgtccgcatagcccggataatgtcaaaaaagtgcgggaagtggccggaaccaaggtggcccaggtagccatcggttcctgtaccaattcctcctacaccgacctgatgaccgttgcgcagatgctcaagggcaaggtggttgcggatggggtcagtctgggggtttctccgggttcccgtcaggtcatggaaatggtcaccaaggatggcgggttgctggactttattggtgccggatcacgtattctggaatctgcctgtggaccctgcatcgggatgggttttgcgccacccacccagggggtttccgtacgctccttcaatcgtaatttctacgggcgttccggcaccaaaaatgccgaggtttatctggcgagtccggaaacctgtgcggcctgcgctctgactggagagattactgatccccgcgatttgggcctggcacctattcacgtcgatttgccaggacagttcctggtggatgatcgcatggtgctggcccctgcgcctgagggcacggaggttgaaattattcgcggtccgaatattgccaagttaccggcaggtaaggccgcgcccgcgcatctggcaggcgaggtgctgattcgtctcgaagacgatatcacgaccgatcatattatgccggcgggggccaaggtgctgccgttgcgctccaatctgcccgcaatctccgaatttgtttttcatatggtggatgaaactttcccgagtcgggccaaggcatccggcggcggttttattgtggcgggtcataattatggtcaggggtcgagccgcgaacatgctgctttggcaccgcgctatctgggcgttcggggggtgttggtacagtcttttgcccggattcatctcgccaatctgattaatttcgggatattgccgctcacttttgtgcatgctgaagattacgccaaggtgcaggcgggtgatcagctgggcctcgatctgtcgggcctgactctggggaaatccctgatgttgcgcgatgagacgcagggtctggatattgaagcgatgccgcaacttgccagcgcccgtgatctggaattgattttgaagggtggggccttgtcctgggcgagcgaacaactggagcaggtgtcatga

SEQ ID NO: 67123 - protein, 645 aa, Thiobacillus thiooxidans
MAMNVTQKIIAAHLVSGTLKAGSPIAIRIDQTLTQDATGTMAYLQFEALGLPRVRTELSVSYVDHNMLQSGFENADDHRFLQSFAAKYGVHFSRPGNGICHQVHLERFSKPGGTLLGSDSHTPTSGGAGMLAIGAGGLDIALAMGGLPFNLNMPEVVGVKLTGKLQPFVSAKDIILEVLRLKTVKGGVGKVFEYFGPGVAHLSVPARATITNMGAELGATTSVFPSDSVTRDYLAAQGRGATWSEWVADADASYDEVLEINLDTLEPLIACPHSPDNVKKVREVAGTKVAQVAIGSCTNSSYTDLMTVAQMLKGKVVADGVSLGVSPGSRQVMEMVTKDGGLLDFIGAGSRILESACGPCIGMGFAPPTQGVSVRSFNRNFYGRSGTKNAEVYLASPETCAACALTGEITDPRDLGLAPIHVDLPGQFLVDDRMVLAPAPEGTEVEIIRGPNIAKLPAGKAAPAHLAGEVLIRLEDDITTDHIMPAGAKVLPLRSNLPAISEFVFHMVDETFPSRAKASGGGFIVAGHNYGQGSSREHAALAPRYLGVRGVLVQSFARIHLANLINFGILPLTFVHAEDYAKVQAGDQLGLDLSGLTLGKSLMLRDETQGLDIEAMPQLASARDLELILKGGALSWASEQLEQVS

SEQ ID NO: 67124 - DNA, 2640 bp, Thermoproteus tenax
  CDS (1)..(2640): transl_table=11
atgccttatgtaaaggcagaggcgaagctctcagtaggcccccgcacctataagatctacaagctgagggctctggaggccgagggatatgacgtatctagactgccttacagcataagggtgcttctggagaacgtgctccgcaactacgacggaagagatatcgcccaagagcatatcgatgcgctggctaggtggaaccccaagtcgccggagggagaggtggcgctgaaggtgacgagggtcgttatgcaagactacacaggggttccagccgtagtggacttggccactatgagggagatagccgctaaatcggggcgggaccccagtgtagtcaaccccagagtccccgtggaccttatcatagaccactcagtccaagtggaccactgggcatccccccaggccctctctttgaacatccggctcgagatagagaggaatagagagaggtatgtcttcctgaagtgggcccagagcgccttcaagaacctccgggtattcccgccgggcaccggcataatacaccaggtaaacttggagtatttggccagagtggtgtggactgagggcgatacggccttcttcgagactctcgtggggatggacagccacactacgatgataaacggcctcggtgtcgtggggtggggagtagggggcgtagaggccgaggcagcgatgctcggagagcccataaccataagagtgccgagggtggtgggagtgaggctctacggcgagccgcgccccggcgtcactgcaaccgatatagtcctggcggtgaccgaggcgttgaggaaggtgaacgtagtggacgcgttcgtagagttcttcggcgagggagtaaggaagctctcggtgccggacagagccacgatagccaacatggcgcccgagtatggatccacggtggggctgttccccgtcgacggcaacactctggactatctgtctgccaccggaaggcctgaggagttgatagccttggtcaagaaatactacgaggagcagggcgtgttcagaggagttgaggacgccgagtacagccaggtggtggacttcgatttgtctgcagtggagccgtccgccgccggtcccaccctcccgtggcaaaggaggtcgctccaagacgtccccaaaagcttcgtcgagttcctggcacagaggaagaagagggacaagaggaaggccgtagagatagagatcggagggaggagaacggagttcggagacggcgatgtggccatagcggctataacgagctgcaccaacacgtcaaatccctatcttttggtcgcggcggggctagtggcgaagaaggccgtggaggccggcttgtctgtgccgccgtacgtcaagacgagcttcgcgcccggctcccgcgccgtggaggagatcctgaggagggcaggcttgatgccatatttagagaagctgggcttccacgtagttgcctacgggtgcaccacgtgtatagggaactcaggccctctgccgcagcccgtctccaaggccataaaggagtacgacataatggcagccgcagtgttgtcgggcaaccgcaacttcgagggcagagtacacccggagataagagccgcctacctcgcctcgcctcctctcgtggtggcctatgccctggccggatcggtgttgagggatctatcgagggagcccctcggcgtagggaaagagggcaagcccgtctatctgaaggacgtctggcccagcccagaggaggtcaacgaagtcgtggcgagggccatggatcccaagatctatacagagaagtattcaaagataggcgagctagtccccgagtggagcgagctgaaggctccatcggggaacctctatcagtggagatccgacgacacctatatacagccatcgccgttgttcgaggggaggccgaccaccggcgacatcatcaacgcaaggccgttgttgatcttaggcgacagcatcaccacagaccacatctcgcccgccggctccatcccgccggacagccctgcggggaagtacttggccgagagaggggtgcaacagagggacttcaatacgttcggcgccaggaggggcaattgggaggttatggtcagaggcactttctggagcaagggctatatcaacaaaatcgagggcggcctcgaggggggatacactataaagtacccagaggggctcaagactacagtgtatgaggccgccatgatgtacaagagggagggcgtgcccgtggtcatcgttgccggcaaaacctatggcgccggctccagcagagattgggcggccaaggggccgaagctcttgggagtcaaggccgtgatagcagagagctttgaaagaatacacaggtctaatttgacgatggtgggaattgtgcctatacagctgccccaaggcgtgaccgtggacagcctaaacctcaagggccccgagaccatcgacataataggactggagaatctggctccggggaaggagctaacgttgaggatacacaggccagacggcagaaccgacgagctgagggccaaggccgctgtctatacgtgggctgaggtcgagtatataaagcacggcggaattctgccgtatgtgttaaggaaattactcgaaaagagttga

SEQ ID NO: 67125 - protein, 879 aa, Thermoproteus tenax
MPYVKAEAKLSVGPRTYKIYKLRALEAEGYDVSRLPYSIRVLLENVLRNYDGRDIAQEHIDALARWNPKSPEGEVALKVTRVVMQDYTGVPAVVDLATMREIAAKSGRDPSVVNPRVPVDLIIDHSVQVDHWASPQALSLNIRLEIERNRERYVFLKWAQSAFKNLRVFPPGTGIIHQVNLEYLARVVWTEGDTAFFETLVGMDSHTTMINGLGVVGWGVGGVEAEAAMLGEPITIRVPRVVGVRLYGEPRPGVTATDIVLAVTEALRKVNVVDAFVEFFGEGVRKLSVPDRATIANMAPEYGSTVGLFPVDGNTLDYLSATGRPEELIALVKKYYEEQGVFRGVEDAEYSQVVDFDLSAVEPSAAGPTLPWQRRSLQDVPKSFVEFLAQRKKRDKRKAVEIEIGGRRTEFGDGDVAIAAITSCTNTSNPYLLVAAGLVAKKAVEAGLSVPPYVKTSFAPGSRAVEEILRRAGLMPYLEKLGFHVVAYGCTTCIGNSGPLPQPVSKAIKEYDIMAAAVLSGNRNFEGRVHPEIRAAYLASPPLVVAYALAGSVLRDLSREPLGVGKEGKPVYLKDVWPSPEEVNEVVARAMDPKIYTEKYSKIGELVPEWSELKAPSGNLYQWRSDDTYIQPSPLFEGRPTTGDIINARPLLILGDSITTDHISPAGSIPPDSPAGKYLAERGVQQRDFNTFGARRGNWEVMVRGTFWSKGYINKIEGGLEGGYTIKYPEGLKTTVYEAAMMYKREGVPVVIVAGKTYGAGSSRDWAAKGPKLLGVKAVIAESFERIHRSNLTMVGIVPIQLPQGVTVDSLNLKGPETIDIIGLENLAPGKELTLRIHRPDGRTDELRAKAAVYTWAEVEYIKHGGILPYVLRKLLEKS

SEQ ID NO: 67126 - DNA, 2367 bp, Antheraea yamamai
  CDS (1)..(2367)
atggctcactgtataagagttttgcatggccagggtagcaggacaagggctgtattgttggaaatacagcaaagatgtttcagcgtgtctcctcttaccgctgccgcagcccaggtggctatgtcgaagttcgacaaggctcctctgccatatgagaagttgacaaagaacttagaagttgtaaaaaaaaggttaggtcgtgatatgactttagcagagaaggttctttactcacatcttgatgatcctaaaggccaggaaatcgagcgtggtacaagctacttacgtcttcgcccggacagagtggccatgcaggatgccactgctcagatggcgatgttgcagtttatctcgtccggacttccccgtgtagctgtgccctccaccattcattgcgaccatttgatagaagcccaggttggcggtgaaaaggacttggccagagctaaggacctcaacaaagaagtgtacaagtttttggagacagctggtgctaaatatggcgtcggtttctggaagcccggttctggtattatccatcaaattattttggagaactacgctttccccggcctcctgatgatcggtacagattcccacactccgaacggtggaggtctcggaggactttgtattggtgttggtggtgctgacgctgtggatgtgatggcagatataccatgggagctgaagtgtcccaaggttattggtgtcaaactgactggtcagatgaaaggatggaccagcccaaaagacgttattctgaaggtagctggtattctcacggtgaagggaggcactggtgcaatcgtcgaataccatggtcccggtgtcgactccatctcttgcacgggaatggccaccatctgcaacatgggtgctgagatcggtgctaccaccagtgtgttcccgtacaattctcgcatggagacatatttaaaatctactggtcgcgcgaatatcgcgtccacagctaattccttcaagcacattcttacgccagacgcaaaggcaccttatgatcagttaatcgagatcgacctatcgaccctcgaacctcatgtgaacggtccgttcacaccggatctcgcgagtcctatatcgaaattggccgaagtagctaagaagaacgactggcctatggacatccgcgttggtctcatcggctcctgcaccaactcctcgtacgaagacatgggccgttgtgccagtattgttaaagaggctttgagccacggtctgaagtcgaagatcccgttcaacgtgacccccggctctgaacagatccgcgccaccatcgagagagacggcatcgcgaagaccctcagggacttcggtggcaccgtgttggcgaacgcttgcggtccctgcatcggtcagtgggaccgacgtgacgttaagaagggcgagaagaacactatagtgacgtcatacaaccgtaacttcaccggcaggaacgatgcgaaccccgcaacccactgcttcgttaccagcccggagctcgtcaccgccctgtctattgcaggtcgtctcgactttaacccgttggctgacgagttgacaggcacagatggcaagaaattcaaactgtcagacccgttcgcagacgaactcccctcgaaaggattcgactccggccaggacacgtacgaacaccccccagcagatggcagcaaagtgcaagtcgacgtctcaccgaaatctgacagacttcagctgctctcacctttcgataagtgggatggcaaagacctcaccgacatgaccatactgatcaaagtgaagggcaagtgcacaaccgatcacatctcagctgccggaccatggcttaaatatagaggacatctcgataatatctcaaacaacatgttcattaccgcgacgaacgcggagaacggcgagctgaacaaagtgaggaaccaagtgactggcgagttcgggccggtgcctgggaccgcgcgcgcgtacaaggcggccggagtgcggtggtgcgtcgtcggagacgagaactacggcgagggctcctcccgcgagcacgccgccctcgaacccaggcacctcggcggacgagccatcatcgtcaagtcattcgccagaatccatgagaccaatctcaagaagcagggtatgctgccgttaactttcgcgaattcagcagactatgacaagatccaaccctcagacaaaatctcgctccttggtctgaaggatcttgcacctggcaagcaagtggattgtcaaatcaagcacaaagatggcagcactgaaatcatcaaactcaaccactccatgaacgaccaacaaatcagctggttcagggccggttctgcactcaacagaatgaaggagattgctgcgggaaagtga

SEQ ID NO: 67127 - protein, 788 aa, Antheraea yamamai
MAHCIRVLHGQGSRTRAVLLEIQQRCFSVSPLTAAAAQVAMSKFDKAPLPYEKLTKNLEVVKKRLGRDMTLAEKVLYSHLDDPKGQEIERGTSYLRLRPDRVAMQDATAQMAMLQFISSGLPRVAVPSTIHCDHLIEAQVGGEKDLARAKDLNKEVYKFLETAGAKYGVGFWKPGSGIIHQIILENYAFPGLLMIGTDSHTPNGGGLGGLCIGVGGADAVDVMADIPWELKCPKVIGVKLTGQMKGWTSPKDVILKVAGILTVKGGTGAIVEYHGPGVDSISCTGMATICNMGAEIGATTSVFPYNSRMETYLKSTGRANIASTANSFKHILTPDAKAPYDQLIEIDLSTLEPHVNGPFTPDLASPISKLAEVAKKNDWPMDIRVGLIGSCTNSSYEDMGRCASIVKEALSHGLKSKIPFNVTPGSEQIRATIERDGIAKTLRDFGGTVLANACGPCIGQWDRRDVKKGEKNTIVTSYNRNFTGRNDANPATHCFVTSPELVTALSIAGRLDFNPLADELTGTDGKKFKLSDPFADELPSKGFDSGQDTYEHPPADGSKVQVDVSPKSDRLQLLSPFDKWDGKDLTDMTILIKVKGKCTTDHISAAGPWLKYRGHLDNISNNMFITATNAENGELNKVRNQVTGEFGPVPGTARAYKAAGVRWCVVGDENYGEGSSREHAALEPRHLGGRAIIVKSFARIHETNLKKQGMLPLTFANSADYDKIQPSDKISLLGLKDLAPGKQVDCQIKHKDGSTEIIKLNHSMNDQQISWFRAGSALNRMKEIAAGK

SEQ ID NO: 67128 - DNA, 2364 bp, Podospora anserina
  CDS (1)..(2364)
atgatggctactcgtcagctcctgggcgctgcccggagccgcgctgtgggcagcgcgagcctgggcctccggcgcaccatggctaccgtctccgactctgcccttgacaagaaggtcaagcagaacaactgggaggagggcaacttcatcaactacaagaagatgtctgagaacctcgccattgtccgttccagactcaaccgccctctcgcctatgccgagaagattctctactcccacttggacgatccccatggacaggagatcgagcgtggtgtctcctacctcagacttcgccccgaccgcgttgcctgccaggatgctaccgcccagatggccatccttcagttcatgtccgccggcatgccctccgtcgccaaccccactaccgtccactgcgaccacttgattgaggctcagcagggtggtgagaaggatttggctcgcgctgttggtatcaacaaggaggtctacgacttccttgcctctgcttgcgctaaatataacatcggtttctggaagcccggctctggtatcattcatcagattcttttggagaactatgctttccccggtggtctccttatcggcactgactcccatacccccaacgctggtggtctcggtatggctgccattggtgtcggtggtgctgacgctgtcgatgttatggccaacctcccctgggagttgaaggctcccaaggttatcggtgttaagctgactggctctctctctggctggacttctcccaaggatatcattctcaaggttgctggcattctcaccgtcaagggtggcactggtgccatcgttgagtacttcggccctggtgtcgacagcttgtctgccactggtatgggtaccatctgcaacatgggtgctgagattggtgccaccacctccctcttccccttcaacgaccgcatgtacgactacctcaaggccaccaagcgtaccgagatcggtgacttcgcccgctcttacgccaaggagctccgtcaggatgacggtgccgagtacgaccagctcatcgagatcaacctctctgagctcgagccccatatcaacggtcccttcactcccgatcttgctacccccatctccaagttcgccgaggctgccaaggccaacaactggcccgatgaggtcaaggtcggtcttatcggctcttgcaccaactcctcgtacgaggatatgtcccgcgccgcctccatcgcccgcgatgccctcaaccacggcatcaagtccaaggctctcttcaccgtcacccccggttccgagcagattcgcgccaccattgcccgtgatggccagctccagaccttcgaggagttcggtggtgtcgttcttgccaacgcttgcggcccctgcattggtcagtgggatcgccaggacgtgaagaagggcgaggccaactccatcatctcttcctacaaccgtaacttcaccggccgtaacgatggtaaccccgccactcactccttcgtcacctcccccgatctcgtcgtcgccatgtccattgccggctctctctccttcaaccccctcaccgataccctgaaggacaaggatggcaaggacttcaagctctctcctcccaccggcaacggtctccccgagagaggctacgaccccggccaggacacctaccaggccccccctaaggaccgtgccaacgtcactgtccaggtctcccccacctccgaccgtctccagctcctctctcccttcaacgcttgggatggcaaggatgccactgacatgcccatcctcatcaaggcccagggcaagaccaccaccgatcacatttccatggccggtccttggctcaagtaccgtggtcatctcgacaacatctccaacaacatgttgattggtgccatcaacgctgccaacggtgaggccaacaagatcaagaacttcaccactggtgagtgggatgccgtccccgctgttgcccgtgactacaaggccaagggcatccgttgggtcgttatcggtgattggaactacggtgagggttcttctcgtgagcacgccgctctcgagccccgccaccttggtggtctcgccatcatcacccgctctttcgctcgtatccacgagaccaacctcaagaagcagggtatgcttcctctcaccttctccgaccccgccgactacgacaggatcaaccccgatgacaaggtcgacatcctctgcactgagcttgctgttggcaagcccatcactctccgtgtcaagcccgccaacggtgaggctttcgagatccccctctcgcacaccttcaacgaggcccagattgagtggttcaagaacggttccgctctcaacaccatggccaagaagaccaagaactaa

SEQ ID NO: 67129 - protein, 787 aa, Podospora anserina
MMATRQLLGAARSRAVGSASLGLRRTMATVSDSALDKKVKQNNWEEGNFINYKKMSENLAIVRSRLNRPLAYAEKILYSHLDDPHGQEIERGVSYLRLRPDRVACQDATAQMAILQFMSAGMPSVANPTTVHCDHLIEAQQGGEKDLARAVGINKEVYDFLASACAKYNIGFWKPGSGIIHQILLENYAFPGGLLIGTDSHTPNAGGLGMAAIGVGGADAVDVMANLPWELKAPKVIGVKLTGSLSGWTSPKDIILKVAGILTVKGGTGAIVEYFGPGVDSLSATGMGTICNMGAEIGATTSLFPFNDRMYDYLKATKRTEIGDFARSYAKELRQDDGAEYDQLIEINLSELEPHINGPFTPDLATPISKFAEAAKANNWPDEVKVGLIGSCTNSSYEDMSRAASIARDALNHGIKSKALFTVTPGSEQIRATIARDGQLQTFEEFGGVVLANACGPCIGQWDRQDVKKGEANSIISSYNRNFTGRNDGNPATHSFVTSPDLVVAMSIAGSLSFNPLTDTLKDKDGKDFKLSPPTGNGLPERGYDPGQDTYQAPPKDRANVTVQVSPTSDRLQLLSPFNAWDGKDATDMPILIKAQGKTTTDHISMAGPWLKYRGHLDNISNNMLIGAINAANGEANKIKNFTTGEWDAVPAVARDYKAKGIRWVVIGDWNYGEGSSREHAALEPRHLGGLAIITRSFARIHETNLKKQGMLPLTFSDPADYDRINPDDKVDILCTELAVGKPITLRVKPANGEAFEIPLSHTFNEAQIEWFKNGSALNTMAKKTKN

SEQ ID NO: 67130 - DNA, 2244 bp, Bacteroides fragilis
  CDS (1)..(2244): transl_table=11
atggtatatgatttgaatatgttgaagaacttctatgcttcctataaagggaagatggagcatgttcgtgcagccttgaaacgtcctttgacgttggctgaaaagattttgtatacacatttgtataatgtggcggatttaaaaaattatgaaaggggtgaagactatgtcaactttcgaccggaccgcgttgctatgcaggatgctactgctcagatggctctgttgcaatttatgaatgcgggtaaagaagcggtggcagtaccttccacggttcattgcgaccacctgatacaagcttatcggggggctgaacgcgatattgaaactgctacacaaaccaatcgggaggtgtacgattttctgcgtgatgtctcttcccgttatggcatcggtttctggaaaccgggagcgggtatcattcaccaggtagtacttgaaaattatgcttttccgggtgggatgatggtcggtacagactcacatactcccaatgcaggaggtctcggaatggtagctatcggtgtaggcggagccgatgctgtggatgtaatgacaggtatggagtgggaacttaagatgccaaaactgattggagtccgtttgacaggcgagttgaacggatggacagctccgaaagacgtgatactgaaactggcgggcatcttgaccgtgaagggtgggacgaatgccattatcgaatattttggcccgggtacagcttcgctatcggctacaggaaaggccaccatctgcaatatgggtgccgaagtgggggcaaccacttcactattcccgtatgatgaacggatggctgtttatctgaaagcaaccggacgtgaagaagtagctgcgatggctgacagtgtagctgccgacttgcgtgcagatgacgaagtgatggcacgaccggacgatttttatgaccgggttattgagataaacctttccgaactggaaccttatattaatggtccgtttactccggacgctgctactcctatttcagagtttgcagagaaagtggtaacaaacggttatccccggaagatggaagtggggttgataggatcttgtaccaactcttcttatcaggatatcagccgtgccgtttctgttgcccggcaggtgaatgaaaagaatctgggagtggcggcaccgctgattgtgaatccgggatccgaacagattcgtgctacggccgagcgtgacggcatgatggatgtgttcgaaaagatgggagctacgattatggctaatgcctgtggtccctgtatcggacagtggaaacgccatacggacgatccgacccgtaaaaactcgatagtgacttcctttaaccgtaattttgccaaacgtgccgacggtaatccgaatacttttgcttttgtggcttctcctgaaattgttttggcattgactattgccggagacctttgtttcaatccgctgaaagaccgtttggtgaatcatgacggtgaaaaggtgaaactcagtgaacctcaaggtgacgaacttccatcagccggatttgtagccggtaatcagggatatcaggctcccggcggtgagaaaaacgagatcagagtggctcccgattctcaacggttgcagttgttgactcctttccccgcgtgggatggcaatgattttctcaatatgccactgcttatcaaagcacagggtaagtgtacgacagaccatatttcgatggcgggtccctggcttcggttccgggggcatctggagaatatatctgataatatgctgatgggagcggtgaatgctttcaatggcgaaacgaataaggtatggaatcgtttgaccaatacctatgaaactgtttcgggtacggctaaacagtataaggcggacggtatctcttccatcgttgtggccgaagaaaattacggtgaaggttccagtcgtgagcatgccgctatggaaccgcgtttccttcatgtaaaggtgatcctggctaagagttttgcccgtatccatgagactaatctgaaaaagcaaggtatgctggctgttacatttgcagacaaggccgattatgaccggattcgtgagcacgatttgatctcggtagtcggattgaaagagttttcacccggacgcaatctggaggtgatattgcaccacgaagatggtacggaagaacggttcgctgtacaacatacttacaatgaacaacagatcggctggttccgtgccggttctgctttgaatgcaaaatag

SEQ ID NO: 67131 - protein, 747 aa, Bacteroides fragilis
MVYDLNMLKNFYASYKGKMEHVRAALKRPLTLAEKILYTHLYNVADLKNYERGEDYVNFRPDRVAMQDATAQMALLQFMNAGKEAVAVPSTVHCDHLIQAYRGAERDIETATQTNREVYDFLRDVSSRYGIGFWKPGAGIIHQVVLENYAFPGGMMVGTDSHTPNAGGLGMVAIGVGGADAVDVMTGMEWELKMPKLIGVRLTGELNGWTAPKDVILKLAGILTVKGGTNAIIEYFGPGTASLSATGKATICNMGAEVGATTSLFPYDERMAVYLKATGREEVAAMADSVAADLRADDEVMARPDDFYDRVIEINLSELEPYINGPFTPDAATPISEFAEKVVTNGYPRKMEVGLIGSCTNSSYQDISRAVSVARQVNEKNLGVAAPLIVNPGSEQIRATAERDGMMDVFEKMGATIMANACGPCIGQWKRHTDDPTRKNSIVTSFNRNFAKRADGNPNTFAFVASPEIVLALTIAGDLCFNPLKDRLVNHDGEKVKLSEPQGDELPSAGFVAGNQGYQAPGGEKNEIRVAPDSQRLQLLTPFPAWDGNDFLNMPLLIKAQGKCTTDHISMAGPWLRFRGHLENISDNMLMGAVNAFNGETNKVWNRLTNTYETVSGTAKQYKADGISSIVVAEENYGEGSSREHAAMEPRFLHVKVILAKSFARIHETNLKKQGMLAVTFADKADYDRIREHDLISVVGLKEFSPGRNLEVILHHEDGTEERFAVQHTYNEQQIGWFRAGSALNAK

SEQ ID NO: 67132 - DNA, 2595 bp, Burkholderia sacchari
  CDS (1)..(2595): transl_table=11
gtgaataccgcctaccgcaagcccctacccggcacccggctcgattacttcgacgcgcgcgaagccgtcgaggccatccagcccggcgcctgggacacgttgccctacacctcgcgcgtgctcgccgaaaacctcgtgcgccgctgcgacccggccacgctcaccgcttcgctcaagcagctcatcgagcgcaagcgcgacctcgactttccgtggttccccgcgcgcgtcgtctgccacgacattctcggccagaccgcgctcgtggacctcgccggcctgcgcgacgccatcgctgaccagggcggcgaccccgccaaggtgaacccggtggtgccggtgcagttgatcgtcgacaactcgctcgccgtcgaatgcggcggcttcgacccggacgcgttcaagaagaaccgcgcgatcgaagaccggcgcaacgaagaccgtttcgacttcatcaactggacgaagaaagcgttcaagaacgtcgacgtgattcctccgggcaacggctacatgcaccagtacaatctggagaagatgtcgcccgtgatccaggcgcgcgacggcgtggcgttccccgacacctgcgtgggcacggacagccacacgccgcacgtggacgcgctcggcgtgatcgccatcggcgtgggcggcctcgaagccgagaacgtcatgctcggccgcgcctcgtggatgcgtttgcccgacatcgtcggcgtggagcttaccggcaagcgccagcccggcatcaccgccaccgacatcgtgctcgccctcaccgaattcctgcgcaaggaaaaagtcgtgggtgcgtatctggagtttcgcggcgcgggcgcgtcgagcctcacgctcggcgaccgcgcaaccatctcgaacatggcgcccgagtatggcgccacggccgcgatgttcttcatcgacgaccagacgctcgactatctgcgcctcacgggccgcgaggaagagcaggtcaagctcgtcgagacgtatgcgaagactggcggcctgtgggccgacacgctcgccaatgcgcagtacgaacgcacgctgacgttcgatctgtcgagcgtggtgcgcaacatggccggcccgtcgaacccgcacaagcgcctgcccacctcggcgctggccgagcgcggcattgccggcaagtgggaagaaacgccggggcagatgcccgacggcgcggtgatcatcgccgccatcactagctgcacgaacactagcaacccgcgcaacgtgatcgccgccgcgctgctcgcgcgcaacgccaatgcgcgcggccttacgcgcaagccgtgggtgaagagctcgctcgcgccgggatcgaaggcggtcgagctgtatctggaagacgcgaagctgctgcccgagctcgaaaagctgggctttggcatcgtggcgttcgcgtgcacgacgtgtaacggcatgtcgggcgcgctcgatccgaagatccagcaggagatcatcgatcgcgacctgtacgcgaccgccgtgctctcgggcaaccgcaacttcgacggccgcatccacccgtatgcgaagcaggcgttcctcgcctcgccgccgctcgtggtcgcgtacgcgattgccggcacgatccgcttcgacatcgagcaggattcgctgggcacggaccagaacggcaagcccgtgtacctgaaggacatctggccgagcgacgaagagatcgacgccatcgtcgcgcagagcgtgaaacccgagcagttccgcaaggtgtacgaaccgatgttcgcggtcacggccgccagcggcgagaccaccgacccgctgtacgactggcgcgcgcaaagcacgtacatccgccgtccgccgtactgggaaggcgcgcttgcgggcgagcgcacgttgaagggcctgcgcccgctcgccgtgcttggcgacaacatcacgaccgaccacctgtcgccctcgaacgcgatcctggcgaacagtgcagcgggcgaatacctcgcgaaaatgggcctgcccgaagaggacttcaactcttacgcgacgcaccgcggcgaccacctcacggcgcagcgcgctactttcgcgaaccccacgctcatcaacgagatggccgtggtggacggcgtcgtgaagaagggctcgcttgcgcgcatcgagccggaaggcaaggtcacgcgcatgttggaagcgattgaaacctacatggaacgcaagcagccgctcatcatcgtggcgggtgcggactacggccagggcagctcgcgcgactgggcggccaagggcgtgcgtcttgcgggcgtggaagtgatcgtggcggagggcttcgagcgcattcaccgtacgaacctgatcggcatgggcgtgctgccgctggagttcaaggcgggcacgaaccgcacgacgctgggcatcgacggcacggagacgtacgacgtgattggcgagcgcacgccgcgcgcggatctgacgctggtgatccagcgcaagaacggcgagcgggtggaagtgccggtgacgtgccgcctggacacggcggaggaagtctcgatctacgaagcgggcggcgtcctgcagcgcttcgcgcaagacttcctggagtcattccagacagcgtaa

SEQ ID NO: 67133 - protein, 864 aa, Burkholderia sacchari
MNTAYRKPLPGTRLDYFDAREAVEAIQPGAWDTLPYTSRVLAENLVRRCDPATLTASLKQLIERKRDLDFPWFPARVVCHDILGQTALVDLAGLRDAIADQGGDPAKVNPVVPVQLIVDNSLAVECGGFDPDAFKKNRAIEDRRNEDRFDFINWTKKAFKNVDVIPPGNGYMHQYNLEKMSPVIQARDGVAFPDTCVGTDSHTPHVDALGVIAIGVGGLEAENVMLGRASWMRLPDIVGVELTGKRQPGITATDIVLALTEFLRKEKVVGAYLEFRGAGASSLTLGDRATISNMAPEYGATAAMFFIDDQTLDYLRLTGREEEQVKLVETYAKTGGLWADTLANAQYERTLTFDLSSVVRNMAGPSNPHKRLPTSALAERGIAGKWEETPGQMPDGAVIIAAITSCTNTSNPRNVIAAALLARNANARGLTRKPWVKSSLAPGSKAVELYLEDAKLLPELEKLGFGIVAFACTTCNGMSGALDPKIQQEIIDRDLYATAVLSGNRNFDGRIHPYAKQAFLASPPLVVAYAIAGTIRFDIEQDSLGTDQNGKPVYLKDIWPSDEEIDAIVAQSVKPEQFRKVYEPMFAVTAASGETTDPLYDWRAQSTYIRRPPYWEGALAGERTLKGLRPLAVLGDNITTDHLSPSNAILANSAAGEYLAKMGLPEEDFNSYATHRGDHLTAQRATFANPTLINEMAVVDGVVKKGSLARIEPEGKVTRMLEAIETYMERKQPLIIVAGADYGQGSSRDWAAKGVRLAGVEVIVAEGFERIHRTNLIGMGVLPLEFKAGTNRTTLGIDGTETYDVIGERTPRADLTLVIQRKNGERVEVPVTCRLDTAEEVSIYEAGGVLQRFAQDFLESFQTA

SEQ ID NO: 67134 - DNA, 2610 bp, Ralstonia eutropha
  CDS (1)..(2610): transl_table=11
atgaattctgcaaaccgcaaaccgctaccgggcaccaagctggattactttgacgcgcgcgccgcggtcgaggcaatccagccgggtgcctacgacaagctgccgtacacgtcgcgcgtgctggcagaaaacctggtgcgccgctgcgatcccgccacgctgacggattcgctcctgcagctggtcgggcgcaagcgcgacctcgatttcccgtggttcccggcgcgcgtggtgtgccatgacatcctgggccagaccgcgctggtggacctggccggcctgcgcgacgccatcgccgaccagggcggcgaccccgccaaggtcaacccggtagtgccggtgcagctgatcgtcgatcattcgctggcggtggagtgcggcggcttcgaccccgatgcgttcgccaagaaccgcgccatcgaagaccgccgcaacgaagaccgcttccacttcatcgactggaccaagcaggcgttcaagaacgtcgacgtgatcccgccgggcaacggcatcatgcaccagatcaacctggagaagatgtcgccggtgatccacgccgacaacggcgtggcctaccccgatacctgcgtcggcaccgacagccacaccccgcatgtggatgcgctcggcgtgatcgccatcggcgtgggcggcctggaagccgagaacgtgatgctcggccgcgcctcgtggatgcgcctgccggatatcgtcggcgtggagctgaccggaaagcgccagcccggcatcaccgccaccgacatcgtgctggccctgactgaattcctgcgcaaggaaaaggtggtcggcgcctatctggagttccgtggcgaaggcgcctccagcctgacgctcggcgaccgcgcgactatttccaacatggccccggaatatggcgccactgccgcgatgttcttcatcgacgagcagaccattgactacctgcgcctgaccggccgcaccgacgagcagctcaagctggtcgaaacgtacgccaggactgccggcctgtgggcggattcgctgaagaacgccgaatacgagcgcgtgctgaagttcgacctgtcgagcgtggtgcgcaatatggccggcccgtccaacccgcacaagcgcctgccgacctccgcgctggccgagcgcggcatcgccgtcgacctggacaaggccagcgcgcaggaagccgaaggcctgatgccggacggcgcggtcatcatcgccgccatcaccagctgcaccaacaccagcaacccgcgcaacgtgatcgctgccgcgctgctggcgcgcaacgccaatgcgcgcggcctggcgcgcaagccgtgggtcaagtcgtcgctggccccgggatccaaggcagtcgagctgtacctggaagaagcgaatctgctgcccgacctcgagaagcttggcttcggcatcgtcgcctttgcctgcaccacctgcaacggcatgtccggagcgctggacccgaagatccagcaagagatcatcgaccgcgacctgtacgcgacggcagtgctgtccggcaaccgcaacttcgatggccgcatccacccgtacgccaagcaggccttcctggcctcgccgccgctggtggtggcctatgccatcgccggcaccatccgcttcgatatcgaaaaggacgtgctgggcacggaccaggacggcaagccggtctacctgaaggacatctggccgagcgacgaagagatcgacgcgatcgtggcgaagagcgtcaagcccgaacagttccgcaaggtctacgagccgatgttcgccattaccgcggccagcggcgaatcggtcagtcccctgtacgactggcgtccgcagagcacctacatccgccgcccgccctactgggaaggcgcgctggccggcgaacgcacgctcaaggcgctgcgtccgctggcggtgctgggcgacaacatcaccaccgaccacctgtcgccgtccaacgccatcatgctcaacagcgccgccggggaatacctggccaggatgggcttgccggaagaggacttcaactcgtacgccacccaccgcggcgaccacctgaccgcgcagcgcgccacctttgccaacccgaccctgatcaatgaaatggctgtggtcgatggccaggtcaagaagggttcgctggcgcgcatcgagcctgaaggcaaggtcgtgcgcatgtgggaagcgatcgagacgtacatggatcgcaagcagccgctgatcatcatcgccggcgcggactatggccagggctcgtcgcgcgactgggccgccaagggcgtgcgcctggccggcgtggaagtcatcgtcgccgagggcttcgagcgcatccaccgcaccaacctgatcggcatgggcgtgctgccgctggagttcaagccgggcgtgaaccgcctgacgctgggcctggacggcaccgagacctatgacgtgatcggcgagcgccagccgcgcgccacgctgacactggtggtgaaccgcaagaacggcgagcgcgtggaagtgccggtgacctgccgcctcgacagcgacgaggaagtgtcgatctacgaagctggcggcgtgctgcacttcgcgcaggacttccttgagtcgtcgcgggcaactgcataa

SEQ ID NO: 67135 - protein, 869 aa, Ralstonia eutropha
MNSANRKPLPGTKLDYFDARAAVEAIQPGAYDKLPYTSRVLAENLVRRCDPATLTDSLLQLVGRKRDLDFPWFPARVVCHDILGQTALVDLAGLRDAIADQGGDPAKVNPVVPVQLIVDHSLAVECGGFDPDAFAKNRAIEDRRNEDRFHFIDWTKQAFKNVDVIPPGNGIMHQINLEKMSPVIHADNGVAYPDTCVGTDSHTPHVDALGVIAIGVGGLEAENVMLGRASWMRLPDIVGVELTGKRQPGITATDIVLALTEFLRKEKVVGAYLEFRGEGASSLTLGDRATISNMAPEYGATAAMFFIDEQTIDYLRLTGRTDEQLKLVETYARTAGLWADSLKNAEYERVLKFDLSSVVRNMAGPSNPHKRLPTSALAERGIAVDLDKASAQEAEGLMPDGAVIIAAITSCTNTSNPRNVIAAALLARNANARGLARKPWVKSSLAPGSKAVELYLEEANLLPDLEKLGFGIVAFACTTCNGMSGALDPKIQQEIIDRDLYATAVLSGNRNFDGRIHPYAKQAFLASPPLVVAYAIAGTIRFDIEKDVLGTDQDGKPVYLKDIWPSDEEIDAIVAKSVKPEQFRKVYEPMFAITAASGESVSPLYDWRPQSTYIRRPPYWEGALAGERTLKALRPLAVLGDNITTDHLSPSNAIMLNSAAGEYLARMGLPEEDFNSYATHRGDHLTAQRATFANPTLINEMAVVDGQVKKGSLARIEPEGKVVRMWEAIETYMDRKQPLIIIAGADYGQGSSRDWAAKGVRLAGVEVIVAEGFERIHRTNLIGMGVLPLEFKPGVNRLTLGLDGTETYDVIGERQPRATLTLVVNRKNGERVEVPVTCRLDSDEEVSIYEAGGVLHFAQDFLESSRATA

SEQ ID NO: 67136 - DNA, 2697 bp, Nicotiana tabacum
  CDS (1)..(2697)
atggctgcagagaacccatttaagggaatccttactgttcttcccaagcctggaggtggcgaattcgggaagtactatagcctacctgctctgaatgatccccgaattgacaagctgccatattcttcaagaattcttcttgaatcagcaattcgtaattgtgacaactttcaagtgaaaaaggaagatgttgagaagattattgactgggaaaatactgcaccgaagctggtggagataccattcaagccagcccgagtcctgctgcaagattttactggtgtaccagctgttgtggaccttgcttgcatgcgtgatgccatgaacaagcttggcagcgattctgacaagattaatccattggtcccagtagatctggtaattgatcattcagttcaagttgacgtggcaaggtcagaaaatgctgtccaggctaatatggaactggaattccaaaggaacaaggagaggttcgcctttctcaagtggggttctaatgcttttcacaacatgcttgttgttccaccagggtctggtattgttcatcaggtgaatcttgaatacctcggaagagtcgtctttaacagggaaggcttgctctatcctgatagtgtcgtcggaacagattcacacaccactatgattgatgggcttggagttgctggctggggtgttggaggtattgaagcagaagctacgatgcttggtcagccaatgagcatggtgttgcctggagttgttgggttcaagttatctggaaaattgcgcagcggtgtaactgccactgacttggtcttgacagtcactcagatgctgaggaagcatggtgttgttggaaagtttgttgaattctatggtgatggaatgagtgaactatcattggctgacagggctaccattgcaaacatgtctcctgaatatggtgctacaatgggtttctttcctgtagatcatgttacgttgcagtatctgaaattaacagggagaagtgacgaaacagtggaaatgattgaagcatatctgcgcgcgaataagatgtttgtcgactatgatgagcctcaacatgagaaagtgtactcttcttgcttgcacctagaccttgctggtgttgagccatgtgtgtcagggccaaaaagacctcatgaccgtgtgcctttgaaagaaatgaagtctgactggcactcttgccttgataacaaggttggattcaagggatttgctgtgccaaaagatgcacaggaaaaagtggtaaagttttctttccatggacaagatgcagagctcaagcatggaagtgttgtgattgctgctatcactagttgcactaatacatcaaatcccagtgttatgctaggagcagcccttgttgcaaaaaaggcttgcgacctgggtctacatattaagccatgggttaaaacaagtcttgctcctggttccggcgtagttacaaaatatttactccagagtgggctgcagaagtatttgaatcagcaaggtttccatattgttggatatggctgcacaacttgtattgggaattcgggggatttggatgaatcggttgcgtctgctatatcagaaaatgacattgttgctgctgctgtactctctggaaatcgaaactttgaggggcgtgttcatcccttgacgagagcgaactaccttgcttcacctcctttggtggttgcctatgcactcgctggcactgttgatatcgactttgagaaagagccaattggagtgggaaatgatggtaagaatgtctacttcaaggatatttggccatcaactgaagaaattgctgaggttgttcaatcaagtgtattgccagacatgttcaagagtacctatgaagctattacaaaggggaataatatgtggaatcaattgtcagtaccgtcttccaagctctactcatgggatactagttctacatacattcacgagccaccgtatttcaaggatatgacgatggatcctccagggccccacggagtgaaggatgctttctgcttgctgaattttggtgatagtattaccacagatcatatttcaccagctggaagcatccacaaagatagtcctgccgctaagtaccttactgaacggggggttgatcgcagggacttcaactcatatggtagccgtcgtggtaatgatgaaattatggctaggggtacttttgccaacatccgcattgtaaacaagctgttaaatggggaagttggcccgaagacaattcacattcccacaggagagaaactctctgtgtttgatgctgcaatgaaatacaagtctgctggacaagacaccataatcttggctggagcagaatatggaagtggaagctcccgagattgggctgctaagggccccatgttgttgggagttaaagctgtaattgctaaaagctttgagaggattcaccgtagcaacttggtaggaatgggtattgtgcctctatgtttcaaggctggtgaggatgcagaaacacttgggttgacaggtcatgagcgatataccattgatctccccgaaaaaattagtgagatccacccaggtcaagatgttactgtacgaacagatactggaaaatctttcacttgcatagtgcgcttcgacactgaggtggaattggcttatttcaaccatggaggtattctcccgtacgtcattcgacagttgatccagcaatga

SEQ ID NO: 67137 - protein, 898 aa, Nicotiana tabacum
MAAENPFKGILTVLPKPGGGEFGKYYSLPALNDPRIDKLPYSSRILLESAIRNCDNFQVKKEDVEKIIDWENTAPKLVEIPFKPARVLLQDFTGVPAVVDLACMRDAMNKLGSDSDKINPLVPVDLVIDHSVQVDVARSENAVQANMELEFQRNKERFAFLKWGSNAFHNMLVVPPGSGIVHQVNLEYLGRVVFNREGLLYPDSVVGTDSHTTMIDGLGVAGWGVGGIEAEATMLGQPMSMVLPGVVGFKLSGKLRSGVTATDLVLTVTQMLRKHGVVGKFVEFYGDGMSELSLADRATIANMSPEYGATMGFFPVDHVTLQYLKLTGRSDETVEMIEAYLRANKMFVDYDEPQHEKVYSSCLHLDLAGVEPCVSGPKRPHDRVPLKEMKSDWHSCLDNKVGFKGFAVPKDAQEKVVKFSFHGQDAELKHGSVVIAAITSCTNTSNPSVMLGAALVAKKACDLGLHIKPWVKTSLAPGSGVVTKYLLQSGLQKYLNQQGFHIVGYGCTTCIGNSGDLDESVASAISENDIVAAAVLSGNRNFEGRVHPLTRANYLASPPLVVAYALAGTVDIDFEKEPIGVGNDGKNVYFKDIWPSTEEIAEVVQSSVLPDMFKSTYEAITKGNNMWNQLSVPSSKLYSWDTSSTYIHEPPYFKDMTMDPPGPHGVKDAFCLLNFGDSITTDHISPAGSIHKDSPAAKYLTERGVDRRDFNSYGSRRGNDEIMARGTFANIRIVNKLLNGEVGPKTIHIPTGEKLSVFDAAMKYKSAGQDTIILAGAEYGSGSSRDWAAKGPMLLGVKAVIAKSFERIHRSNLVGMGIVPLCFKAGEDAETLGLTGHERYTIDLPEKISEIHPGQDVTVRTDTGKSFTCIVRFDTEVELAYFNHGGILPYVIRQLIQQ

SEQ ID NO: 67138 - DNA, 2367 bp, Daphnia pulex
  CDS (1)..(2367)
atggcgctgtacgcgaagggtaccgttcttaagaaatcatggatagttgcctgtgaaatgcaagctcgttgttttcacatcagccccttggctttggcagcccaaaaggtagccatgagcaaactggatgcttcaagttaccttccacatgctcaactacaagaaaagctggaaatagttaaaaatcgtcttaagagacctatgactctttctgagaaaatcttgtattcccatcttgatgatccatcaaatcaagaaattgtccgtggtcaaagctacctacgcctcaggccagaccgggttgcaatgcaggatgctacagcccaaatggccatgttgcaatttatttcatctggcttaccccgtgttgcagtcccatccaccattcactgtgaccatttgattgaggcacaggttggcggagctcaagatttggcgcgtgctgttgatatcaacaaagaagtgtacaattttcttagcacatccggtgctaaatatggtgttggtttctggaagcctggatctggcatcattcaccaaattattttagagaactacgcttttcctggtttacttatgatcggcactgattctcatactcctaatggaggtggcctgggaggcctatgcattggtgtcggtggcgctgatgccgtcgatgttatggcaaacattccctgggagctgaagtgccctaaggtaattggagttaaactaacgggaaaactacaaggttggacttctcctaaagatgttattcttaaagttgcaggaatccttacagtcaaaggtggtaccggtgcaattgtggaatacttcggtccaggagttgactccatttcctgtactggaatggctactatttgtaacatgggtgcagaaatcggagccaccacatctgttttcccatacaatcatcggatgcgtgattaccttgttgccactgaacgaaaggcaattgcagatgagattgatccatacggaaatgaatttttgcgcgctgatgaagatgcaccttatgatcaggtcattgagcttaatttgtctgaacttgagccacacgtaaatggaccgttcacccccgacttggcgaatccgatttcgaaattgggcgaagaagccaagaagaataactggccacttgatgtcaaggtatctctgattggcagctgcaccaattcgagctacgaggatatgggcagatgcgcaagtattgcgcgggaggctctcaagcacggattaaaggcaaaatccgcctttaatattactccgggatctgaacagatccgtgccacaatcgagcgtgatggcatcgctgagacgctacgacaatttggtggtattgtacttgcgcaaccgtgcggcccctgcattggccagtgggaccgcaaagacgtcaaaaagggcgaaaagaatacaattgtcacatcatacaatcgcaactttacggcccgtaatgatgccaaccccgcaacgcatgcctttgttacgtcacccgaactaacaacggcactggcacttgctggtaccttggattttgacccaaggacttcaaaactcaaaggcgctaacggagaagaattcttactgagcaacccgtacgcggatgagttgcctgcacgcggattcgatccaggccaggaaacctatcaagccccaggagatcctactaaagttaaagttgacgtagatcccaagtcacagcgtcttcaactgctggaaccatttcctaagccatgggatgccaaagacctagagaagatggtagttttgattaaagtaaagggaaagtgcaccacagatcacatttcagcagctgggtcgtggctcaagtatcgtggtcatttggataacatttctaataatatgttgattactgcaattaattctgaaaatggagaaatgaacaaagttagaaaccaagtatcaaacgaatttggcgctgtgccagaaacggctcgtttctacaaatccaaaggtgttaactgggttgttgttggagatgataactacggcgaaggatctagtcgagaacatgccgcattggaacctcgtcatttgggaggaagagccattattgtaaaatcctttgctcgcatccacgagacaaatttgaaaaagcaaggaatgctcccacttacattcgccgaccctgctgattatgaccgcattcaaccctctgatcgtctttcactcctcggacttgccgatttggcaccaggcaaacaagtgaaatgccaaattcaccatgccgatgggtcttcagagacaattcatttaaaccaaagtatgaacgaacagcagattgaatggtttaaagcaggcagtgctcttaatagaatgaagcaagtcgctgccagcaagtag

SEQ ID NO: 67139 - protein, 788 aa, Daphnia pulex
MALYAKGTVLKKSWIVACEMQARCFHISPLALAAQKVAMSKLDASSYLPHAQLQEKLEIVKNRLKRPMTLSEKILYSHLDDPSNQEIVRGQSYLRLRPDRVAMQDATAQMAMLQFISSGLPRVAVPSTIHCDHLIEAQVGGAQDLARAVDINKEVYNFLSTSGAKYGVGFWKPGSGIIHQIILENYAFPGLLMIGTDSHTPNGGGLGGLCIGVGGADAVDVMANIPWELKCPKVIGVKLTGKLQGWTSPKDVILKVAGILTVKGGTGAIVEYFGPGVDSISCTGMATICNMGAEIGATTSVFPYNHRMRDYLVATERKAIADEIDPYGNEFLRADEDAPYDQVIELNLSELEPHVNGPFTPDLANPISKLGEEAKKNNWPLDVKVSLIGSCTNSSYEDMGRCASIAREALKHGLKAKSAFNITPGSEQIRATIERDGIAETLRQFGGIVLAQPCGPCIGQWDRKDVKKGEKNTIVTSYNRNFTARNDANPATHAFVTSPELTTALALAGTLDFDPRTSKLKGANGEEFLLSNPYADELPARGFDPGQETYQAPGDPTKVKVDVDPKSQRLQLLEPFPKPWDAKDLEKMVVLIKVKGKCTTDHISAAGSWLKYRGHLDNISNNMLITAINSENGEMNKVRNQVSNEFGAVPETARFYKSKGVNWVVVGDDNYGEGSSREHAALEPRHLGGRAIIVKSFARIHETNLKKQGMLPLTFADPADYDRIQPSDRLSLLGLADLAPGKQVKCQIHHADGSSETIHLNQSMNEQQIEWFKAGSALNRMKQVAASK

SEQ ID NO: 67140 - DNA, 2796 bp, Streptomyces viridochromogenes
  CDS (1)..(2796): transl_table=11
gtgtcggcgaacagcttcgacgcccgcagcacgctgcaggtgggcgacgagtcgtacgagatcttccggctggacaaggtggagggctcggctcgccttccgtacagcctcaaggtcctgctggagaacctgctccgcaccgaggacggcgcgaacatcaccgccgaccacatccgcgccctcggcggctgggactcgcaggcccagccgtcccaggagatccagttcacgccggcccgcgtgatcatgcaggacttcaccggcgttccctgcgtcgtggacctcgccaccatgcgtgaggccgtgaaggagctgggcggcgacccggccaagatcaacccgctggcgccggccgagctggtcatcgaccactccgtcatcgccgacaagttcggcacgaacgacgccttcaagcagaacgtcgagctggagtacggccgcaacaaggagcgctaccagttcctgcgctggggccagaccgccttcgacgagttcaaggtcgtcccgccgggcaccggcatcgtccaccaggtgaacatcgagcacctggcgcgcacggtcatggtccggggtggccaggcgtaccccgacaccctcgtcggcaccgactcgcacaccaccatggtcaacggcctcggcgtcctcggctggggcgtcggcggcatcgaggccgaggccgccatgctcggccagccggtctccatgctcatcccgcgtgtcgtcggcttcaagctgaccggtgagctgaagccgggcaccaccgccaccgacctggtcctcacgatcaccgagatgctgcgggggcacggtgtcgtcggcaagttcgtcgagttctacggcgagggtgtggcggccacgagcctcgccaaccgcgccaccatcggcaacatgtcgcccgagttcggctccaccgccgcgatcttcccgatcgacgacgagaccctcaactacctgcgtctgaccggccgttccgagcagcaggtcgccctcgtcgagtcgtacgccaaggagcagggcctctggctggacccggccgccgagcccgacttctccgagaagctcgagctcgacctgtcgacggtcgtgccctccatcgccggcccgaagcgcccgcaggaccgcatcgttctcgccgaggccgcccagcagttcgccaaggacgtcctcaactacgtcgaggcccccgccgcgcagcccgccgcctcggcctcaccggtcgacgaggccagcgccgagtccttcccggcctccgacgccccggcctacggcagccaggagaacggcgccggcgcgcgccagcacgccgacggcaccggtgccgccgtcccgtccaacccggtcaccgtgaccgcccccgacggcacgtcgtacgagatcgaccacggtgcggtgacggtcgcggccatcacctcctgcaccaacacctccaacccgtacgtcatggtcgccgccgccctggtggccaagaaggcggtcgagaagggcctgacccgcaagccctgggtcaagaccaccctcgcccccggctccaaggtcgtcaccgactacttcgagaagtcgggcctgaccccgtacctcgacaaggtcggcttcaacctcgtcggctacggctgcaccacctgcatcggcaactccggcccgctgccggaggaggtctccaaggccgtcaacgaccacgacctcgcggtcacctcggtcctctccggcaaccggaacttcgagggccggatcaaccccgacgtcaagatgaactacttggcgtccccgccgctggtcgtcgcctacgccctcgccggctccatgaaggtggacatcaccaaggacgccctgggcaccgaccaggacggcaacccggtctacctgaaggacatctggccctccgaggccgaggtgaacgacgtcgtcgccaacgccatcggcgaggacatgttctccaagtcctacagcgacgtcttcgccggtgacgcccagtggcaggcgctgccgatcccgaccggcaacaccttcgagtgggaccccgagtcgacctacgtccgcaagcccccgtacttcgagggcatggagatggagccggccccggtcgaggacatcgccggcgcccgcgtgctcgccaagctcggcgactcggtcaccaccgaccacatctcccctgccggtgcgatcaaggccgacaccccggccggcaagtacctcacggagcacggcgtcgagcgccgcgacttcaacagctacggctcgcgccgcggcaaccacgaggtcatgatccgcggtacgttcgccaacatccgcctgcgcaaccagatcgcgccgggcacggagggcggctacacccgcgacttcacgaaggacgacgcccccgtctccttcatctacgacgcctcgcgcaactacatcgagcagggcatcccgctggtcgtcctggccggcaaggagtacggctccggctcgtcccgcgactgggccgccaagggcaccgcgctcctcggcgtcaaggccgtcatcgccgagtcctacgagcgcatccaccgctcgaacctcatcggcatgggcgtcctgccgctgcagttcccggagggccagtcggccgcgaccctcggtctgaccggcgaggagaccttctccttctccggcgtcaccgagctcaacaacggcaccactccgcgcacggtgaaggtcaccaccgacaccggcgtcgagttcgacgcggtcgtccgcatcgacacccccggcgaggcggactactaccgcaacggcggcatcatgcagtacgtcctgcgcagcctgatccgcaagtaa

SEQ ID NO: 67141 - protein, 931 aa, Streptomyces viridochromogenes
MSANSFDARSTLQVGDESYEIFRLDKVEGSARLPYSLKVLLENLLRTEDGANITADHIRALGGWDSQAQPSQEIQFTPARVIMQDFTGVPCVVDLATMREAVKELGGDPAKINPLAPAELVIDHSVIADKFGTNDAFKQNVELEYGRNKERYQFLRWGQTAFDEFKVVPPGTGIVHQVNIEHLARTVMVRGGQAYPDTLVGTDSHTTMVNGLGVLGWGVGGIEAEAAMLGQPVSMLIPRVVGFKLTGELKPGTTATDLVLTITEMLRGHGVVGKFVEFYGEGVAATSLANRATIGNMSPEFGSTAAIFPIDDETLNYLRLTGRSEQQVALVESYAKEQGLWLDPAAEPDFSEKLELDLSTVVPSIAGPKRPQDRIVLAEAAQQFAKDVLNYVEAPAAQPAASASPVDEASAESFPASDAPAYGSQENGAGARQHADGTGAAVPSNPVTVTAPDGTSYEIDHGAVTVAAITSCTNTSNPYVMVAAALVAKKAVEKGLTRKPWVKTTLAPGSKVVTDYFEKSGLTPYLDKVGFNLVGYGCTTCIGNSGPLPEEVSKAVNDHDLAVTSVLSGNRNFEGRINPDVKMNYLASPPLVVAYALAGSMKVDITKDALGTDQDGNPVYLKDIWPSEAEVNDVVANAIGEDMFSKSYSDVFAGDAQWQALPIPTGNTFEWDPESTYVRKPPYFEGMEMEPAPVEDIAGARVLAKLGDSVTTDHISPAGAIKADTPAGKYLTEHGVERRDFNSYGSRRGNHEVMIRGTFANIRLRNQIAPGTEGGYTRDFTKDDAPVSFIYDASRNYIEQGIPLVVLAGKEYGSGSSRDWAAKGTALLGVKAVIAESYERIHRSNLIGMGVLPLQFPEGQSAATLGLTGEETFSFSGVTELNNGTTPRTVKVTTDTGVEFDAVVRIDTPGEADYYRNGGIMQYVLRSLIRK

SEQ ID NO: 67142 - DNA, 2697 bp, Arabidopsis thaliana
  CDS (1)..(2697)
atggcttccgagaatcctttccgaagcatattgaaggcgttagagaagcctgatggtggtgaattcggtaactactacagcttacctgctttgaacgatcccaggatcgataaactaccttattccattaggatacttcttgaatcggccatacgtaactgtgatgagttccaagttaagagcaaagatgttgagaagattcttgattgggagaatacttctcccaagcaggttgagattccgttcaagcctgctcgggttcttcttcaggactttactggtgttcctgctgttgttgatcttgcttgcatgagagatgccatgaataatctcggtggtgattctaataaaattaatccgctggtccctgtagatcttgtcattgatcactccgttcaggtggatgtggcgagatcagagaacgcagtgcaggcaaacatggagcttgagttccagcgtaacaaggaaagatttgcttttcttaagtggggatccaacgcctttcacaacatgcttgtcgtacctcctggatctggaatagttcatcaagtcaacctagaataccttgccagagttgttttcaacacaaatggacttctttacccagacagtgttgttggcacagactctcacaccactatgattgatggactgggtgttgctggatggggagttggcggtatagaagcggaagctaccatgcttggtcagccaatgagcatggtcctacccggtgttgtgggtttcaagctaacgggaaagttaagagatggaatgacagctactgatttggtcttaacagtgactcagatgttgaggaaacatggagtagttggaaagtttgttgaattccacggggaagggatgagagaattgtctttagctgaccgtgctacaattgccaatatgtctcctgagtacggtgcgaccatgggattcttcccagtcgatcatgtcactttgcagtatctaaggttgacaggcaggagcgatgacactgtctccatgatagaggcgtatttacgagcaaacaagatgtttgtggattacagtgagccggagagtaagacagtttattcctcatgtctggaattgaatctcgaggatgtggaaccttgtgtttctggtcccaagaggcctcatgatcgtgttcctttgaaggaaatgaaagcggactggcattcttgcttggacaatagagtaggattcaagggtttcgctgtacctaaagaagcacagagtaaggctgtagagttcaattttaacgggaccacagcacagcttagacatggagatgttgttatagcagcaatcaccagttgcacaaatacttcaaaccctagtgtaatgcttggcgctgccttagttgcaaaaaaggcctgcgacctaggactggaggttaagccatggatcaaaactagtcttgctccaggctctggagttgtaacaaagtacttggcaaagagtggcttgcagaagtacttgaatcagctcggcttcagtatcgttggttatgggtgcaccacatgcattggaaactcgggggatatccatgaagctgtggcttcagcaatagttgataatgacttggtggcatccgctgtgttgtctgggaacagaaattttgagggacgtgttcacccgttaacaagagctaactatctagcttccccaccgcttgttgtagcctatgctctggctggaactgttgacattgattttgagacacagcccattggaactgggaaagatggaaaacagatatttttcagggacatttggccctctaacaaagaagttgctgaggttgttcaatctagtgtccttcctgatatgttcaaagctacatatgaagcaatcaccaaaggaaattccatgtggaatcagttatctgtggcgtcaggtactctctatgagtgggacccgaaatcaacttacattcacgagccgccttatttcaagggcatgaccatgtctccacccggtccacatggtgtgaaagacgcatactgtttactcaattttggagacagtattaccactgatcacatctcaccagctggtagcatccacaaggacagtcctgcggctaagtacttgatggaacgaggtgtggatagaagagacttcaactcatacgggagtcgccgtggtaatgatgagattatggcgagaggcacttttgcaaatatccgtattgtcaacaaacacttgaaaggagaagttggtcccaaaacagttcacattcccactggagagaagctttctgttttcgatgctgccatgaaatataggaacgagggacgcgacacaatcattttggctggtgctgaatacggtagtggaagttctcgtgattgggctgccaagggtccaatgcttctgggtgtgaaagctgtgatttcaaagagcttcgagcgaattcaccgaagcaatttggtgggaatgggaatcatacctttgtgcttcaaggcgggagaagatgctgagacccttggcctaacgggtcaggagctttacaccattgagctcccaaacaatgttagtgagatcaaaccaggacaagatgtaacagtcgtcacaaacaatggcaaatctttcacatgtacactccgatttgacacagaggtggagttggcttatttcgatcacggagggattttgcaatacgttatcaggaacttgatcaaacaataa

SEQ ID NO: 67143 - protein, 898 aa, Arabidopsis thaliana
MASENPFRSILKALEKPDGGEFGNYYSLPALNDPRIDKLPYSIRILLESAIRNCDEFQVKSKDVEKILDWENTSPKQVEIPFKPARVLLQDFTGVPAVVDLACMRDAMNNLGGDSNKINPLVPVDLVIDHSVQVDVARSENAVQANMELEFQRNKERFAFLKWGSNAFHNMLVVPPGSGIVHQVNLEYLARVVFNTNGLLYPDSVVGTDSHTTMIDGLGVAGWGVGGIEAEATMLGQPMSMVLPGVVGFKLTGKLRDGMTATDLVLTVTQMLRKHGVVGKFVEFHGEGMRELSLADRATIANMSPEYGATMGFFPVDHVTLQYLRLTGRSDDTVSMIEAYLRANKMFVDYSEPESKTVYSSCLELNLEDVEPCVSGPKRPHDRVPLKEMKADWHSCLDNRVGFKGFAVPKEAQSKAVEFNFNGTTAQLRHGDVVIAAITSCTNTSNPSVMLGAALVAKKACDLGLEVKPWIKTSLAPGSGVVTKYLAKSGLQKYLNQLGFSIVGYGCTTCIGNSGDIHEAVASAIVDNDLVASAVLSGNRNFEGRVHPLTRANYLASPPLVVAYALAGTVDIDFETQPIGTGKDGKQIFFRDIWPSNKEVAEVVQSSVLPDMFKATYEAITKGNSMWNQLSVASGTLYEWDPKSTYIHEPPYFKGMTMSPPGPHGVKDAYCLLNFGDSITTDHISPAGSIHKDSPAAKYLMERGVDRRDFNSYGSRRGNDEIMARGTFANIRIVNKHLKGEVGPKTVHIPTGEKLSVFDAAMKYRNEGRDTIILAGAEYGSGSSRDWAAKGPMLLGVKAVISKSFERIHRSNLVGMGIIPLCFKAGEDAETLGLTGQELYTIELPNNVSEIKPGQDVTVVTNNGKSFTCTLRFDTEVELAYFDHGGILQYVIRNLIKQ

SEQ ID NO: 67144 - DNA, 2973 bp, Arabidopsis thaliana
  CDS (1)..(2973)
atgtatttaaccgcttcatcttccgcttcttcctccatcatccgagctgcttcttctcgctcttcttctcttttctctttccgatcggttttatctccctccgtttcatctacttctccgtcgtctcttctcgctcgtagatcttttggtaccatttcccctgctttccgtcgctggagccattcctttcactcgaaaccatctccgtttcgcttcacctctcagatcagagctgtttctccagtcttagatcgtctccagagaaccttctcttccatggcgtcagagcatccgtttaaagggatcttcactacacttcctaagcctggtggtggtgaattcggaaagttctatagcttacctgctcttaacgatccacgagttgataaacttccttactctattaggattctgcttgaatctgcgattcgtaattgtgataactttcaagttactaaggaagatgttgagaagattattgactgggaaaagacatctcctaaacaagtagagattccttttaaaccagctcgtgttcttcttcaggactttacgggagtcccagctgttgttgaccttgcttgtatgcgtgatgcgatgaataagctgggaagtgattccaacaaaatcaatcccttggttccggtggatcttgtgattgatcactcggttcaagtagatgtagctcgatcagagaatgcagtgcaagcaaacatggagcttgagttccagaggaacaaggagaggtttgctttccttaaatggggttctactgcgttccagaacatgcttgttgtgcctcctggctctggtattgtgcatcaggtcaatttggaatatcttggaagagttgtgttcaataccaaaggccttctctacccagacagcgtggttggaaccgattcacatacaactatgattgatggtttgggagttgctggatggggtgttgggggtattgaagctgaggcaacaatgcttggccagcccatgagtatggtattgcctggtgttgttggattcaaacttgccggaaaaatgcgtaatggtgtaacagctactgatttggttctaacagtgactcaaatgctgaggaagcatggcgttgttggaaagtttgttgagttttatggtaatggcatgagtgggctgtccctagctgacagggcgacaattgccaatatgtctcccgagtatggtgcaaccatgggcttcttccctgtggatcatgttactctacaatatctcaaattgactggaagaagcgatgagacagtggctatgattgaagcatatcttcgggctaacaatatgtttgttgactacaatgagcctcagcaagaccgggtttactcgtcatatctagaactgaatctggatgatgttgaaccttgcatttctggaccaaagcggccacatgatcgtgttactttgaaggaaatgaaagctgactggcattcatgtcttgacagtaaagttgggttcaagggttttgctatacctaaagaggcacaagaaaaagtggtaaatttttcgttcgatggacaaccagcagagcttaaacatggaagtgtggtgattgctgcaatcacaagctgtactaatacatcaaatcccagcgtcatgcttggtgctggtcttgttgcaaagaaggcttgtgaccttgggctacaggttaagccttggataaagacaagtcttgctccaggctcaggagttgttacaaaatacttattaaagagtggattgcaagaatatctgaatgaacagggtttcaatattgtcggctacgggtgcactacatgcatcgggaattctggggaaattaatgaatcagtgggagctgctattaccgaaaatgacattgtggcggctgctgtgctatccggtaacaggaactttgaggggcgtgttcatccactaacaagagccaattaccttgcatctcctccgttggtggttgcctatgctcttgctggcacggttaacattgactttgaaacggagcctattggcaaaggaaagaatggcaaggacgtcttcttaagagatatctggccaaccacggaagaaattgctgaggttgttcaatccagtgttttgcctgacatgttccgagcaacgtacgagtcaatcaccaagggtaaccccatgtggaataagctgtctgttcctgagaataccctctactcatgggatcccaactcaacttacattcacgagcctccatacttcaaggacatgaccatggatcctcctggtccacacaatgtgaaggatgcttactgtttactcaattttggggacagtatcaccactgatcacatctcaccagctggaaacatccaaaaggacagtcctgctgcaaagtttctcatggagcgtggcgttgaccgtaaggacttcaactcatatggaagtcgccgtgggaatgatgaaataatggccagaggtacttttgctaatatccgtatcgttaacaagctcatgaatggtgaagttggccctaagactgttcacattccatctggagagaagctctcagtctttgacgctgccatgaggtacaagtcatctggtgaagacacaattattctggctggagctgagtatggaagtggtagctcacgtgattgggctgccaagggacccatgctacagggtgttaaagcggtgattgcaaagagttttgagaggattcaccgaagcaacttggtgggaatgggaatcatcccattgtgctttaagtccggtgaagacgcagatactcttggattgactggtcacgaacgctacacgatccatctcccaaccgatatctcagagataagacctggccaagatgttaccgtcactaccgacaacggaaaatctttcacttgcacagtccgcttcgacacagaggtggaattggcatactttaaccatggaggcatacttccatatgttatcagaaacttgagcaagcaatag

SEQ ID NO: 67145 - protein, 990 aa, Arabidopsis thaliana
MYLTASSSASSSIIRAASSRSSSLFSFRSVLSPSVSSTSPSSLLARRSFGTISPAFRRWSHSFHSKPSPFRFTSQIRAVSPVLDRLQRTFSSMASEHPFKGIFTTLPKPGGGEFGKFYSLPALNDPRVDKLPYSIRILLESAIRNCDNFQVTKEDVEKIIDWEKTSPKQVEIPFKPARVLLQDFTGVPAVVDLACMRDAMNKLGSDSNKINPLVPVDLVIDHSVQVDVARSENAVQANMELEFQRNKERFAFLKWGSTAFQNMLVVPPGSGIVHQVNLEYLGRVVFNTKGLLYPDSVVGTDSHTTMIDGLGVAGWGVGGIEAEATMLGQPMSMVLPGVVGFKLAGKMRNGVTATDLVLTVTQMLRKHGVVGKFVEFYGNGMSGLSLADRATIANMSPEYGATMGFFPVDHVTLQYLKLTGRSDETVAMIEAYLRANNMFVDYNEPQQDRVYSSYLELNLDDVEPCISGPKRPHDRVTLKEMKADWHSCLDSKVGFKGFAIPKEAQEKVVNFSFDGQPAELKHGSVVIAAITSCTNTSNPSVMLGAGLVAKKACDLGLQVKPWIKTSLAPGSGVVTKYLLKSGLQEYLNEQGFNIVGYGCTTCIGNSGEINESVGAAITENDIVAAAVLSGNRNFEGRVHPLTRANYLASPPLVVAYALAGTVNIDFETEPIGKGKNGKDVFLRDIWPTTEEIAEVVQSSVLPDMFRATYESITKGNPMWNKLSVPENTLYSWDPNSTYIHEPPYFKDMTMDPPGPHNVKDAYCLLNFGDSITTDHISPAGNIQKDSPAAKFLMERGVDRKDFNSYGSRRGNDEIMARGTFANIRIVNKLMNGEVGPKTVHIPSGEKLSVFDAAMRYKSSGEDTIILAGAEYGSGSSRDWAAKGPMLQGVKAVIAKSFERIHRSNLVGMGIIPLCFKSGEDADTLGLTGHERYTIHLPTDISEIRPGQDVTVTTDNGKSFTCTVRFDTEVELAYFNHGGILPYVIRNLSKQ

SEQ ID NO: 67146 - DNA, 3349 bp, Arabidopsis thaliana
  CDS (160)..(3147)
gcttgacgaaatctcttctccgtctctctctctctttccctcgtccattccacgatcttcttccaatctcaaatctcccattttctagtgtttcattttgatccttcttccttcctctggagatttctcaaatctcttcaactattttgatttgccgccatgtatcgacgcgccacttccggcgtgcgttctgcctccgcaaggctttcttcttccctctccaggatcgcctctagcgagacagcttcggtttcggctccatctgcgtcgtcgcttcgcaatcagacgaaccgatctaagagtttctcctcggctctccgctcctttcgagtttgctctgcttccacgcggtggagccatggtgggagctggggatcgcctgctagccttcgcgctcaagctaggaattccactccggttatggagaaatttgaacggaaatacgcaaccatggcttctgagcattcctacaaggatattttgacaagtcttcctaaacctggtggtggagagtatggaaagtactactcgttaccagctttaaacgatccaagaattgataagctgccattttctgtaaggatactattggaatcagcgattcgtaactgtgacaactatcaagtcacaaaggatgacgttgagaaaatccttgactgggagaatacatctactaagcaggttgaaattgccttcaagccagcccgtgttatcttacaggacttcactggagtaccagttctagttgatcttgcttctatgagggatgcagtgaagaatcttggtagtgatcctagcaagatcaaccccttggttcctgttgatcttgtcgttgatcactcgatccaagttgactttgcaaggtcagaagatgccgcacagaaaaatttggagcttgaattcaaaaggaacaaagaaagatttacgttccttaagtggggttcaacagccttccaaaacatgctggtcgttcctcctgggtctgggattgtccatcaggtcaacttggaataccttggacgtgttgttttcaactcgaaaggatttctctaccctgatagcgttgttggaaccgactcccacacaaccatgattgatggattaggagtcgctgggtggggtgttggaggaattgaggcagaggcagcaatgcttggtcagcccatgagcatggtgttacctggcgtggtcgggtttaagttggatggaaagttgaaggaaggggttactgctactgatttagttctcactgtgacccaaatattgaggaagcatggtgttgtcggcaagtttgttgaattttatggtgaggggatgagtgaactttcactggctgatagagccacaattgcaaatatgtctcccgagtatggagcaactatgggtttcttcccagtggatcatgttacactggagtacctgaagttgacaggaagaagcgatgaaactgtgtcaatgatagaatcatatttgcgcgcaaacaatatgtttgttgactacaacgagcctcagcaagaaagagcatacacatcttatctgcagttagaattgggacatgttgaaccatgtatttctggtcctaaaaggcctcatgaccgagtgcctctgaaagatatgaaggctgactggcatgcatgccttgacaatcctgttggattcaagggttttgcagtgccaaaagaaaaacaagaagaagttgtgaagttctcatacaacggacaacctgctgagatcaagcatggtagtgttgttattgcggcaattactagttgtacaaacacgtcaaaccctagtgtcatgatcggagcagcactcgttgcaaaaaaagcttcagatcttggcctgaaggtaaaaccatgggttaagacaagtcttgctccagggtctagagttgtcgagaaatatttggatcgaagtgggctccgagagtccttgaccaagcaaggattcgaaattgtcggctacggctgcacaacatgcattgggaattctggcaaccttgacccagaagttgcatctgctatagaaggaactgatatcatcccagctgctgtgctgtctggaaaccgaaactttgaaggtcgtgttcatccacaaacaagagcaaactatcttgcgtcaccaccattagttgttgcttatgcccttgctggaacggtggacattgattttgagaaagagcctataggaaccagaagtgatggaaaaagtgtgtacctgagggatgtatggccaagcaatgaggaagttgctcaggttgttcaatatagcgtgctaccaagcatgttcaagagctcgtacgaaacaataacagagggaaaccccttgtggaatgaactctctgcaccgagttccacgttatattcttgggatccaaactccacgtacattcatgaacctccgtatttcaagaatatgaccgcaaatccacctggtcctcgtgaagtgaaggatgcttactgcttgttgaactttggggacagtgtaacaacagaccacatctctccagcaggaaacattcaaaaaactagtcctgctgcaaagtttctaatggaccgtggtgtgatttcggaagatttcaactcatatggaagtcgaaggggaaacgacgaggttatggctcgtggtacatttgccaatatccgtattgttaacaagctcttgaaaggagaagttggccccaacactgttcacattccgactggagagaagcttagcgttttcgatgcagcaagtaaatacaagaccgctgaacaggatacgatcatcctggctggtgctgagtatggaagtggtagctctcgggattgggctgcaaagggtcccttgcttttgggagtgaaagctgtaattgccaagagctttgagagaatccatcgcagcaacctggctggtatggggatcattcctctgtgtttcaaggctggggaggacgcggaaacccttggactcactggtcatgaacgctacacagtccaccttcctacaaaagttagtgacattagacccggtcaagacgtcactgtaaccactgacagtggcaaatcctttgtctgcaccctgcgttttgatacagaggtggaattggcatactatgatcacggcggtattctaccatacgtcatccggagtttgagcgccaagtgatctcaaagtgtttttcgccttttgttttcttcttatgttaagatcccaataaagcaagttttgtgagcatcttttttctttcaggttacactaaacctttgttggcaagagttgctataagaaaatgcaaaaatacacacttcattttataaacagtttaacgtatctttgaccgtagcatcaattgaaagacctggaaaca

SEQ ID NO: 67147 - protein, 995 aa, Arabidopsis thaliana
MYRRATSGVRSASARLSSSLSRIASSETASVSAPSASSLRNQTNRSKSFSSALRSFRVCSASTRWSHGGSWGSPASLRAQARNSTPVMEKFERKYATMASEHSYKDILTSLPKPGGGEYGKYYSLPALNDPRIDKLPFSVRILLESAIRNCDNYQVTKDDVEKILDWENTSTKQVEIAFKPARVILQDFTGVPVLVDLASMRDAVKNLGSDPSKINPLVPVDLVVDHSIQVDFARSEDAAQKNLELEFKRNKERFTFLKWGSTAFQNMLVVPPGSGIVHQVNLEYLGRVVFNSKGFLYPDSVVGTDSHTTMIDGLGVAGWGVGGIEAEAAMLGQPMSMVLPGVVGFKLDGKLKEGVTATDLVLTVTQILRKHGVVGKFVEFYGEGMSELSLADRATIANMSPEYGATMGFFPVDHVTLEYLKLTGRSDETVSMIESYLRANNMFVDYNEPQQERAYTSYLQLELGHVEPCISGPKRPHDRVPLKDMKADWHACLDNPVGFKGFAVPKEKQEEVVKFSYNGQPAEIKHGSVVIAAITSCTNTSNPSVMIGAALVAKKASDLGLKVKPWVKTSLAPGSRVVEKYLDRSGLRESLTKQGFEIVGYGCTTCIGNSGNLDPEVASAIEGTDIIPAAVLSGNRNFEGRVHPQTRANYLASPPLVVAYALAGTVDIDFEKEPIGTRSDGKSVYLRDVWPSNEEVAQVVQYSVLPSMFKSSYETITEGNPLWNELSAPSSTLYSWDPNSTYIHEPPYFKNMTANPPGPREVKDAYCLLNFGDSVTTDHISPAGNIQKTSPAAKFLMDRGVISEDFNSYGSRRGNDEVMARGTFANIRIVNKLLKGEVGPNTVHIPTGEKLSVFDAASKYKTAEQDTIILAGAEYGSGSSRDWAAKGPLLLGVKAVIAKSFERIHRSNLAGMGIIPLCFKAGEDAETLGLTGHERYTVHLPTKVSDIRPGQDVTVTTDSGKSFVCTLRFDTEVELAYYDHGGILPYVIRSLSAK

SEQ ID NO: 67148 - DNA, 2676 bp, Escherichia coli
  CDS (1)..(2676): transl_table=11
atgtcgtcaaccctacgagaagccagtaaggacacgttgcaggccaaagataaaacttaccactactacagcctgccgcttgctgctaaatcactgggcgatatcacccgtctacccaagtcactcaaagttttgctcgaaaacctgctgcgctggcaggatggtaactcggttaccgaagaggatatccacgcgctggcaggatggctgaaaaatgcccatgctgaccgtgaaattgcctaccgcccggcaagggtgctgatgcaggactttaccggcgtacctgccgttgttgatctggcggcaatgcgcgaagcggttaaacgcctcggcggcgatactgcaaaggttaacccgctctcaccggtcgacctggtcattgaccactcggtgaccgtcgatcgttttggtgatgatgaggcatttgaagaaaacgtacgcctggaaatggagcgcaaccacgaacgttatgtgttcctgaaatggggaaagcaagcgttcagtcggtttagcgtcgtgccgccaggcacaggcatttgccatcaggttaacctcgaatatctcggcaaagcagtgtggagtgaattgcaggacggtgaatggattgcttatccggatacactcgttggtactgactcgcacaccaccatgatcaacggccttggcgtgctggggtggggcgttggtgggatcgaagcagaagccgcaatgttaggccagccggtttccatgcttatcccggatgtagtgggcttcaaacttaccggaaaattacgtgaaggtattaccgccacagacctggttctcactgttacccaaatgctgcgcaaacatggcgtggtggggaaattcgtcgaattttatggtgatggtctggattcactaccgttggcggatcgcgccaccattgccaatatgtcgccagaatatggtgccacctgtggcttcttcccaatcgatgctgtaaccctcgattacatgcgtttaagcgggcgcagcgaagatcaggtcgagttggtcgaaaaatatgccaaagcgcagggcatgtggcgtaacccgggcgatgaaccaatttttaccagtacgttagaactggatatgaatgacgttgaagcgagcctggcagggcctaaacgcccacaggatcgcgttgcactgcccgatgtaccaaaagcatttgccgccagtaacgaactggaagtgaatgccacgcataaagatcgccagccggtcgattatgttatgaacggacatcagtatcagttacctgatggcgctgtggtcattgctgcgataacctcgtgcaccaacacctctaacccaagtgtgctgatggccgcaggcttgctggcgaaaaaagccgtaactctgggcctcaagcggcaaccatgggtcaaagcgtcgctggcaccgggttcgaaagtcgtttctgattatctggcaaaagcgaaactgacaccgtatctcgacgaactggggtttaaccttgtgggatacggttgtaccacctgtattggtaactctgggccgctgcccgatcctatcgaaacggcaatcaaaaaaggcgatttaaccgtcggtgcggtgctgtccggcaaccgtaactttgaaggccgtatccatccgctggttaaaactaactggctggcctcgccgccgctggtggttgcctatgcgctggcgggaaatatgaatatcaacctggcttctgagcctatcggccatgatcgcaaaggcgatccggtttatctgaaagatatctggccatcggcacaagaaattgcccgtgcggtagaacaagtctccacagaaatgttccgcaaagagtacgcagaagtttttgaaggcacagcagagtggaagggaattaacgtcacacgatccgatacctacggttggcaggaggactcaacctatattcgcttatcgcctttctttgatgaaatgcaggcaacaccagcaccagtggaagatattcacggtgcgcggatcctcgcaatgctgggggattcagtcaccactgaccatatctctccggcgggcagtattaagcccgacagcccagcgggtcgatatctacaaggtcggggtgttgagcgaaaagactttaactcctacggttcgcggcgtggtaaccatgaagtgatgatgcgcggcaccttcgccaatattcgcatccgtaatgaaatggtgcctggcgttgaaggggggatgacgcggcatttacctgacagcgacgtagtctctatttatgatgctgcgatgcgctataagcaggagcaaacgccgctggcggtgattgccgggaaagagtatggatcaggctccagtcgtgactgggcggcaaaaggtccgcgtctgcttggtattcgtgtggtgattgccgaatcgtttgaacgaattcaccgttcgaatttaattggcatgggcatcctgccgctggaatttccgcaaggcgtaacgcgtaaaacgttagggctaaccggggaagagaagattgatattggcgatctgcaaaacctacaacccggcgcgacggttccggtgacgcttacgcgcgcggatggtagccaggaagtcgtaccctgccgttgtcgtatcgacaccgcgacggagttgacctactaccagaacgacggcattttgcattatgtcattcgtaatatgttgaagtaa

SEQ ID NO: 67149 - protein, 891 aa, Escherichia coli
MSSTLREASKDTLQAKDKTYHYYSLPLAAKSLGDITRLPKSLKVLLENLLRWQDGNSVTEEDIHALAGWLKNAHADREIAYRPARVLMQDFTGVPAVVDLAAMREAVKRLGGDTAKVNPLSPVDLVIDHSVTVDRFGDDEAFEENVRLEMERNHERYVFLKWGKQAFSRFSVVPPGTGICHQVNLEYLGKAVWSELQDGEWIAYPDTLVGTDSHTTMINGLGVLGWGVGGIEAEAAMLGQPVSMLIPDVVGFKLTGKLREGITATDLVLTVTQMLRKHGVVGKFVEFYGDGLDSLPLADRATIANMSPEYGATCGFFPIDAVTLDYMRLSGRSEDQVELVEKYAKAQGMWRNPGDEPIFTSTLELDMNDVEASLAGPKRPQDRVALPDVPKAFAASNELEVNATHKDRQPVDYVMNGHQYQLPDGAVVIAAITSCTNTSNPSVLMAAGLLAKKAVTLGLKRQPWVKASLAPGSKVVSDYLAKAKLTPYLDELGFNLVGYGCTTCIGNSGPLPDPIETAIKKGDLTVGAVLSGNRNFEGRIHPLVKTNWLASPPLVVAYALAGNMNINLASEPIGHDRKGDPVYLKDIWPSAQEIARAVEQVSTEMFRKEYAEVFEGTAEWKGINVTRSDTYGWQEDSTYIRLSPFFDEMQATPAPVEDIHGARILAMLGDSVTTDHISPAGSIKPDSPAGRYLQGRGVERKDFNSYGSRRGNHEVMMRGTFANIRIRNEMVPGVEGGMTRHLPDSDVVSIYDAAMRYKQEQTPLAVIAGKEYGSGSSRDWAAKGPRLLGIRVVIAESFERIHRSNLIGMGILPLEFPQGVTRKTLGLTGEEKIDIGDLQNLQPGATVPVTLTRADGSQEVVPCRCRIDTATELTYYQNDGILHYVIRNMLK

SEQ ID NO: 67150 - DNA, 2370 bp, Saccharomyces cerevisiae
  CDS (1)..(2370)
atgctatcttcagctaataggttttatataaagaggcatttggcaacacatgccaatatgttcccctctgtatctaaaaattttcaaacaaaagtgccaccttatgcaaaacttttgaccaacctagacaagattaaacaaataacaaacaatgctccattgacactagcagaaaaaattttatactcgcatctttgcgatcctgaagaatcgattacttcttctgatctgtccaccatccgtggtaataaatacttgaagctaaacccagaccgtgtagctatgcaggacgcttctgcccaaatggcgcttctacaattcatgaccaccggtctaaatcaaacatctgtcccagcatccatacattgtgatcatttaattgtaggtaaggacggtgaaactaaagatttaccctcttccatagctaccaaccaagaagttttcgatttcttggagagttgcgcaaagagatatggaattcaattctggggcccaggttctggtatcattcaccagattgttttggaaaatttctcagctccaggtctaatgatgctaggtactgattcccatacaccaaatgcaggcggtctgggagctattgccatcggggttggtggtgcggatgcagttgatgccctcacaggcactccatgggaattaaaagcaccaaaaattttaggtgttaaattgaccggaaagttaaacggatggtccactcctaaagatgtaatcacaaagctcgctggtttactaactgtcagaggtggtactggttatatcgtcgagtacttcggcgaaggtgtatccactctatcttgcacaggtatggcaaccatctgtaatatgggagctgaaatcggtgctacaacgtcaactttcccttaccaagaagctcacaagcgttatttgcaagcaactaatagagcagaggtcgctgaagcagctgatgttgctttaaacaagtttaacttcttaagagccgacaaagatgctcaatacgataaagttattgaaattgacttatccgcaattgaacctcacgttaatggtccatttacaccagacctttcaaccccaatatctcaatatgccgaaaaaagtttgaaggaaaactggccccaaaaagttagcgctggtttgattggatcatgtaccaattcatcttatcaagacatgagtcgtgttgtcgacttggtcaagcaagcttccaaagccggcttgaaaccacgtatccccttctttgtcacccctggttcagaacaaattagagctaccttggaaagagatggaatcatcgatattttccaagaaaatggtgccaaagttttagcaaatgcatgcggcccttgtatcggacaatggaatagggaagatgtctcgaaaacatcaaaagaaacgaacactatttttacatcattcaatagaaatttcagagctagaaacgatggtaataggaatacaatgaatttcttaacatccccagaaatagtaacagcgatgagttattctggagatgctcagttcaatccgctaactgactcaattaaattgccaaatgggaaggatttcaaattccaaccaccaaagggtgatgagttaccaaaaagaggatttgaacacggtagagacaaattttatcctgaaatggatccaaagccagatagcaatgtagagattaaggtagaccctaattctgatcgtttgcaattattagagccattcaaaccttggaacgggaaggaattgaagacaaacgtgcttttgaaagttgaaggtaaatgtacaacagatcatatttccgctgcgggcgtctggttgaaatataaaggccatctagaaaacatttcttacaatacattgattggtgcacaaaacaaagaaaccggtgaagtcaacaaggcttatgaccttgacggaactgaatatgatattcctggtttgatgatgaaatggaaatcagacggtagaccatggaccgtgatagcggaacataactatggtgaaggttccgcaagagagcatgctgctttgtcaccaagatttttaggcggagagattcttttagttaagtcttttgcaagaattcatgagacaaacttgaagaaacaaggtgtgttgccattgacttttgccaacgaatctgactatgataaaatatcaagcggagatgttttagaaacgttgaacctagttgacatgattgctaaggatggtaataacggtggtgaaattgatgttaaaattactaaaccaaacggtgaatcgttcaccatcaaggcaaaacatactatgtctaaagatcaaatcgattttttcaaagctggttcagcaatcaattatattggtaatatacgaagaaacgaataa

SEQ ID NO: 67151 - protein, 789 aa, Saccharomyces cerevisiae
MLSSANRFYIKRHLATHANMFPSVSKNFQTKVPPYAKLLTNLDKIKQITNNAPLTLAEKILYSHLCDPEESITSSDLSTIRGNKYLKLNPDRVAMQDASAQMALLQFMTTGLNQTSVPASIHCDHLIVGKDGETKDLPSSIATNQEVFDFLESCAKRYGIQFWGPGSGIIHQIVLENFSAPGLMMLGTDSHTPNAGGLGAIAIGVGGADAVDALTGTPWELKAPKILGVKLTGKLNGWSTPKDVITKLAGLLTVRGGTGYIVEYFGEGVSTLSCTGMATICNMGAEIGATTSTFPYQEAHKRYLQATNRAEVAEAADVALNKFNFLRADKDAQYDKVIEIDLSAIEPHVNGPFTPDLSTPISQYAEKSLKENWPQKVSAGLIGSCTNSSYQDMSRVVDLVKQASKAGLKPRIPFFVTPGSEQIRATLERDGIIDIFQENGAKVLANACGPCIGQWNREDVSKTSKETNTIFTSFNRNFRARNDGNRNTMNFLTSPEIVTAMSYSGDAQFNPLTDSIKLPNGKDFKFQPPKGDELPKRGFEHGRDKFYPEMDPKPDSNVEIKVDPNSDRLQLLEPFKPWNGKELKTNVLLKVEGKCTTDHISAAGVWLKYKGHLENISYNTLIGAQNKETGEVNKAYDLDGTEYDIPGLMMKWKSDGRPWTVIAEHNYGEGSAREHAALSPRFLGGEILLVKSFARIHETNLKKQGVLPLTFANESDYDKISSGDVLETLNLVDMIAKDGNNGGEIDVKITKPNGESFTIKAKHTMSKDQIDFFKAGSAINYIGNIRRNE

SEQ ID NO: 67152 - DNA, 2730 bp, Bacillus subtilis
  CDS (1)..(2730): transl_table=11
atggcaaacgagcaaaaaactgcagcaaaagacgttttccaagcgagaaaaacgtttactacaaatgggaaaacatatcattactactctttaaaagcgttagaagattcaggtataggaaaggtttcgaagcttccttattccatcaaagttcttttagaatcagtattgcgtcaagttgacggcttcgttatcaaaaaagaacacgtggaaaatttggcaaaatggggaactgccgaattaaaggatatcgacgttccgttcaaaccgtctcgtgttattttacaagacttcacaggggttccggcagtagtagatctggcttcactgcgtaaagcaatggcagctgtcggcggagatcctgataaaatcaaccctgaaattcctgttgatctcgttatcgatcactctgtacaggtagataaagcgggtacagaagatgcattagcagtaaatatggacttggaattcgaaagaaatgcagagcgctacaaatttttaagctgggcaaagaaagcgtttaacaattatcaggcagtaccgcctgcaacaggtattgtgcaccaggtcaaccttgagttcttggcaagtgttgtccatgccattgaagaagacggcgagcttgtaacgtatcctgatacgcttgtcggaacagactcacacacaacaatgattaacggtatcggtgttctcggctggggtgtcggtggaattgaagctgaagcgggaatgcttggacagccttcttacttcccagttccagaggtaatcggcgcgaaacttgtcggcaagcttccaaacggaacaacagctactgacttggcgttaaaagtaacacaagtgctgcgtgaaaaaggcgttgtcggtaaatttgttgaattcttcggaccgggaattgctgaactgccgcttgcagatcgcgcaacaattgcgaatatggctccggaatacggtgctacatgcggattcttcccagtagatgaagaagcgcttaactacctgcgcctgactggccgtgatcctgaacatattgatgttgttgaagcatactgcagaagcaatggcttgttctacactccagatgcggaagaccctcaatttactgatgtggttgaaattgacctgtctcaaattgaagcaaacttatcgggtccaaagcgtcctcaggatttgatcccgctatctgctatgcaggaaacgtttaaaaagcaattagtcagccctgcaggtaaccaaggattcggtttaaatgctgaggaagaaaataaagaaattaagtttaaactccttaacggcgaagaaacagttatgaaaacgggtgcgatcgccattgctgcgattacaagctgtacaaatacatcaaacccatacgtgctgatcggcgccggactggtagcgaaaaaagcggttgagttagggcttaaggtgcctaattacgtgaaaacgtcacttgcaccgggttctaaagttgttacaggatatcttgtgaattcaggccttcttccatacatgaaagagcttggctttaacctcgttgggtacggctgtacaacatgtatcgggaactcaggtccgctttcaccggaaatcgaagaagcggttgcgaaaaatgatcttctgattacgtctgtcctttccggaaaccgtaactttgaaggacgtattcacccgcttgttaaaggcaactatcttgcttcaccgccgcttgttgtggcatatgcgctggctggaacggtaaacattaacttaaaaaccgatccaatcggtgtgggcaaggatggtcaaaacgtatactttaatgatatttggccgtcaatggacgaaatcaatgcacttgttaagcaaactgttacgccagagctattccgcaaagagtatgaaacagtatttgatgacaacaagcgctggaacgaaattgaaacaacagatgaagctttatataaatgggataacgattcaacttacatccaaaacccaccattctttgaagagatgtctgttgagccaggcaaggttgagccattaaaaggactgcgtgttgtcggtaaattcggcgattcagtcacaactgaccatatttctcctgcgggggcaatcggaaaagatacgcctgccggaaagtatttgcaagaaaaaggtgtttcacctcgtgactttaactcctacggctcccgccgtggaaaccatgaagtcatgatgagaggaacatttgccaacattcgcatcaaaaaccaaatcgcaccgggtacagaaggcggatttacgacgtactggccgactggtgaagtaacatccatctatgatgcatgcatgaaatacaaagaagataaaaccggtcttgtcgtattagcaggaaaagactatggtatgggatcttcacgtgactgggctgcaaaaggaacaaaccttctcggcatcagaacggtcattgcagagagcttcgaaagaattcacagaagcaatcttgtattcatgggtgtgctgccgcttcagtttaaacaaggtgaaaatgcggatacactcggcttaacgggtaaagaagtcatcgaggtagatgttgatgaaacagttcgtcctcgtgaccttgtgactgtaagagcaatcaatgaagacggcaatgtaacaacttttgaagcagtcgtccgctttgatagtgaagttgaaattgattactaccgccatggcggcatccttcaaatggtgcttcgtgaaaaaatgaagcagtcctga

SEQ ID NO: 67153 - protein, 909 aa, Bacillus subtilis
MANEQKTAAKDVFQARKTFTTNGKTYHYYSLKALEDSGIGKVSKLPYSIKVLLESVLRQVDGFVIKKEHVENLAKWGTAELKDIDVPFKPSRVILQDFTGVPAVVDLASLRKAMAAVGGDPDKINPEIPVDLVIDHSVQVDKAGTEDALAVNMDLEFERNAERYKFLSWAKKAFNNYQAVPPATGIVHQVNLEFLASVVHAIEEDGELVTYPDTLVGTDSHTTMINGIGVLGWGVGGIEAEAGMLGQPSYFPVPEVIGAKLVGKLPNGTTATDLALKVTQVLREKGVVGKFVEFFGPGIAELPLADRATIANMAPEYGATCGFFPVDEEALNYLRLTGRDPEHIDVVEAYCRSNGLFYTPDAEDPQFTDVVEIDLSQIEANLSGPKRPQDLIPLSAMQETFKKQLVSPAGNQGFGLNAEEENKEIKFKLLNGEETVMKTGAIAIAAITSCTNTSNPYVLIGAGLVAKKAVELGLKVPNYVKTSLAPGSKVVTGYLVNSGLLPYMKELGFNLVGYGCTTCIGNSGPLSPEIEEAVAKNDLLITSVLSGNRNFEGRIHPLVKGNYLASPPLVVAYALAGTVNINLKTDPIGVGKDGQNVYFNDIWPSMDEINALVKQTVTPELFRKEYETVFDDNKRWNEIETTDEALYKWDNDSTYIQNPPFFEEMSVEPGKVEPLKGLRVVGKFGDSVTTDHISPAGAIGKDTPAGKYLQEKGVSPRDFNSYGSRRGNHEVMMRGTFANIRIKNQIAPGTEGGFTTYWPTGEVTSIYDACMKYKEDKTGLVVLAGKDYGMGSSRDWAAKGTNLLGIRTVIAESFERIHRSNLVFMGVLPLQFKQGENADTLGLTGKEVIEVDVDETVRPRDLVTVRAINEDGNVTTFEAVVRFDSEVEIDYYRHGGILQMVLREKMKQS

SEQ ID NO: 67154 - DNA, 2721 bp, Bradyrhizobium japonicum
  CDS (1)..(2721): transl_table=11
atgacctcgctcgacagcttcaaatgcaaaaagacccttaaggtcggcgccaagacctatgtctattacagcctgcccacggccgagaagaatggtctgaagggaatttcgaaactcccctattcgatgaaggtcctgctcgagaacctcctgcgcaatgaggacggccgctcggtcaagaaggcggacatcgtcgcggtgtccaaatggctgcgcaagaagtcgctggagcacgagatcgcgttccgcccggcgcgcgtgctgatgcaggacttcaccggcgtgcccgcggtggtcgatctcgccgcgatgcgcaacgcgatgcagaagctcggcggcgatgccgagaagatcaacccgctggtgccggtcgatctcgtcatcgaccattccgtgatcgtgaacttcttcggcgacaacaaggccttcgccaagaacgtcaccgaggaatacaagcagaaccaggagcgctacgagttcctgaagtggggccaggcggcgttctcgaacttctccgtcgtgccgcccggcaccggcatctgccaccaggtcaatctcgaatatctctcccagacggtctggaccaagaaggagaagatgacggtcggcaagaagaccggcaccttcgaggtcgcctatcccgactcgctggtcggcaccgattcccacaccacgatggtcaacggtctcgccgtgctcggctggggcgtcggcggcattgaggcggaagcctgcatgctcggccagccgctgtcgatgctgctgcctaacgtcgtcggcttcaagctgaagggcgcgatgaaggaaggcgtcaccgcgaccgacctcgtgctgaccgtgacgcagatgctgcgcaagctcggcgtcgtcggcaagttcgtcgagttcttcggccccggcctcgatcatctctccgtcgccgacaaggcgaccatcgccaacatggcgcccgaatatggcgcgacctgcggcttcttcccggtcgacgccgcggcgatcgactacctcaagacctccggccgcgccgcaccgcgcgttgcgctggtgcaggcctatgccaaggcgcaggggctgttccgcaccgccaagtcggccgatccggtgttcacggaaacgctgacgctcgacctcgccgacgtcgtgccgtcgatggccggtccgaagcgtcccgaaggccgcatcgcgctgccgtcggtcgcggaaggcttctcggtcgcgctcgccaatgagtacaagaagaccgaagagccggcgaagcgctttgccgtcgaaggcaagaagtacgagatcggccatggcgacgtcgtgatcgcggcgatcacctcctgcaccaacacctcgaacccgagcgtgctgatcggcgccgggctcctggcccgcaatgccgcggcgaagggcctcaaggccaagccgtgggtgaagacctcgcttgccccgggcagccaggtggtcgcggcctatctcgccgattccggcctccaggcccacctcgacaaggtcggcttcaacctggtcggcttcggctgcaccacctgcatcggcaattccggtccgctgccggaggagatctcgaagtcgatcaacgacaacggcatcgttgccgccgccgtgctctccggtaaccgcaacttcgaaggccgcgtctcgccggacgtgcaggcgaactatctggcctcgccgccgctggtcgtcgctcacgcgctcgcgggtagcgtgaccaagaacctcgccgtcgagccgctcggtgaaggcaaggacggcaagccggtgtacctcaaggacatctggccgacgtcgaaggagatcaacgccttcatgaagaagttcgtgaccgcgtcgatcttcaagaagaagtatgccgacgtgttcaagggcgacaccaactggcgcaagatcaagaccgtcgagagcgagacctatcgctggaacatgagctcgacctacgtgcagaacccgccctacttcgaaggcatgaagaaggagccggagccggtcaccgacatcgtcgaggcgcgcatcctcgccatgttcggcgacaagatcaccaccgaccacatctcgccggccggttcgatcaagctcacctcgcccgcgggcaagtatctcagcgagcaccaggtgcgtcccgccgacttcaaccagtacggcacccggcgcggcaaccatgaagtgatgatgcgcggcaccttcgccaacatccgcatcaagaacttcatgctcaagggcgccgacggcaacatcccggaaggcggcctcaccaagcactggcccgacggcgagcagatgtcgatctacgacgccgcgatgaagtaccagcaggagcaggtgccgctggtggtgttcgccggcgccgaatacggcaacggctcctcgcgcgactgggctgcaaagggcacgcgcctgctcggcgtgcgcgcggtgatctgccagagcttcgagcgcatccatcgctccaatcttgtcggtatgggcgtgttgccgctgaccttcgaggaaggcacctcctggtcgtcgctcggcctgaagggcgacgagaaggtcacgctgcgtggtctcgtcggcgatctgaagccgcgccagaagctgaccgcggagatcgtctccggcgacggttcgttgcagcgcgtttcgctgctttgccgcatcgatacgctggacgaactcgactactaccggaacggcggcatcctgcactacgtgctgcgcaagctcgcggcttaa

SEQ ID NO: 67155 - protein, 906 aa, Bradyrhizobium japonicum
MTSLDSFKCKKTLKVGAKTYVYYSLPTAEKNGLKGISKLPYSMKVLLENLLRNEDGRSVKKADIVAVSKWLRKKSLEHEIAFRPARVLMQDFTGVPAVVDLAAMRNAMQKLGGDAEKINPLVPVDLVIDHSVIVNFFGDNKAFAKNVTEEYKQNQERYEFLKWGQAAFSNFSVVPPGTGICHQVNLEYLSQTVWTKKEKMTVGKKTGTFEVAYPDSLVGTDSHTTMVNGLAVLGWGVGGIEAEACMLGQPLSMLLPNVVGFKLKGAMKEGVTATDLVLTVTQMLRKLGVVGKFVEFFGPGLDHLSVADKATIANMAPEYGATCGFFPVDAAAIDYLKTSGRAAPRVALVQAYAKAQGLFRTAKSADPVFTETLTLDLADVVPSMAGPKRPEGRIALPSVAEGFSVALANEYKKTEEPAKRFAVEGKKYEIGHGDVVIAAITSCTNTSNPSVLIGAGLLARNAAAKGLKAKPWVKTSLAPGSQVVAAYLADSGLQAHLDKVGFNLVGFGCTTCIGNSGPLPEEISKSINDNGIVAAAVLSGNRNFEGRVSPDVQANYLASPPLVVAHALAGSVTKNLAVEPLGEGKDGKPVYLKDIWPTSKEINAFMKKFVTASIFKKKYADVFKGDTNWRKIKTVESETYRWNMSSTYVQNPPYFEGMKKEPEPVTDIVEARILAMFGDKITTDHISPAGSIKLTSPAGKYLSEHQVRPADFNQYGTRRGNHEVMMRGTFANIRIKNFMLKGADGNIPEGGLTKHWPDGEQMSIYDAAMKYQQEQVPLVVFAGAEYGNGSSRDWAAKGTRLLGVRAVICQSFERIHRSNLVGMGVLPLTFEEGTSWSSLGLKGDEKVTLRGLVGDLKPRQKLTAEIVSGDGSLQRVSLLCRIDTLDELDYYRNGGILHYVLRKLAA

SEQ ID NO: 67156 - DNA, 2886 bp, Mycobacterium avium
  CDS (1)..(2886): transl_table=11
atgcaggacaagcgtactgttaaagttggcaccgtcgccgacacggccgtcggcggaagaactaaatccttgggagttgaagtgactgattctgtgaactcgttcggagcccgcaacagggtcaaggtcggcgacaagagttaccagatctatcgcctcgacgccgtccccaataccgagaagcttccctacagcctcaaggtgctggccgagaacctgctgcgcaacgaggacggcagcaacatcaccaaagaccacatcgaggccatcgcgaactgggatcccaaggccggagccagcattgagatccagtacacgcccgcccgggtggtgatgcaggacttcaccggggtgccgtgcatcgtcgacctggccactatgcgggaggcgatcgccgacctgggcggcaacccggagaaggtcaacccgctcgcgccggccgacctggtgatcgaccactcggtgatcgccgacctgttcggcacggccgacgcgttcgagcgcaacgtcgagatcgaataccagcgcaacggcgagcgctaccagttcctgcgctggcttcagggcgccttctccgacttcaaggtggtgccgccgcgacggatcgtgcaccaggtgaacatcgagtacctggcccgggtggtgatggagcgcgtcggggtggcctatccggacacctgcgtgggcaccgactcgcacaccacgatggtcaacggcctgggcgtgctgggctggggcgtcggcggcatcgaggccgaggccgcgatgctcggccagccggtgtcgatgctgatcccgcgggtggtcggcttcaagctgaccggtgaagatccagcccctggagccgccaccgacgtggtgctgacggtcaccgagatctgcgcgaagcacggcgtggtcggcaagttcgtcgagttctacggcgagggggtggccgaggtgccgctggccaaccgcgccaccctgggcaacatgagccccgaattcggttccaccgcagcgattttcccgatcgaccaggaaaccatcgactacctgaagttcaccggccgcaacgccgagcaggtggcgctggtcgagacctacgccaaagagcagggcctgtggcacgaccccgcccacgagccggccttctcggagtacctggagctcgacctgtcccaggtggtgccctcgatcgcggggcccaagcgcccccaggaccgaattgcgttgtcgcaggccaagtccgtcttccgcgagcagatccccagctacgtcggcgacggcgacgggcagcagggctactcgaagctggacgaggtggtcgacgagacgttcccggccagcgacccgggggcgccgtccaacggccacgccgacgacctgcccgcggtgcagtcggccgccgcgcacgccaacggccgcccgagcaacccggtgacggtccgctccgacgagctgggcgagttcgtgctcgaccacggcgcggtggtgatcgccgcggtcacgtcgtgcaccaacacctccaaccccgaggtgatgctgggcgcggcgctattggcccggcaacgcgttgagaaggggctggcctccaagccgtgggtgaagaccacgatggcgccgggctcgcaggtggtccacgactactacgacaaggccgggctgtggccgtatttggagaagctcggcttctatctggtcggctacggctgcaccacctgcatcggcaactccggtccgctgcccgaggagatctcgaaggccatcaacgacaacgacctgtcggtgaccgcggtgctctcgggtaaccgcaacttcgagggccgcatcaacccggacgtgaagatgaactaccctgcatcgccgccgctggtggtggcctacgcgctggccggcaccatgactcgactcgaaaagcagccgctgggcaaggacaaggacggcaacgacgtctacctgaaggacatctgccggtcgcagaagactctcggacaccatccgatcggcgacaactccgagtggttcaccaagaactacgccgacgtcttcaagggtgagcaggcctggcgcaacctgcccaccccgacgcggaatacctttgagtggagcccggattcgacgtacgtgcgcaagccgccgtacttcgagggcatgccagccgagcccgagccggtcgccgacatctccagcgcgcgggtcgtggcgctgctgggcgactcggtgaccaccgaccacatctcccccgccggcagcatcaagccgggcaccccggcggcgcagtacctcgacgacgcacggcgtggaccgcaaggattacaactcttcggctgccggcgcggcaaccatgaggtgatgatccgcggcacgttcgccaacatccggctgcgcaacctgctgcacgacgacgtggccggcggctacacccgcgacttcacccaggacggcggtccgcaggcgttcatctacgacgcggcgcaaaactatgcggcacagaacattccgctggtggtgctgggcggcaaggaatacgggtccggctcgtcgcgagactgggcggccaagggcacccggctgctgggcgtacgcgcggtgatcgccgagtcgttcgaacggatccaccgctccaacctgatcgggatgggtgtgatcccgctgcagttcccggacggcaaatcggccaaggacctggggctggacggcaccgaggtgttcgacatcaccggcatcgaagagctcaacaagggcaagacaccgaagacggtgcacgtcaaggcgagcaaaaacggttcggacgcagctgaattcgatgcggtggtgcgcatcgacacccccggtgaggcggactactaccgcaacggcggcatcctgcagtacgtgctgcgcaacatgctcaagtccggctga

SEQ ID NO: 67157 - protein, 961 aa, Mycobacterium avium
MQDKRTVKVGTVADTAVGGRTKSLGVEVTDSVNSFGARNRVKVGDKSYQIYRLDAVPNTEKLPYSLKVLAENLLRNEDGSNITKDHIEAIANWDPKAGASIEIQYTPARVVMQDFTGVPCIVDLATMREAIADLGGNPEKVNPLAPADLVIDHSVIADLFGTADAFERNVEIEYQRNGERYQFLRWLQGAFSDFKVVPPRRIVHQVNIEYLARVVMERVGVAYPDTCVGTDSHTTMVNGLGVLGWGVGGIEAEAAMLGQPVSMLIPRVVGFKLTGEDPAPGAATDVVLTVTEICAKHGVVGKFVEFYGEGVAEVPLANRATLGNMSPEFGSTAAIFPIDQETIDYLKFTGRNAEQVALVETYAKEQGLWHDPAHEPAFSEYLELDLSQVVPSIAGPKRPQDRIALSQAKSVFREQIPSYVGDGDGQQGYSKLDEVVDETFPASDPGAPSNGHADDLPAVQSAAAHANGRPSNPVTVRSDELGEFVLDHGAVVIAAVTSCTNTSNPEVMLGAALLARQRVEKGLASKPWVKTTMAPGSQVVHDYYDKAGLWPYLEKLGFYLVGYGCTTCIGNSGPLPEEISKAINDNDLSVTAVLSGNRNFEGRINPDVKMNYPASPPLVVAYALAGTMTRLEKQPLGKDKDGNDVYLKDICRSQKTLGHHPIGDNSEWFTKNYADVFKGEQAWRNLPTPTRNTFEWSPDSTYVRKPPYFEGMPAEPEPVADISSARVVALLGDSVTTDHISPAGSIKPGTPAAQYLDDARRGPQGLQLFGCRRGNHEVMIRGTFANIRLRNLLHDDVAGGYTRDFTQDGGPQAFIYDAAQNYAAQNIPLVVLGGKEYGSGSSRDWAAKGTRLLGVRAVIAESFERIHRSNLIGMGVIPLQFPDGKSAKDLGLDGTEVFDITGIEELNKGKTPKTVHVKASKNGSDAAEFDAVVRIDTPGEADYYRNGGILQYVLRNMLKSG

SEQ ID NO: 67158 - DNA, 2637 bp, Rickettsia felis
  CDS (1)..(2637): transl_table=11
atgtcaaaagtgcataattcagaatatataaaagagttatcagtcgataatacttcctacaaaatttacgatataaataaagcggcaagcgatatcgaacttcccttaaaaaagcttccatatagtttaagagtgttatttgagaatgtattacgttctaatggttcaaagcaaaacttacttgtttttaaagaatggctaaaaactaaagaatctgatgcggaaatagattttatgccggcaagagttttgatgcaggattttaccggtgtgcctgctattgtggacctagctgctatgcgtgatgcgatgaagaaaataggaggcgatccgttaaaaattaatccgcttattcctgttgatttggtaatagaccattccgtaagcgttgattcttatgcagctaaagattcattcgataaaaacgtgcaaatggaaatgaaacgcaatattgagcgttatcagtttcttaaatgggggcagcaggcatttaataattttaaagtagtgccgcctggtacgggtatttgtcatcaggtaaatttagaatatttagcaaaagtcgtgtggcataaagacggacttgcttaccctgatagtttagttggaactgatagccatacaaccatggtaaatggattatcggtgcttggttggggagttggcggaatagaagcagaagctgcaatgcttggacaacctcttactatgattctaccggaagtaatcggtgtaaaactaacaggaaaattaacaggtatagctaccgcaaccgatttagtgttaaccgttaccgagatgttgcggaaaaagaaagtagtaggtaaatttgttgagtttttcggtgagggactaaaaaatctaacgattgccgatcgtgctaccatttctaatatgtcgcctgaatacggtgctacttgtggctttttcccgattgaccaagaaactataaaatatttagagctaacaggtagagaaaaaacgcaaatcaaattagtagaaaaatacgcaaacgagcagaatctttggtatgattttgagcatgaggcagaatataccgaaattttagagctagatttatctatggtacatagctcgcttgccgggccaagacgtccgcaagatagggtagatttaaacgatgtagcaaataattttaaacatgaattaccgaatttcggtatagaaaataaagacattgataaaaaatatgccgtagcaaatcagaattatgaaatcggtaacggcgatgtggtaattgcagcaattactagctgtactaatacttctaatcctagcgtgatgattggtgcagcacttcttgctaaaaaagcactagaacatgggttaaaggtaaagccttgggttaaaacttctcttgctcctggctcaaaagtcgtaacagaatatttgaagcttagcggtcttgataaatatttagatgaattagggtttaatctagtaggttacggctgcactacttgcatcggtaattccggacctctaaatccggaaatagaggaaactattaacaaaaacgggctagttgttgcttctgttttatccggtaataggaattttgaagggcgaattaatccacttactaaagcaagctatctcggctcgcctattttagttgtagcatatgcacttagtggcactcttaatatagatttaaataatcagcctataggaaaaaatatttatttaaaagatatttggccaagcaaagaagagatagatgaagttattgcaaattcaattaattcctctatgtttatagaaaaatattctgatatatttagtggaacgaaagagtggaaagatttacagattacaactagctctacttataactggaataagaacagtacctatattaataatccgccttattttgaggatataggcagcaagaataatataaaagatataaaatctgcaaaaattctagcaattttcggtgattctattactaccgatcatatttcgcctgcaggaagtattagtaaaaccagccctgctgctaaatatttaacggacaatcatatagagcctctagatttcaactcttacgggtcacgtagagggaatcatgaagtgatgatgcgtggcacatttgctaatatccgtataaaaaacgaaatgtgtaagggagtagaaggcggctttactataaaccaattaagtagtacgcagcaaactatttacgatgcggctatggactataaagctaatgatgtacctgtagtgatttttgccggtaaagaatatggtagcggttcgtctagagattgggcggcaaaaggtccgcaactgcttggagtaaaggcagtgattgccgagagctttgagcgaatacatcgttcaaatttagttggtatgggtattttaccgctaacttttaccggcaataatacaagattagatttaaagctagacggttcagaaactattgatattataggcttaagtgaacaaataaagccttataatcctgttaaatgcatgataaaaaaacaaactggcgaaacaagaacaatcgatttaatattgcaaatatttacggataatgagataaattatataaagcacggcagtattatgcattttgtggtagagaatttgaaggggtag

SEQ ID NO: 67159 - protein, 878 aa, Rickettsia felis
MSKVHNSEYIKELSVDNTSYKIYDINKAASDIELPLKKLPYSLRVLFENVLRSNGSKQNLLVFKEWLKTKESDAEIDFMPARVLMQDFTGVPAIVDLAAMRDAMKKIGGDPLKINPLIPVDLVIDHSVSVDSYAAKDSFDKNVQMEMKRNIERYQFLKWGQQAFNNFKVVPPGTGICHQVNLEYLAKVVWHKDGLAYPDSLVGTDSHTTMVNGLSVLGWGVGGIEAEAAMLGQPLTMILPEVIGVKLTGKLTGIATATDLVLTVTEMLRKKKVVGKFVEFFGEGLKNLTIADRATISNMSPEYGATCGFFPIDQETIKYLELTGREKTQIKLVEKYANEQNLWYDFEHEAEYTEILELDLSMVHSSLAGPRRPQDRVDLNDVANNFKHELPNFGIENKDIDKKYAVANQNYEIGNGDVVIAAITSCTNTSNPSVMIGAALLAKKALEHGLKVKPWVKTSLAPGSKVVTEYLKLSGLDKYLDELGFNLVGYGCTTCIGNSGPLNPEIEETINKNGLVVASVLSGNRNFEGRINPLTKASYLGSPILVVAYALSGTLNIDLNNQPIGKNIYLKDIWPSKEEIDEVIANSINSSMFIEKYSDIFSGTKEWKDLQITTSSTYNWNKNSTYINNPPYFEDIGSKNNIKDIKSAKILAIFGDSITTDHISPAGSISKTSPAAKYLTDNHIEPLDFNSYGSRRGNHEVMMRGTFANIRIKNEMCKGVEGGFTINQLSSTQQTIYDAAMDYKANDVPVVIFAGKEYGSGSSRDWAAKGPQLLGVKAVIAESFERIHRSNLVGMGILPLTFTGNNTRLDLKLDGSETIDIIGLSEQIKPYNPVKCMIKKQTGETRTIDLILQIFTDNEINYIKHGSIMHFVVENLKG

SEQ ID NO: 67160 - DNA, 2637 bp, Rickettsia prowazekii
  CDS (1)..(2637): transl_table=11
atgtcaaaagttcataattcagaatatataaaagagttagtagtcgataatacttcatataaaatttacgatataaataaagcagcaagtgatatcggacttcctttaaaaaagctcccttatagtttaagagtattattagaaaacgtgctacgcaccaatgggaataaggaaaacttacttgtatttaaagaatggttaaaaactaaaaaatctaatacagagatagattttatgcctgcaagagttttaatgcaggattttactggtgtgcctgctattgtagatttagctgctatgcgtgatgctatgcagaaaataggatgtaatccgctaaaaattaatccacttattcctgttgatttagtaatagatcattccgtaagcgttgattcttacggaaataaggagtcatttgatcaaaatgttcacatggaaatgaaacgcaatatcgagcgttatcaatttcttaagtggggacagcaggcatttaataattttaaagtagtaccacctggtacaggtatttgtcatcaggtgaatttagaatttttatcacaagtcgtgtggcataatgatggaactgcttaccctgatagtttagttggtacagatagccatacaactatggtaaacggtttatcagttcttggttggggagttggaggtatagaggcggaatctgcaatgcttggtcaacctattactatgatcataccagaggtaattggagtaaaattaataggaaagttagcaggaatggctacagcaactgatctagtgctcacaattactgagatattgcgtagaaaaaaagtagtaggtaaatttgttgagtttttcggtaatgggcttagaaacctaacgatttcagatcgtgctactatttctaatatgtcacctgaatatggtgctacttgcggatttttcccgattgatcaagaaactctaaaatatctagaggtaacaggtagagaaataacacagattaaattagtagagaaatatgcaattgagcagaacctttggtataattgtgaagatactcaagaatatactgaggttttagagttagatttatctactgtatatagttcacttgccggtccaaaacgtccacaagatcgagtaaacttaaactgtgtagcaagtaattttcaaaatgaattaccatacttcgctttagcaaataaagatattgataaaaaatatgctgtagcaaatcagaattatgcaattggtaatggtgatgtggtgattgccgcaattactagttgtactaatacttctaatcctagcgttatgataggtgcagcacttcttgctaaaaaagcactagagcacggattaaatgtaaagccttgggttaaaacttcacttgcgcctggttcaaaagtcgtaacagaatatttgaagcttagcggtcttgataaatatttagatgcacttgggtttaatcttgtaggttatggttgtactacttgcatcggtaattctggctctttaaatccggaaatagagaacactattaataaaaacagactagttgttgcttctgttttatcaggtaataggaattttgaaggtcggattaatccgcttactaaagcaagctatcttgcttcacctattttagttgtggcatatgcacttagtggaactcttaatatagatctaacaaatactcccataggagcaaatatttatttaaaagatatttggccaagccaaaaagagatagatgaagttattgcaaattcaattaattcatctatgtttatagaaaaatatgctgatgtatttaatggcacaaaagagtggcgcgatttacagattactactggcactaattataattgggataagaatagtacatatattaataatccaccttattttgataatataggtagcgagcatagtataaaagatataaaatctgcaagaattctagcaatttttggtgattctattactacagatcatatttcgcccgcaggcagcattagtaaaaatagtcctgctgctaaatatttaataaaacatcatatagagcctttagattttaactcttatggatcacgtagagggaatcatgaagtaatgatgcgtggtacatttgctaatattcgtataaaaaatgagatgtgtaatggcgtagaaggcggtttcactataaatcagttgagcggtgtacaacaaactatttacgatacagctatggattataaagctcatgatataccgttagtgatttttgcaggtaaagaatatgggagtggatcgtctagagactgggcagcaaaaggtcctggattgcttggtataaaggcagtgattgccgagagctttgaacgaatacatcgctcaaatttagtaggaatgggtattctcccgttaacttttacgggcaaaaatacaagattaaatttaaagttagatggttcagaaattattgatcttataggtttaagtgagaatatcaaaccttataatcttgttaaatgtgtgataaaaaaacaaactaatgaaataagtacaatcgatttaatattgcaaatatttacggagaatgagataaattatataaagcacggtagcattatgcagtttgtggtagagagtttgaaaggatag

SEQ ID NO: 67161 - protein, 878 aa, Rickettsia prowazekii
MSKVHNSEYIKELVVDNTSYKIYDINKAASDIGLPLKKLPYSLRVLLENVLRTNGNKENLLVFKEWLKTKKSNTEIDFMPARVLMQDFTGVPAIVDLAAMRDAMQKIGCNPLKINPLIPVDLVIDHSVSVDSYGNKESFDQNVHMEMKRNIERYQFLKWGQQAFNNFKVVPPGTGICHQVNLEFLSQVVWHNDGTAYPDSLVGTDSHTTMVNGLSVLGWGVGGIEAESAMLGQPITMIIPEVIGVKLIGKLAGMATATDLVLTITEILRRKKVVGKFVEFFGNGLRNLTISDRATISNMSPEYGATCGFFPIDQETLKYLEVTGREITQIKLVEKYAIEQNLWYNCEDTQEYTEVLELDLSTVYSSLAGPKRPQDRVNLNCVASNFQNELPYFALANKDIDKKYAVANQNYAIGNGDVVIAAITSCTNTSNPSVMIGAALLAKKALEHGLNVKPWVKTSLAPGSKVVTEYLKLSGLDKYLDALGFNLVGYGCTTCIGNSGSLNPEIENTINKNRLVVASVLSGNRNFEGRINPLTKASYLASPILVVAYALSGTLNIDLTNTPIGANIYLKDIWPSQKEIDEVIANSINSSMFIEKYADVFNGTKEWRDLQITTGTNYNWDKNSTYINNPPYFDNIGSEHSIKDIKSARILAIFGDSITTDHISPAGSISKNSPAAKYLIKHHIEPLDFNSYGSRRGNHEVMMRGTFANIRIKNEMCNGVEGGFTINQLSGVQQTIYDTAMDYKAHDIPLVIFAGKEYGSGSSRDWAAKGPGLLGIKAVIAESFERIHRSNLVGMGILPLTFTGKNTRLNLKLDGSEIIDLIGLSENIKPYNLVKCVIKKQTNEISTIDLILQIFTENEINYIKHGSIMQFVVESLKG

SEQ ID NO: 67162 - DNA, 2337 bp, Schizosaccharomyces pombe
  CDS (1)..(2337)
atgggctcgcgtatttttacgcaatccaccctcagaagcttttcatgcgctcctgtcgcagccaacattgacgctaaaaaggttgccatgagcaactttgaaaaaaataaatttattaattatcagcgcatcaaagacaatctcgagattgttaagaagcgcttaaaccgtcctctcacatattcagaaaaaatcctttacggtcacttggacgatcccgtaaatcaggatattgaacgtggtgtctcttacttgaagcttcgtcctgatcgtgttgcttgtcaggatgccactgcacaaatggctatccttcaatttatgtccgcgggtatgccggaggtcgctgtccccgtcactgtccattgtgaccacttgatcgaagcctacgaaggtggtcctatcgatctcgaacgtgccaacgttaccaataaggaggtttacgactttttacaaaccgcttgtgccaaatacaacataggcttttggcgccctggttcgggtatcattcatcaaatcgtccttgaaaactatgccttccccggtggtttgttgattggtactgattctcacactcccaacgccggtggtctcggaatggtcgctataggtgttggtggtgctgacgctgtcgatgttatggccaatttgccttgggagttgaagtgtcctaaagtcatcggtgttaagctcactggtcaattaaagggttggacttctcccaaggacgttatcttaaaggttgctggtattcttaccgtcaaaggtggtaccggtgccattgttgagtactttggtcccggtgttgaatctctttcttgcactggtatgggtacgatctgtaacatgggtgctgaaatcggcgctactacctctatcttcccatttaaccctcgtatgtccgagtaccttcgtgccaccaaccgttccgctattgctgattatgctgaagaattcgcccctatcattgccgctgatgaaaatgctcactatgaccaaattattgaaattgatttgaacacattggaaccccatttgaacggtccctttacccccgatttggctaccccaatttccaagttcaaggaagccgtcaagaagaatgattggcctcaagagctcaaagttggtttgattggatcttgtactaactcctcctatgaggatatgtctcgtgctgcctccatttgccaacaagccatcgacaagggcattaaaaccaaatctttgtttaccatcacacccggttccgaacaagttcgtgctactttgactcgcgatggtcagttggacacaatgagaaaggctggtggtattgttttggctaacgcttgcggtccctgtatcggtcagtggaagcgtaccgatgttaagaagggagagaagaactcaatcgtcacctcttacaaccgtaacttcactggtcgtaacgatgctaaccctgccactcatgcttttgtaacctcccccgatattgttactgccatggttttctctggtgacatgaactttaaccctcttactgatactttgaaagataaggatggaaacgactttaagtttgaacctcctaccggtgctggtcttccttccaagggttacgacccaggaagcaacacttatgttgcacctagctcggtcaatgtcaaggatgtcgccattgatcctcattcgaagcgtttacaacgccttactcccttcaagaaatgggatggaaaggatatgaagggtttgaaaatccttatcaaggctaagggcaagtgtactactgatcatatctctgccgctggtccttggttgaagtaccgtggacatcttcaaaacatttctaataactatatgattggtgctattaatgctgaaaacggtgaagcaaataagttgaaggatcaactcaccggtgaatacaagactgtccccaacgttgctattgattatcgtgatcatggaatccgttgggttaccttgggtgaacaaaattttggtgaaggatcttctcgtgagcatgctgctctcgaacctcgttatttgggaggcgccgctgttatcaccaaatcttttgcccgtatccacgaaaccaatcttaaaaagcaaggtttgttgcctttgacttttgccgatcccgcagcttatgacaagatttctcctttcgacaccgtcgatatcgatggtctcactacctttgctcccggtaagcctttaactttggttgttcaccctgctgatggatctgctgagtggtctaccaaacttaaccatacctttaacaaggatcaaattgaatggttcaaggccggtagtgctttgaatcacatggcaaacatgcacaagcaaaagtaa

SEQ ID NO: 67163 - protein, 778 aa, Schizosaccharomyces pombe
MGSRIFTQSTLRSFSCAPVAANIDAKKVAMSNFEKNKFINYQRIKDNLEIVKKRLNRPLTYSEKILYGHLDDPVNQDIERGVSYLKLRPDRVACQDATAQMAILQFMSAGMPEVAVPVTVHCDHLIEAYEGGPIDLERANVTNKEVYDFLQTACAKYNIGFWRPGSGIIHQIVLENYAFPGGLLIGTDSHTPNAGGLGMVAIGVGGADAVDVMANLPWELKCPKVIGVKLTGQLKGWTSPKDVILKVAGILTVKGGTGAIVEYFGPGVESLSCTGMGTICNMGAEIGATTSIFPFNPRMSEYLRATNRSAIADYAEEFAPIIAADENAHYDQIIEIDLNTLEPHLNGPFTPDLATPISKFKEAVKKNDWPQELKVGLIGSCTNSSYEDMSRAASICQQAIDKGIKTKSLFTITPGSEQVRATLTRDGQLDTMRKAGGIVLANACGPCIGQWKRTDVKKGEKNSIVTSYNRNFTGRNDANPATHAFVTSPDIVTAMVFSGDMNFNPLTDTLKDKDGNDFKFEPPTGAGLPSKGYDPGSNTYVAPSSVNVKDVAIDPHSKRLQRLTPFKKWDGKDMKGLKILIKAKGKCTTDHISAAGPWLKYRGHLQNISNNYMIGAINAENGEANKLKDQLTGEYKTVPNVAIDYRDHGIRWVTLGEQNFGEGSSREHAALEPRYLGGAAVITKSFARIHETNLKKQGLLPLTFADPAAYDKISPFDTVDIDGLTTFAPGKPLTLVVHPADGSAEWSTKLNHTFNKDQIEWFKAGSALNHMANMHKQK

SEQ ID NO: 67164 - DNA, 2706 bp, Staphylococcus aureus
  CDS (1)..(2706): transl_table=11
atggctgcaaattttaaagagcaatcaaaaaaacattttgacttgaatggccaaagttatacttactatgatttaaaagctgtagaagagcaaggtattactaaagtttcgaaattaccttattcaattcgtgttttgttagaatctttacttcgtcaagaagatgattttgtaattacagacgatcatattaaagctttaagtcagtttggaaaagatggaaatgaaggcgaggtaccatttaaaccttctcgtgttattttacaagatttcacaggtgtaccagccgtagttgatttagcttctttacgtaaagcaatggatgacgttgggggagatattactaaaattaatccagaagtaccggtggatttagttattgaccactcagttcaagtggatagctatgcaaacccagaagcacttgaacgtaatatgaaattagaatttgaacgtaactatgaacgttatcagtttttaaattgggcaacgaaagcatttgataattacaatgcagttcctcctgcaactggaatagttcaccaagttaacctagaatatttagcaagtgttgtacatgttcgtgatgtagatggtgaaaaaactgcatttccagatacattagttggtactgattcacatacaacaatgataaatggtattggcgtactaggatggggtgttggtggtattgaagctgaagctggaatgcttggacaaccttcttatttcccaattccagaggttattggtgtacgactagtaaattcattaccacaaggcgcaacagcaactgatttagcgttgagagtaactcaagagctacgtaaaaaaggtgttgttggcaaatttgtagagttctttggtccaggtgtacaacatttaccactagcagaccgtgctacaatcgcaaacatggcacctgagtatggagcaacttgcggattcttcccagttgatgatgaatctcttaaatatatgaagttaactggtagatcagacgaacatatcgcgcttgtaaaagaatatttgaaacaaaaccatatgttctttgatgttgaaaaagaagatcctaattatacagatgttatcgaattggatttatcaacagttgaagcatcgctttcaggaccaaaacgtcctcaagatttaattttcttaagtgatatgaaatcatcatttgaaaattctgtaacagctccagcgggcaaccaaggacacggtttagataaaagtgaatttgataagaaagcagaaattaacttcaaagatggatcaaaagctacaatgaaaacaggtgatattgcaatagcagcaattacatcatgtacaaatacatctaacccttatgtaatgttaggtgcaggtttagttgctaaaaaagcagttgaaaaaggcttgaaagttcctgaatacgttaaaacttctctagcaccaggatcaaaagttgttaccggatatttaagaggtgctggcttacaaccctatttagatgatttaggcttcaacttggttggttatggatgtacaacttgtattggtaattcaggtcctttattaccagaaattgaaaaagcgattgctgatgaggacctattagtgacatctgtattatctggtaaccgtaactttgaaggtcgtatccatcctcttgttaaagccaattacctagcttcaccacagttagttgttgcttatgcattagctggatcggttgatattgatttacaaaatgaacctattggtaaaggtaatgacggtgaagatgtatatttgaaagatatttggccatcaattaaagaagtttcagataccgttgatagtgttgtaacacctgaattatttattgaagaatataataacgtatacaataacaacgaattatggaatgagattgatgtaactgatcaacctctatatgactttgatcctaattcaacatacattcaaaatccatcattcttccaaggattatctaaagaaccgggtacgattgttccgttaaatggtttacgtgttatgggtaaattcggtgattctgtgacaactgaccacatctctccagcaggtgcaattggtaaagatacgccagctggtaaatatttacaagatcaccaagtgcctattcgtgaatttaattcatatggttcaagacgtggtaatcacgaagtaatggttcgaggtacgtttgctaatatacgtattaaaaaccaattagcgccaggtactgaaggtggttttacaacttattggccaacaaatgaagtaatgcctatctttgatgctgcaatgaaatataaagaagatggtacaggtttagttgtattagctggtaacgattatggtatgggttcatctcgtgactgggcagcaaaaggtacaaacttattaggtgttaaaacggttattgcacaaagttatgaacgtatccatcgttcaaatttagttatgatgggtgtattaccattagagtttaaaaaaggtgaatcagctgattctcttggtctagatggtacagaagaaatttctgttaatattgatgaaaatgttcaaccacatgactacgtcaaagttactgctaagaagcaagatggtgatttggtagaatttgacgctatggttcgttttgactcacttgttgaaatggattactatcgccacggtggtattttacaaatggttttaagaaataaattagcgcaataa

SEQ ID NO: 67165 - protein, 901 aa, Staphylococcus aureus
MAANFKEQSKKHFDLNGQSYTYYDLKAVEEQGITKVSKLPYSIRVLLESLLRQEDDFVITDDHIKALSQFGKDGNEGEVPFKPSRVILQDFTGVPAVVDLASLRKAMDDVGGDITKINPEVPVDLVIDHSVQVDSYANPEALERNMKLEFERNYERYQFLNWATKAFDNYNAVPPATGIVHQVNLEYLASVVHVRDVDGEKTAFPDTLVGTDSHTTMINGIGVLGWGVGGIEAEAGMLGQPSYFPIPEVIGVRLVNSLPQGATATDLALRVTQELRKKGVVGKFVEFFGPGVQHLPLADRATIANMAPEYGATCGFFPVDDESLKYMKLTGRSDEHIALVKEYLKQNHMFFDVEKEDPNYTDVIELDLSTVEASLSGPKRPQDLIFLSDMKSSFENSVTAPAGNQGHGLDKSEFDKKAEINFKDGSKATMKTGDIAIAAITSCTNTSNPYVMLGAGLVAKKAVEKGLKVPEYVKTSLAPGSKVVTGYLRGAGLQPYLDDLGFNLVGYGCTTCIGNSGPLLPEIEKAIADEDLLVTSVLSGNRNFEGRIHPLVKANYLASPQLVVAYALAGSVDIDLQNEPIGKGNDGEDVYLKDIWPSIKEVSDTVDSVVTPELFIEEYNNVYNNNELWNEIDVTDQPLYDFDPNSTYIQNPSFFQGLSKEPGTIVPLNGLRVMGKFGDSVTTDHISPAGAIGKDTPAGKYLQDHQVPIREFNSYGSRRGNHEVMVRGTFANIRIKNQLAPGTEGGFTTYWPTNEVMPIFDAAMKYKEDGTGLVVLAGNDYGMGSSRDWAAKGTNLLGVKTVIAQSYERIHRSNLVMMGVLPLEFKKGESADSLGLDGTEEISVNIDENVQPHDYVKVTAKKQDGDLVEFDAMVRFDSLVEMDYYRHGGILQMVLRNKLAQ

SEQ ID NO: 67166 - DNA, 2706 bp, Staphylococcus epidermidis
  CDS (1)..(2706): transl_table=11
atggcttctaatattaaagaacaagcaaagaaacaattcgaattaaatggccaatcatatacttactatgacttacaaacattagaagaaaaagggctagctaaaatttctaaattaccatactcaattcgcgtattgttagaatctgtgttacgacaagaggatgattttgttataacagatgatcatatcaaagcattaagtaaattcggaaatgcaggtaacgaaggtgaagttccattcaaaccttctagagttattttacaagactttacaggtgtgccagcagtagtagatttggcttctttacgtaaagctatgaatgatgttggtggggatattaataaaatcaacccagaagtacctgtggatttagttatcgaccattcagttcaagttgatagttacgctaatccagaagcattagaacgtaatatgaaattagaatttgaacgtaactatgaacgttatcaatttttaaactgggcaacaaaagcttttgataactataatgcagtacctcctgctacaggtattgtccatcaagtaaacttagagtatttagcaaatgtagtacatgtaagagatgttgatggtgaaaaaacagcatttcctgacactttagtaggtactgattcacatactacaatgattaatggtattggtgttctaggttggggcgttggtggtatcgaagccgaagcaggtatgttaggacaaccatcatatttcccaattcctgaagttatcggagtgcgtttaactcactctttaccacaaggctcaacagctacggatttagctttacgtgtgactgaagaattacgtaaaaaaggtgtagttggaaaatttgttgaattcttcggtccaggtgttcaacatttaccattagcagacagagctacaattgctaacatggctccagaatatggtgcaacgtgtggtttcttcccagtagatgaagaatcattgaaatatatgaaacttacaggccgtgacgaagaacatattgaattggttaaagaatatttacaacaaaaccatatgttctttgatgtagaaaaagaggatcctgaatatacagatgttattgatttagacttatctacagtagaggcatcactttctggtccaaagcgtccacaagacttaattttcttaagtgatatgaaaaaagaatttgaaaaatcagtaactgctcctgctggtaatcaaggacatggacttgatcaaagtgaatttgataaaaaagcagaaattaattttaatgatggatctaaagcaacaatgaaaacaggagatatagcaattgctgctattacctcatgtactaacacttctaatccatatgttatgttaggtgctggtttagttgctaaaaaagctgtagaaaaaggattgaaagtaccagagtttgttaagacgtcacttgctccaggttcaaaagttgttacaggatatttaagagattctggattacaacagtatttagatgatttaggtttcaatcttgttggttatggttgtactacatgtattggtaactcagggccactattacctgaaattgaaaaggcagttgcggatgaagatttattagtaacttcagttttatcaggtaatcgtaattttgaggggcgaatccatccattagtgaaagcaaactatttagcctcaccacaacttgttgtagcttatgcgcttgctggtacagtagatattgatttacaaaatgaaccaattggtaaaggtaaagatggtaaagatgtatatttacaagacatttggccttcaatacaagaagtttctgatactgtagataaagttgttacacctgaactattcttagaagaatataaaaatgtatatcataacaatgaaatgtggaatgaaatagatgtaaccgatgaaccattatatgatttcgatcctaattcaacatatattcaaaatccaacatttttccaaggattatctaaagagccgggtaaaattgaaccacttaaaagtttgagagttatgggtaaatttggtgattctgttacaacagaccatatttctccagcaggtgctatcggtaaagatacaccagcaggaaaatacttattagatcatgatgttgcaattcgcaactttaactcttatggttcccgtcgcggtaaccacgaagttatggtacgtggtacatttgccaatattcgtatcaaaaaccaacttgctccaggtactgaaggcggatttacaacatattggcctaccggagaaataatgcctatatatgatgcagcaatgaaatataaagaagatggaactggcttagttgtcttagctggtaatgactatggaatgggatcttctcgtgactgggctgcaaaaggtaccaatttattaggagttaaaactgtcattgcacaaagctatgaacgtattcatcgctctaacttagttatgatgggtgtactaccgcttcaattccaacaaggagaatctgcagaagcactgggtcttgatggaaaagaagaaatatctgtagatattaatgaagatgtacagccacatgatcttgtaaatgtgactgcaaaaaaagaaaatggtgaaatcattaatttcaaagctattgtacgttttgattcactagtagaattagattattatcgtcatggtggtattttacaaatggtactaagaaataaacttgcgcagtaa

SEQ ID NO: 67167 - protein, 901 aa, Staphylococcus epidermidis
MASNIKEQAKKQFELNGQSYTYYDLQTLEEKGLAKISKLPYSIRVLLESVLRQEDDFVITDDHIKALSKFGNAGNEGEVPFKPSRVILQDFTGVPAVVDLASLRKAMNDVGGDINKINPEVPVDLVIDHSVQVDSYANPEALERNMKLEFERNYERYQFLNWATKAFDNYNAVPPATGIVHQVNLEYLANVVHVRDVDGEKTAFPDTLVGTDSHTTMINGIGVLGWGVGGIEAEAGMLGQPSYFPIPEVIGVRLTHSLPQGSTATDLALRVTEELRKKGVVGKFVEFFGPGVQHLPLADRATIANMAPEYGATCGFFPVDEESLKYMKLTGRDEEHIELVKEYLQQNHMFFDVEKEDPEYTDVIDLDLSTVEASLSGPKRPQDLIFLSDMKKEFEKSVTAPAGNQGHGLDQSEFDKKAEINFNDGSKATMKTGDIAIAAITSCTNTSNPYVMLGAGLVAKKAVEKGLKVPEFVKTSLAPGSKVVTGYLRDSGLQQYLDDLGFNLVGYGCTTCIGNSGPLLPEIEKAVADEDLLVTSVLSGNRNFEGRIHPLVKANYLASPQLVVAYALAGTVDIDLQNEPIGKGKDGKDVYLQDIWPSIQEVSDTVDKVVTPELFLEEYKNVYHNNEMWNEIDVTDEPLYDFDPNSTYIQNPTFFQGLSKEPGKIEPLKSLRVMGKFGDSVTTDHISPAGAIGKDTPAGKYLLDHDVAIRNFNSYGSRRGNHEVMVRGTFANIRIKNQLAPGTEGGFTTYWPTGEIMPIYDAAMKYKEDGTGLVVLAGNDYGMGSSRDWAAKGTNLLGVKTVIAQSYERIHRSNLVMMGVLPLQFQQGESAEALGLDGKEEISVDINEDVQPHDLVNVTAKKENGEIINFKAIVRFDSLVELDYYRHGGILQMVLRNKLAQ

SEQ ID NO: 67168 - DNA, 2667 bp, Streptococcus mutans
  CDS (1)..(2667): transl_table=11
atgattaattatacatcaacttttacgttgaatcggcaaaaatatcactatattgatttggtaaaagcttctaaagactatgatatagaacttgatagtctcccttatacaattaaaattttgcttgaaagtttattgagaaagcacgacgatatttgtgtcacaaaaaataacatagaaactctttttcattataattcaaaagctcctcaaggagaagtaccttttaaacctagtcgagtcattttgcaggattttacgggtgttcctgttgttgttgacttagcttctatgcgggatgctgtcgttgaaaatggcggcagcccagatttaatcaatcctgaaattccagtggatttagttattgatcatagtgttcaagttgatttttttggaaatcaagacgcatttgacgctaatattgatttagaatttgaacgaaataatgagcgttatgaatttcttaaatgggctgaaaaaacttttgaaaattatcgggccgttcctccagcaacaggtattattcatcaggtcaatcttgaatttttgagtgatgtgattattaataaggatggtttcttatatccagattcgatgtttggcacagacagtcatacaaccatgatcaatggtatcggtgttttaggctggggtgtcggtggcattgaagccgaagcagctatgttaggagaagcttcttattttcccatcccagaagtcatcggtgttcgtctttatggagagcttcctaaagtagcgacagctacagatttagcacttaaggtgacccaaaagctgcgcttagaaaatgttgttggcaagtttgttgagttcttcggccccggtttagctggactttctttggcagatcgcgcaacggttgccaatatggcacctgaatatggtgcaacctgtggttattttccgattgatgatgaaaccttaaattatatgaaattgaccaatcgctcagcagaacacattgcactaacaaaagaatatgccaagcgaaatcatctttaccatgatatgacaaatctgccttcctacactaaaatagttgaaattgatttatcagccattaaaccttctatctcaggccctaaacggcctcaagatttgattgaattgggtcaagccaaagaagaatttcaggcgagtttggtacgtcagtttggtgtccgcggttttggtctaggagctgatgagttggctaaaaaggcgactgttcattttgatgatggtcaggaattggaagtcaaaacaggtcatgttgccattgcagccatcacttcttgtaccaatacttctaatccctatgttcttttatcagctggacttttggctaaaaaagcagttgagcgtggtttatcggttgccaaaacggtgaaaacatccttagctccaggttctaaagtggttactgcttatttgcgaaagagtggtctacaaccctatctggataagcttggattcaatttggttggctacggttgtacaacttgtatcggtaattcaggtgatttggttccagaagttgccaaggctgttcaagagaaggatttattagttagtgcagttctgtcagggaatcggaattttgaaggacgggtcaatccactcgtcaaagctaatttcctagctagcccgcctttagttgttgcttacgctttggcaggtactaccaatattgacttaacttctaagcctttaggctatgataaaaatggccaggctgtttatcttgaggatattatgcctgcaaaagaagaagtactgtcttatattgaacagtttgtaacggctgaattatttgaagaagaatatggtcatgttttttctgatagtcaaaaatggaatcagatcgaaacagagaattccaaaaattaccaatggaatcaagtctctacctatattcaaaatcctccttattttgagaatctgacaaatactgagaacaaaatagatttaagtgcattaaaggttttagccaaatttggagattctgtaaccacagatcatatttccccagcaggtaatattgcgagaaatagccctgcagctcgttatttagaagaaaatggggtgacttatgctgagttcaattcttacggtagccgtcgtggtaatcacgaggtcatgatgcgaggaacttttgcaaatattcgtatcaaaaatgaattagctgatggcaaaatcggtggttacacaaaatatgaaggagaaatcttaccgatttatgaggctgccatgaattataagaaaaacggtgtttctactattgttattgcaggaaaagactatggtatgggctctagccgtgattgggctgctaagggtgccaatcttttaggtgtcaaggtcgtcttagcagaaagctttgagcggattcatcgttctaatttagtcatgatgggaattttacctctacaattccttgatggtcaaacggctgaaagtctccaattaacaggatacgaaacttacactgtggaacttcctgaacagccgcaagttcatgatattgttaaggtaaaagctacttctaaggaagggactaaagaatttcaagtgctcttacgttttgatgcggatgctgatattcgctattatcaaaatggcggtattcttccaatggttgtgcgtaaaaaattgaatggaggttaa

SEQ ID NO: 67169 - protein, 888 aa, Streptococcus mutans
MINYTSTFTLNRQKYHYIDLVKASKDYDIELDSLPYTIKILLESLLRKHDDICVTKNNIETLFHYNSKAPQGEVPFKPSRVILQDFTGVPVVVDLASMRDAVVENGGSPDLINPEIPVDLVIDHSVQVDFFGNQDAFDANIDLEFERNNERYEFLKWAEKTFENYRAVPPATGIIHQVNLEFLSDVIINKDGFLYPDSMFGTDSHTTMINGIGVLGWGVGGIEAEAAMLGEASYFPIPEVIGVRLYGELPKVATATDLALKVTQKLRLENVVGKFVEFFGPGLAGLSLADRATVANMAPEYGATCGYFPIDDETLNYMKLTNRSAEHIALTKEYAKRNHLYHDMTNLPSYTKIVEIDLSAIKPSISGPKRPQDLIELGQAKEEFQASLVRQFGVRGFGLGADELAKKATVHFDDGQELEVKTGHVAIAAITSCTNTSNPYVLLSAGLLAKKAVERGLSVAKTVKTSLAPGSKVVTAYLRKSGLQPYLDKLGFNLVGYGCTTCIGNSGDLVPEVAKAVQEKDLLVSAVLSGNRNFEGRVNPLVKANFLASPPLVVAYALAGTTNIDLTSKPLGYDKNGQAVYLEDIMPAKEEVLSYIEQFVTAELFEEEYGHVFSDSQKWNQIETENSKNYQWNQVSTYIQNPPYFENLTNTENKIDLSALKVLAKFGDSVTTDHISPAGNIARNSPAARYLEENGVTYAEFNSYGSRRGNHEVMMRGTFANIRIKNELADGKIGGYTKYEGEILPIYEAAMNYKKNGVSTIVIAGKDYGMGSSRDWAAKGANLLGVKVVLAESFERIHRSNLVMMGILPLQFLDGQTAESLQLTGYETYTVELPEQPQVHDIVKVKATSKEGTKEFQVLLRFDADADIRYYQNGGILPMVVRKKLNGG

SEQ ID NO: 67170 - DNA, 2976 bp, Oryza sativa
  CDS (1)..(2976)
atgtataaagcggcatactcctccgcctccgcccgcctctcctcctccctcctccgcttcagatccctcccctctcccgctccctcctcctcgctgtcgcgcctcctctccctcagggcacgcgcgttctcgcggccgtcgcgcggcgggtgggcggcggcgggcggttggtccgggagggcgtcgtcgtcgccggtcgtcgggtgcggcgcctgcagggcgcagatcggggccgtcgcgcctgccgtcgagcgcgtccaccgcaggatggccgccaccgcagctgctgagcatcccttcaagaacattttgaccaccctccctaagcctgggggtggtgaatatgggaaattctacagccttcctgcactaaatgatcccaggattgataagctgccctactctatccgtattcttctagagtcagctatccgcaactgtgataacttccaagtcaaccagaatgatgttgagaaaattattgattgggagaatacatctcccaagctggctgaaatacctttcaagccagcacgagttcttcttcaggacttcactggagttccagctgtcgtagatcttgcagctatgcgtgacgcgatggccaagttgggcagtgatgccaacaagatcaatccactggttccagtggatcttgtaattgaccactcagtgcaggtggatgttgcaaggtcaccaaatgctgtgcaatcaaacatggagttggagtttaagcgtaacaatgaaagatttggtttccttaaatggggttctactgctttccacaatatgttggttgtaccccctggttcaggaattgtgcaccaggtcaatcttgagtatcttggtcgagttgttttcaacacagatggaattatgtatcctgacagtgtggttggtaccgattcacacaccactatgattgatggtttgggtgttgctggttggggagttggtggaattgaagcagaggccacaatgcttggtcagccaatgagcatggttttgcctggtgttgttgggttcaagttgactgggaagttacagaatggtgtcactgctaccgaccttgttcttactgtcacccaaatgttaaggaagcacggcgttgttggcaaatttgttgaattctatggcgaaggcatgggaaagctttctttggctgacagggccacaatcgcaaacatgtcacctgaatatggagccacaatgggtttcttccctgtagaccacgtgacactagattatcttaaattgactggccggagtgatgaaactgtggcaatgattgaagcatatctgcgagctaacaagatgtttgtagactacaatgagcctcaaacagaaagggtttactcttcgtatcttgagttggatcttaatgaggtggaaccttgcatttcaggcccaaagaggcctcatgaccgtgtccttttgaaggaaatgaaatctgactggcattcttgcctggataacagagttggtttcaagggttttgctgtaccaaaggaacaacaagataaagttgtgaaatttgacttccatggacaacctgctgaactcaaacatggcagtgttgtcatagcagcaattactagctgcacaaacacatcaaatcctagtgttatgcttggtgctgcccttgtggcaaagaaagcctgtgaactgggtcttgaggtgaaaccatgggtaaagacaagccttgcccctggatctggggttgtcactaaatacttgttacagagtggccttcaagaatacttgaacaagcaaggtttccatgttgttggatatggttgtaccacttgcattggcaactctggtgatctagatgaatctgtatcagctgccatttcagaaaatgatgttgttgctgctgctgttctgtcgggcaaccgtaacttcgagggtcgtgtgcacccattgacccgggctaattaccttgcttcaccgcctcttgtggttgcatatgcacttgctggcactgttgacattgattttgagaaagagccgattggagttggaaaggatggtaaagaagtcttcttcagggacatatggccctcaactgaagaaattgcagaagtggtccaatctagcgtactgcctgatatgttcaaaagtacatacgaggctattacaaaaggcaacccgatgtggaatcagctgaccgtgcccgaagcatcgctctattcgtgggatccaaactccacctacatccatgagcctccatactttaaggacatgaccatgtccccacctggcccccatggggtgaagaatgcctactgcttactgaactttggggacagcattacgacagaccatatttcaccagcaggtagcattcacaaagacagccctgctgccaagtacttgcttgagcgtggtgtggaccgtaaggacttcaattcatatggtagccgtcgtggtaatgatgaagtaatggcaagaggaacatttgcgaacatcaggattgtgaacaagtttttgaatggagaagttggacccaagaccgttcatgtccctacaggggagaagctctatgtatttgatgctgccttgaaatacaagtctgagggtcatgacactattgttcttgctggtgctgagtatggaagtggcagttctcgtgactgggctgccaagggaccgatgctcctgggtgttaaagctgtgatcgctaagagctttgagcgtatccaccgaagcaacctggtgggtatgggaatcattcctctctgcttcaaggctggtgaggatgccgactcacttggccttactggacatgagcggtataccatcgacctcccgaccaacgtcagcgagatccgtcccgggcaggacattaccgtcacaaccgacaacgggaaatccttcacttgtactcttcgctttgacacagaggtggaactggcatacttcaaccatggaggcatcctcccatacgtcatccgcaacctggcgcagaactag

SEQ ID NO: 67171 - protein, 991 aa, Oryza sativa
MYKAAYSSASARLSSSLLRFRSLPSPAPSSSLSRLLSLRARAFSRPSRGGWAAAGGWSGRASSSPVVGCGACRAQIGAVAPAVERVHRRMAATAAAEHPFKNILTTLPKPGGGEYGKFYSLPALNDPRIDKLPYSIRILLESAIRNCDNFQVNQNDVEKIIDWENTSPKLAEIPFKPARVLLQDFTGVPAVVDLAAMRDAMAKLGSDANKINPLVPVDLVIDHSVQVDVARSPNAVQSNMELEFKRNNERFGFLKWGSTAFHNMLVVPPGSGIVHQVNLEYLGRVVFNTDGIMYPDSVVGTDSHTTMIDGLGVAGWGVGGIEAEATMLGQPMSMVLPGVVGFKLTGKLQNGVTATDLVLTVTQMLRKHGVVGKFVEFYGEGMGKLSLADRATIANMSPEYGATMGFFPVDHVTLDYLKLTGRSDETVAMIEAYLRANKMFVDYNEPQTERVYSSYLELDLNEVEPCISGPKRPHDRVLLKEMKSDWHSCLDNRVGFKGFAVPKEQQDKVVKFDFHGQPAELKHGSVVIAAITSCTNTSNPSVMLGAALVAKKACELGLEVKPWVKTSLAPGSGVVTKYLLQSGLQEYLNKQGFHVVGYGCTTCIGNSGDLDESVSAAISENDVVAAAVLSGNRNFEGRVHPLTRANYLASPPLVVAYALAGTVDIDFEKEPIGVGKDGKEVFFRDIWPSTEEIAEVVQSSVLPDMFKSTYEAITKGNPMWNQLTVPEASLYSWDPNSTYIHEPPYFKDMTMSPPGPHGVKNAYCLLNFGDSITTDHISPAGSIHKDSPAAKYLLERGVDRKDFNSYGSRRGNDEVMARGTFANIRIVNKFLNGEVGPKTVHVPTGEKLYVFDAALKYKSEGHDTIVLAGAEYGSGSSRDWAAKGPMLLGVKAVIAKSFERIHRSNLVGMGIIPLCFKAGEDADSLGLTGHERYTIDLPTNVSEIRPGQDITVTTDNGKSFTCTLRFDTEVELAYFNHGGILPYVIRNLAQN

SEQ ID NO: 67172 - DNA, 2706 bp, Glycine max
  CDS (1)..(2706)
atggcgactgagaatcctttcaatagcattttgacgacgctcgaaaagcccggtggtgctggcgagtttggaaagtactttagcttgcctgctctcaacgatcctagaatcgatagacttccttactctgtgaggatacttttggaatctgcaatccggaactgtgatgagtttcaagttaagagtaacgacgttgaaaaaattattgattgggagaatacctctccgaagctggtggagattccattcaagccagctagagtgcttctccaggattttactggcgtgcctgctgttgtcgatcttgcttgcatgcgagatgccatgaacaaacttggtggtgattctaataaaattaatcccttggtaccagttgatcttgtcattgatcactctgttcaagttgatgtggcaagatcagaaaatgctgtccaggcaaatatggaacttgaattccaaagaaacaaggaaagatttggtttcctcaaatggggttctaatgcattcaataatatgcttgtcgttcctcctggatcagggatagttcaccaggttaatttagaataccttggtagagttgtgttcaacacaaatggtgtgctttatcctgacagcgttgttggaactgattcacacacaactatgattgatggcctgggtgttgctggatggggagttggtggaatagaagcagaagctgcaatgcttggccaacccatgagcatggtcctaccgggtgtcgttgggttcaaattattaggcaaactacgagatggtgtcacagctactgacttggtgttgactgttactcaaatgctaagaaagcatggggttgttggcaagtttgtagagttttatggggaaggcatgagtgaactgtctttggcagatcgtgccaccatagcaaacatgtctcctgagtatggtgcaaccatgggcttctttcctgtggatcatgtcactttgcaatatttgagactgactggcagaagtgatgagactgtttctatgatagaatcctacttacgagcaaataagatgtttgtggattacagcgagccccaagtggagagagtgtactcatcgtatttggaactcaatcttgaggatgtagaaccctgtgtctcaggtccaaaaaggcctcatgaccgtgtccctttgagagaaatgaaggtagactggcatgcctgcctcaacaataaagttggattcaagggttttgctgtaccaaaagaatctcagaataaggttgcagagttcacattccaagggacaccagcacatcttaggcacggtgatgttgttatagctgctatcaccagttgtacaaatacttcaaatcctagcgtaatgcttggagctgcattggttgcaaagaaagcatgtgaattgggattgcaggtgaagccatggattaaaacaagccttgccccaggttctggtgttgtgactaagtatttgcagaggagtggcttgcagaagtatttgaatgagctagggtttaatatagttgggtatggatgcaccacatgcattggaaattcaggggatattaatgaagctgttgcatctgcgattaccgaaaatgatatagtagctgcagctgtattgtctggaaataggaactttgagggccgagttcacccattaacaagagctaattatcttgcttctcctcctcttgttgttgcctatgcccttgctggcacagtggacattgactttgacactgaacccattgggatagggaaggatggaacagagatcttcttcaaggatatttggccatccagtgaagaaatagcaaatgttgtacaatcaagtgtgctgcctgctatgtttagggacacatataatgcgatcacccaagggaatcccatgtggaataatttatctgttccaactggcactctttatgcttgggaccctacatcaacttatattcatgagccaccttattttagagatatgagcatgtctcccccaggctctcatggagtgaaagatgcttactgtttgctcaactttggagacagtatcacaactgaccacatctctccagctggcagcatacataaggacagtcctgcagccagataccttatagaacgtggggttgatagacgggacttcaactcctatggaagtcgccgtggtaatgatgaggtgatggcccgaggaacttttgccaatattcgcattgtcaacaaatttttgaatggagaagttggacctaaaactattcatattccttctggggagaagttatcagtctttgatgctgcagagaaatacaagagtgaggggcatgatatgattatcttggctggtgctgagtatgggagtggaagctctcgtgattgggctgcaaaggggccaatgctactgggcgtgaaagctgtcatagcaaaaagttttgaaaggattcaccgaagtaatttggtgggaatgggtatcattccattgtgttttaagcccggggatgatgctgattctcttggattaactggccaagaacgttacaccattgatctaccaagcaatgtgaatgaaatacgacccggccaagatgtcacagtggtgacagacaccgggaaatcatttgtatctacactgagatttgatacagaggttgaactagcttacttcaaccatggaggcatcttacaatatgtcatcagaaacatggtcaatgctaaacattga

SEQ ID NO: 67173 - protein, 901 aa, Glycine max
MATENPFNSILTTLEKPGGAGEFGKYFSLPALNDPRIDRLPYSVRILLESAIRNCDEFQVKSNDVEKIIDWENTSPKLVEIPFKPARVLLQDFTGVPAVVDLACMRDAMNKLGGDSNKINPLVPVDLVIDHSVQVDVARSENAVQANMELEFQRNKERFGFLKWGSNAFNNMLVVPPGSGIVHQVNLEYLGRVVFNTNGVLYPDSVVGTDSHTTMIDGLGVAGWGVGGIEAEAAMLGQPMSMVLPGVVGFKLLGKLRDGVTATDLVLTVTQMLRKHGVVGKFVEFYGEGMSELSLADRATIANMSPEYGATMGFFPVDHVTLQYLRLTGRSDETVSMIESYLRANKMFVDYSEPQVERVYSSYLELNLEDVEPCVSGPKRPHDRVPLREMKVDWHACLNNKVGFKGFAVPKESQNKVAEFTFQGTPAHLRHGDVVIAAITSCTNTSNPSVMLGAALVAKKACELGLQVKPWIKTSLAPGSGVVTKYLQRSGLQKYLNELGFNIVGYGCTTCIGNSGDINEAVASAITENDIVAAAVLSGNRNFEGRVHPLTRANYLASPPLVVAYALAGTVDIDFDTEPIGIGKDGTEIFFKDIWPSSEEIANVVQSSVLPAMFRDTYNAITQGNPMWNNLSVPTGTLYAWDPTSTYIHEPPYFRDMSMSPPGSHGVKDAYCLLNFGDSITTDHISPAGSIHKDSPAARYLIERGVDRRDFNSYGSRRGNDEVMARGTFANIRIVNKFLNGEVGPKTIHIPSGEKLSVFDAAEKYKSEGHDMIILAGAEYGSGSSRDWAAKGPMLLGVKAVIAKSFERIHRSNLVGMGIIPLCFKPGDDADSLGLTGQERYTIDLPSNVNEIRPGQDVTVVTDTGKSFVSTLRFDTEVELAYFNHGGILQYVIRNMVNAKH

SEQ ID NO: 67174 - DNA, 2955 bp, Glycine max
  CDS (1)..(2955)
atgtatataacaacggcctcttcctctgcctcttcgctcctcagagcaaccaggcctaaactcttctttccctctccttctagaaacttcgcttctttcactccctgcacttcttccttctccgccaccgctcgttccctcctctgctccgttccgcggtggagccaccgcctccattccgcctctccgctcactccccgtcctcggatcagcgccgtcgctcccctcgttgaacgcttccaccgtgaaatcgccaccatggccaatgaaaatcctttcaagggaaacttgaccagtctcccaaagcctggtggcggcgagtttggaaagttctacagtcttccttctctcaatgatccgagaattgacaggttgccatactccatcagaattctccttgaatctgccattcgtaattgtgacaattttcaagtaaaaaaagaagatgttgagaagatacttgactgggaaaacaattctacgaagcaagttgagattcctttcaagcctgctcgtgttctactgcaggattttactggagtccctgctgttgttgacctggcttgcatgcgtgatgctatgaataagcttggcagtgattctaataagattaatcctctggttcctgttgatcttgtcattgatcattcagttcaagttgacgtaacaaggtcagagaatgcagtgcaggccaatatggagcttgaatttcagagaaacaaggagagatttgcttttctgaaatgggggtcaaatgcattccgtaacatgcttgttgtccctcctggttcgggtatagtacatcaggttaatcttgaatatcttggaagggttgttttcaacaatgagggcttgctctatcctgacagtgtggttggaactgattcacatacaacaatgatagatgggcttggagttgctggatggggtgttggaggtattgaagcagaggcagcaatgcttggtcagcctatgagcatggtgttgcctggtgttgttgggttcaagttatctggaaaactacgcaatggtgttacagcaacagacttagttctaactgtgacacaaatgctcagaaaacatggtgttgtagggaaatttgttgaattttatggtgatggtatgggtgaattatcattagctgacagggccactattgccaacatgtctcctgaatatggtgccaccatgggcttcttccctgtagatcacgttacattacaatacctcaaattaactggaagaagtgatgagactgtggcaatgatagaggcctatctcagggcaaacaaattgtttattgactataatgagcctcaaccagacagagtgtattcatcctatcttgaattgaaccttgacgaagttgaaccatgcatctcaggacccaagagacctcatgatcgggtgcctttgaaagaaatgaaggctgattggcatgcttgtctagacaacaatgtgggatttaagggatttgctataccaaaagacgtacaaggcaaagttgcaaaatttgatttccatgggcagccagcagagctgaagcatggcagtgttgtgattgctgcaatcacaagttgtacaaatacatcaaacccaagtgttatgcttggggctggtcttgtagcaaagaaggcacatgatctaggtttgcaggttaagccatgggtgaaaacgagtcttgctcctggctctggagttgttacaaaatatctacttaaaagtggcctgcaaaagtatctaaatgaacagggtttcaacattgttggatttggctgtaccacatgtattggcaattcaggggaactagaccaatctgttgcttctgctatctctgaaaatgacattgtagctgctgctgtgttgtccgggaaccgtaattttgaggggcgtgtgcatcccttgacaagagctaactacctagcctcaccacctctagttgttgcttatgctcttgctgggacagttgacattgactttcaaaaggagccaataggaacagggaaggatggaaagaatgtttacttaagggatatctggccatccactcaagaaattgcagaggctgtccaatccagtgtgttgcctgacatgttccgaagtacatatgaagctattaccaaaggtaacactatgtggaaccaactacaagttcctgctgagaccctgtactcatgggaccccaagtcaacatatattcatgaacctccatacttcaagggcatgaccatggatcctcctggagctcatggtgtgaaagatgcctattgtctgctgaattttggtgacagtataacgaccgatcacatttctcctgctggtaacattaacaaggatagtcctgctgcaaaataccttctggagcgaggtgtggaacaaaaggacttcaactcttatggaagtcgtcgtggcaatgatgaagtgatggcaaggggaacttttgccaacattcgtcttgttaacaagctcttgaatggagaagttggccccaagacagttcacattccgactggggagaagctttatgtgtttgatgcagcccagagatacaaggctgaagggcaggacaccattgtgctggctggagctgaatatgggagtggaagttccagagattgggctgccaagggtcccatgctattgggtgtcaaagctgtgatagctaaaagttttgagagaattcatcgtagcaatttggtaggaatgggtattgttcctctttgctttaaatctggtgaggatgctgacacattgggattgactggtcacgaacgttatactattgacctcccaagtaacatcagcgagataaggcctggccaagatgtcactgtaacaaccaatactggaaaatctttcacctgcacagttcgcttcgatactgaggtggaacttgcttactttaacaatgggggcattcttccgtatgtcatcaggaacctcattaagcagtga

SEQ ID NO: 67175 - protein, 984 aa, Glycine max
MYITTASSSASSLLRATRPKLFFPSPSRNFASFTPCTSSFSATARSLLCSVPRWSHRLHSASPLTPRPRISAVAPLVERFHREIATMANENPFKGNLTSLPKPGGGEFGKFYSLPSLNDPRIDRLPYSIRILLESAIRNCDNFQVKKEDVEKILDWENNSTKQVEIPFKPARVLLQDFTGVPAVVDLACMRDAMNKLGSDSNKINPLVPVDLVIDHSVQVDVTRSENAVQANMELEFQRNKERFAFLKWGSNAFRNMLVVPPGSGIVHQVNLEYLGRVVFNNEGLLYPDSVVGTDSHTTMIDGLGVAGWGVGGIEAEAAMLGQPMSMVLPGVVGFKLSGKLRNGVTATDLVLTVTQMLRKHGVVGKFVEFYGDGMGELSLADRATIANMSPEYGATMGFFPVDHVTLQYLKLTGRSDETVAMIEAYLRANKLFIDYNEPQPDRVYSSYLELNLDEVEPCISGPKRPHDRVPLKEMKADWHACLDNNVGFKGFAIPKDVQGKVAKFDFHGQPAELKHGSVVIAAITSCTNTSNPSVMLGAGLVAKKAHDLGLQVKPWVKTSLAPGSGVVTKYLLKSGLQKYLNEQGFNIVGFGCTTCIGNSGELDQSVASAISENDIVAAAVLSGNRNFEGRVHPLTRANYLASPPLVVAYALAGTVDIDFQKEPIGTGKDGKNVYLRDIWPSTQEIAEAVQSSVLPDMFRSTYEAITKGNTMWNQLQVPAETLYSWDPKSTYIHEPPYFKGMTMDPPGAHGVKDAYCLLNFGDSITTDHISPAGNINKDSPAAKYLLERGVEQKDFNSYGSRRGNDEVMARGTFANIRLVNKLLNGEVGPKTVHIPTGEKLYVFDAAQRYKAEGQDTIVLAGAEYGSGSSRDWAAKGPMLLGVKAVIAKSFERIHRSNLVGMGIVPLCFKSGEDADTLGLTGHERYTIDLPSNISEIRPGQDVTVTTNTGKSFTCTVRFDTEVELAYFNNGGILPYVIRNLIKQ

SEQ ID NO: 67176 - DNA, 2961 bp, Zea mays
  CDS (1)..(2961)
atgcctcccctcacaagctccctcctctcccgctccaccaccggcggctcctctacccgcgccgcggcagcggtcgcagcgatctccaggcccgccgcaccttcctcctcgtccccgcccgcccgctcgaccccgaggccgcgctccagcccggcgtcgcccttcgcatccggcctcgcgagccgcctcttcggcggccaccgcgccgtcgcccgctccgcgtcgtctgcagccgccgtcttcgagcgccggtttgcctcagccgcgaccaggaactcgtacgatgaaatcctgacgggcctcgggaggccaggaggcggagaggagtttggcaagtactacagcctgcctgctctctccgatccgcggattgatcggctcccatattctatcaggattcttctcgagtcggcgatcaggaactgcgatgatttccaggtcaccgggaaggatgttgagaagatcttggactgggagagaagtgcaccgaagcaagttgaaatcccgttcaagcccgctcgtgtcctcctccaggattttactggtgtcccagctgttgttgatcttgcttgcatgagggatgctatgagtaaacttggcagtgacccgaacaaaattaatcctctggtacctgtagaccttgttattgatcattcagtacaagttgatgtggcaagatcagcaaatgctgctcaggcaaatatggagcttgagttccatcgtaacaaggaaaggtttgggttcttgaaatgggggtcctctgcattccgtaacatgcttgttgttcctcctggatctggcattgtccaccaggtgaatcttgaatatctggcaagggttgtgtttaacaatggtgggatcctttaccctgacagcgttgtaggcactgactctcacacaactatggtagatggtcttggagttgctgggtggggagttggtggtatagaggcggaagctgcaatgcttggccagccaatgagcatggtcttaccaggtgttgttggctttaagttatcaggcaagctgaggaatggagttacagccacagacttggttctaacagtaactcaaatgcttcggaaacatggtgttgttgggaaatttgttgagttttgcgggcaaggcatgagcgagttgtcacttgctgatcgggcgaccatcgcaaatatgtctccggaatatggtgcaactatgggtttcttcccagttgatggaaagacgctggactatttgaagcttactggccgaagtgatgatacagtggccatggttgagtcctacctgcgtgcgaataagatgttcgttgatcacagccaggttgacgctgaaagggtatactcttcctatctagaacttaacttggaagaggtagaaccatgtctatcaggaccaaaacggcctcatgatcgagtgacattgaagaatatgaagtctgattggctttcttgcttggacagcgatgtaggattcaagggttttgctgtccccaaagaatcacagggcaaagttgcagaattttcgttccatgggactcctgcaaagataaagcatggtgatgttgtaattgcagcaattaccagttgcacaaacacatcaaatcctaatgtaatgctgggagctgctttggttgccaagaaggcttgtgagttgggcctggaggtaaagccatggattaagacgagccttgcacctggttccggtgttgtgaagaagtacttggataagagcggtttgcagaaatatcttgaccagcttggcttcaatattgttggctatggttgcacaacctgcattggaaattccggggagcttgatgaatccgtatctgctgcaattactgagaatgatattgttgctgctgctgtattgtctggaaacaggaattttgaaggacgtgtgcatcctttaactagagcaaattaccttgcttcccctcctttagttgtggcttatgccttggctggcacggttaatattgattttgagaaagaacctattggcatctcgaaagatgggaaagaggtttacttccgggatgtttggccatcaacagaagagatagccgaggttgtcaagtcaagtgtgcttcctgacatgttcaagagcacatatgagtccatcacccaaggaaatcctatgtggaatgagctgccagtctcaacaagcactctctatccctgggatccatcatctacatacatccatgagcctccttacttcaaggatatgacaatgactcctcctggcccgcgacctgtgaaggatgcatattgccttctgaactttggtgacagtatcacaactgatcacatctcgcctgccggaaacattcacccagacagcgcagctgcaacatatctgaaggagcgtggtgttgaaaggaaggacttcaactcatatggtagccgaagaggaaatgatgagatcatggctaggggaacctttgccaacattcgtcttgtgaataagttcttgaagggtgaggttggacccaagacaatccatgttccatctggggataagctttcagtttttgatgctgctatgaaatacaagaatgaagggcatgatactattatcctggctggtgccgagtacgggagtggtagctctcgggattgggctgcaaagggcccaatgcttcagggagtgaaggctgtgatagcaaagagctttgagaggattcaccgcagcaatcttgctggcatgggaatcatccctctatgcttcaaagcaggggaggatgcagacaccctgggcctaaccggccatgagcgctacacggtccaccttccaaccaatgtgagtgagataaagcctggccaagatgttaccgtgacaactgataatgggaagtcgttcacttgcacactcagattcgacactgaggtggagcttgcttactacgaccatggtggcattctaccatatgtcatcagaaagattgcggaacaatag

SEQ ID NO: 67177 - protein, 986 aa, Zea mays
MPPLTSSLLSRSTTGGSSTRAAAAVAAISRPAAPSSSSPPARSTPRPRSSPASPFASGLASRLFGGHRAVARSASSAAAVFERRFASAATRNSYDEILTGLGRPGGGEEFGKYYSLPALSDPRIDRLPYSIRILLESAIRNCDDFQVTGKDVEKILDWERSAPKQVEIPFKPARVLLQDFTGVPAVVDLACMRDAMSKLGSDPNKINPLVPVDLVIDHSVQVDVARSANAAQANMELEFHRNKERFGFLKWGSSAFRNMLVVPPGSGIVHQVNLEYLARVVFNNGGILYPDSVVGTDSHTTMVDGLGVAGWGVGGIEAEAAMLGQPMSMVLPGVVGFKLSGKLRNGVTATDLVLTVTQMLRKHGVVGKFVEFCGQGMSELSLADRATIANMSPEYGATMGFFPVDGKTLDYLKLTGRSDDTVAMVESYLRANKMFVDHSQVDAERVYSSYLELNLEEVEPCLSGPKRPHDRVTLKNMKSDWLSCLDSDVGFKGFAVPKESQGKVAEFSFHGTPAKIKHGDVVIAAITSCTNTSNPNVMLGAALVAKKACELGLEVKPWIKTSLAPGSGVVKKYLDKSGLQKYLDQLGFNIVGYGCTTCIGNSGELDESVSAAITENDIVAAAVLSGNRNFEGRVHPLTRANYLASPPLVVAYALAGTVNIDFEKEPIGISKDGKEVYFRDVWPSTEEIAEVVKSSVLPDMFKSTYESITQGNPMWNELPVSTSTLYPWDPSSTYIHEPPYFKDMTMTPPGPRPVKDAYCLLNFGDSITTDHISPAGNIHPDSAAATYLKERGVERKDFNSYGSRRGNDEIMARGTFANIRLVNKFLKGEVGPKTIHVPSGDKLSVFDAAMKYKNEGHDTIILAGAEYGSGSSRDWAAKGPMLQGVKAVIAKSFERIHRSNLAGMGIIPLCFKAGEDADTLGLTGHERYTVHLPTNVSEIKPGQDVTVTTDNGKSFTCTLRFDTEVELAYYDHGGILPYVIRKIAEQ

SEQ ID NO: 67178 - DNA, 2715 bp, Zea mays
  CDS (1)..(2715)
atggccaacccaacagctaccaagcatgctttcaagcgtattttgacgagcctgcttaagcctggcggtggtgaatacggcaagttcttcagccttccggcgctaaatgatccaaggatcgataagcttccctactctatacgtgttctcctggaatcagctatccgccattgtgataacttccaagttacagagagtgatgtcgagaaaatcattgattgggagaacacatctcccaagctggctgagatacctttcaagccagcgagatgcattctaatggacaacactggagtcccagctgttgtagaccttgcagctatgcgtgatatgatgccaaagttgggttgtgatccctacaagatcaatccattgattcccgtggatgctgttattgaccatgcagtgcgagtggatgtagcagggacctatgatgcattggatagaaacgaggagttggagttccaacgcaacaaagaaaggtttgcttttcttaaatgggcatccaatgctttccacaacatgcaggttttccctcctggttcaggcactgtacaccaggtaaaccttgagtatcttgcccgagttgtcttcaacgaagatggcattctttacttcgacagcgtggttggcacagactcacacaccactatgattaatagtcttggagttgctggttggggagtaggcggtattgaagcagtcgttgcaatgcttggccagccaatgggcatggttttgcctggtgtggttggattcaagttgagtgggaagttacaggatggtgtcactactactgacattgttcttactatgacccaaatgctaaggaagcacggtgctattggcaaattcgttgaattctatggtgttggtgtgggcgagctatctttgcctgctagggccacaattgccaacatgtctccagaatatggagctaccatgggcttcttccctgtagaccaagtagcattggactatctcaaattgacaggccgaagcgatgaaactgtgtcgatgattgaagcatacctgcgagctaacaaaatgtttgtggacaagcatgagcctgagacggaacgagttttctcttcatatctggagctggaccttagtgaggtggagccttgcgtttcaggccccaaaaggcctcatgatcgtgtccctttgaaggaaatgaagtcagactggcatgcttgcctggacaacgaagttggtttcaagggctatgcggtgccaaaggaacagcaaggcaaagttgtgaaattcgacttccatggaaggccagctgaaatcaagcatggcagtgttgttcttgcagcaatatgtagctccacaaacacatcaaatcccagcgtcatgattggtgctggccttgtggcaaagaaagcctgcgaattgggccttgaggtgaagccatgggtaaagacaagccttacccctggatctgtggttgctaccgagtacttgaaacatagtggccttcaagattatctgaaccagcaagggttccatgtcgctgcgcatggctgcgccacttgtgtgggcaactctggtgacctggatggatctgtatccgctgctatcacagaaaatgatatcgttgctgctgcggtgctgtcggccaaccgaaacttcgaggggcgtgtgaaccctctcactcgggctaactaccttgcctcgccgcctctggttgttgcctatgctcttgccggcactgttgacattggttttgaggaagagcccattggagttggaaagggtggcaaggaaattttcttgagggacatatggccttcaaaccaagagatcgatgaggttgtggagtccagcgtgcagactcacttgttcaagaaagtgtacgactccatcatggaacgtaaccctaggtggaaccagctgccggttccaaaggaggcactgtacccatgggacgacaggtccacctacatccgcaagcccacttacctggagggcatgtccatgacgccgcctggcccgcccacggtgacggaggcctactgcctgctcaaccttggagacagcatcaccacggaccacatctcctactcggggaagatccccgagggcacacctgcggccaagtatctgctcgagtatggtgtggagcccaagaacttcagctcctatggtggccgccgcgggaacaatgaggtggtgatgaggggagcgtttgccaatatgaggatcgtgaataagcttcttaatggcgaggctggtccctggacgatccatgttcctaccggggagaagctctacgtttacgacgcggcaatgaaatacaagtcggaaggtcatgacatggtcatcatcgctggctccgagtacggcagtggcagctctcgtgactctgctgccaagggaccaatgctactgggtgtcaagtcggtgattgcaaagagcttcgagcggatccaccggagcaacttggtggggatggggatcattcctctctgctttcaagcaggagaggatgccgattcactcggcctcaccggacgtgagcgctacaccatccacctccctaccagcaccgccgagatcagtcctggtcaggacgtgaccgtcacgacccacgacggaagatcattcacttgcactcttcgcttggacacacagcttgaggtcacatacttcaaccatggaggcatccttccctacatggtccgcaacctggcggcacaaatgaaataa

SEQ ID NO: 67179 - protein, 904 aa, Zea mays
MANPTATKHAFKRILTSLLKPGGGEYGKFFSLPALNDPRIDKLPYSIRVLLESAIRHCDNFQVTESDVEKIIDWENTSPKLAEIPFKPARCILMDNTGVPAVVDLAAMRDMMPKLGCDPYKINPLIPVDAVIDHAVRVDVAGTYDALDRNEELEFQRNKERFAFLKWASNAFHNMQVFPPGSGTVHQVNLEYLARVVFNEDGILYFDSVVGTDSHTTMINSLGVAGWGVGGIEAVVAMLGQPMGMVLPGVVGFKLSGKLQDGVTTTDIVLTMTQMLRKHGAIGKFVEFYGVGVGELSLPARATIANMSPEYGATMGFFPVDQVALDYLKLTGRSDETVSMIEAYLRANKMFVDKHEPETERVFSSYLELDLSEVEPCVSGPKRPHDRVPLKEMKSDWHACLDNEVGFKGYAVPKEQQGKVVKFDFHGRPAEIKHGSVVLAAICSSTNTSNPSVMIGAGLVAKKACELGLEVKPWVKTSLTPGSVVATEYLKHSGLQDYLNQQGFHVAAHGCATCVGNSGDLDGSVSAAITENDIVAAAVLSANRNFEGRVNPLTRANYLASPPLVVAYALAGTVDIGFEEEPIGVGKGGKEIFLRDIWPSNQEIDEVVESSVQTHLFKKVYDSIMERNPRWNQLPVPKEALYPWDDRSTYIRKPTYLEGMSMTPPGPPTVTEAYCLLNLGDSITTDHISYSGKIPEGTPAAKYLLEYGVEPKNFSSYGGRRGNNEVVMRGAFANMRIVNKLLNGEAGPWTIHVPTGEKLYVYDAAMKYKSEGHDMVIIAGSEYGSGSSRDSAAKGPMLLGVKSVIAKSFERIHRSNLVGMGIIPLCFQAGEDADSLGLTGRERYTIHLPTSTAEISPGQDVTVTTHDGRSFTCTLRLDTQLEVTYFNHGGILPYMVRNLAAQMK

SEQ ID NO: 67180 - DNA, 23 bp, Artificial sequence
  primer
atgctgtctgcacgttctgccat

SEQ ID NO: 67181 - DNA, 26 bp, Artificial sequence
  primer
ttatttcttctcatcggccttaattt

SEQ ID NO: 67182 - protein, 940 aa, Artificial sequence
  consensus sequence
  Variant (2)..(10): Xaa in position 2 to 10 is any amino acid
  Variant (11)..(40): Xaa in position 11 to 40 is any or no amino acid
  Variant (42)..(42): Xaa in position 42 is any amino acid
  Variant (45)..(46): Xaa in position 45 to 46 is any amino acid
  Variant (49)..(53): Xaa in position 49 to 53 is any amino acid
  Variant (55)..(68): Xaa in position 55 to 68 is any amino acid
  Variant (69)..(79): Xaa in position 69 to 79 is any or no amino acid
  Variant (81)..(85): Xaa in position 81 to 85 is any amino acid
  Variant (88)..(95): Xaa in position 88 to 95 is any amino acid
  Variant (96)..(111): Xaa in position 96 to 111 is any or no amino acid
  Variant (113)..(117): Xaa in position 113 to 117 is any amino acid
  Variant (120)..(132): Xaa in position 120 to 132 is any amino acid
  Variant (133)..(133): Xaa in position 133 is any or no amino acid
  Variant (136)..(136): Xaa in position 136 is any amino acid
  Variant (139)..(139): Xaa in position 139 is any amino acid
  Variant (142)..(143): Xaa in position 142 to 143 is any amino acid
  Variant (146)..(155): Xaa in position 146 to 155 is any amino acid
  Variant (156)..(176): Xaa in position 156 to 176 is any or no amino acid
  Variant (183)..(185): Xaa in position 183 to 185 is any amino acid
  Variant (186)..(186): Xaa in position 186 is any or no amino acid
  Variant (188)..(188): Xaa in position 188 is any amino acid
  Variant (190)..(193): Xaa in position 190 to 193 is any amino acid
  Variant (198)..(199): Xaa in position 198 to 199 is any amino acid
  Variant (201)..(203): Xaa in position 201 to 203 is any amino acid
  Variant (205)..(205): Xaa in position 205 is any amino acid
  Variant (207)..(207): Xaa in position 207 is any amino acid
  Variant (209)..(213): Xaa in position 209 to 213 is any amino acid
  Variant (215)..(217): Xaa in position 215 to 217 is any amino acid
  Variant (219)..(220): Xaa in position 219 to 220 is any amino acid
  Variant (222)..(222): Xaa in position 222 is any amino acid
  Variant (224)..(232): Xaa in position 224 to 232 is any amino acid
  Variant (234)..(235): Xaa in position 234 to 235 is any amino acid
  Variant (237)..(241): Xaa in position 237 to 241 is any amino acid
  Variant (243)..(248): Xaa in position 243 to 248 is any amino acid
  Variant (249)..(250): Xaa in position 249 to 250 is any or no amino acid
  Variant (252)..(254): Xaa in position 252 to 254 is any amino acid
  Variant (256)..(257): Xaa in position 256 to 257 is any amino acid
  Variant (259)..(259): Xaa in position 259 is any amino acid
  Variant (261)..(269): Xaa in position 261 to 269 is any amino acid
  Variant (273)..(273): Xaa in position 273 is any amino acid
  Variant (276)..(277): Xaa in position 276 to 277 is any amino acid
  Variant (279)..(279): Xaa in position 279 is any amino acid
  Variant (283)..(285): Xaa in position 283 to 285 is any amino acid
  Variant (288)..(294): Xaa in position 288 to 294 is any amino acid
  Variant (297)..(298): Xaa in position 297 to 298 is any amino acid
  Variant (300)..(300): Xaa in position 300 is any amino acid
  Variant (302)..(323): Xaa in position 302 to 323 is any amino acid
  Variant (324)..(342): Xaa in position 324 to 342 is any or no amino acid
  Variant (344)..(351): Xaa in position 344 to 351 is any amino acid
  Variant (354)..(355): Xaa in position 354 to 355 is any amino acid
  Variant (357)..(374): Xaa in position 357 to 374 is any amino acid
  Variant (375)..(453): Xaa in position 375 to 453 is any or no amino acid
  Variant (455)..(455): Xaa in position 455 is any amino acid
  Variant (460)..(460): Xaa in position 460 is any amino acid
  Variant (462)..(467): Xaa in position 462 to 467 is any amino acid
  Variant (468)..(468): Xaa in position 468 is any or no amino acid
  Variant (470)..(472): Xaa in position 470 to 472 is any amino acid
  Variant (474)..(475): Xaa in position 474 to 475 is any amino acid
  Variant (477)..(478): Xaa in position 477 to 478 is any amino acid
  Variant (479)..(479): Xaa in position 479 is any or no amino acid
  Variant (482)..(490): Xaa in position 482 to 490 is any amino acid
  Variant (491)..(492): Xaa in position 491 to 492 is any or no amino acid
  Variant (496)..(505): Xaa in position 496 to 505 is any amino acid
  Variant (507)..(514): Xaa in position 507 to 514 is any amino acid
  Variant (516)..(522): Xaa in position 516 to 522 is any amino acid
  Variant (524)..(525): Xaa in position 524 to 525 is any amino acid
  Variant (529)..(539): Xaa in position 529 to 539 is any amino acid
  Variant (540)..(550): Xaa in position 540 to 550 is any or no amino acid
  Variant (552)..(552): Xaa in position 552 is any amino acid
  Variant (554)..(554): Xaa in position 554 is any amino acid
  Variant (559)..(559): Xaa in position 559 is any amino acid
  Variant (562)..(570): Xaa in position 562 to 570 is any amino acid
  Variant (571)..(571): Xaa in position 571 is any or no amino acid
  Variant (573)..(573): Xaa in position 573 is any amino acid
  Variant (576)..(577): Xaa in position 576 to 577 is any amino acid
  Variant (579)..(579): Xaa in position 579 is any amino acid
  Variant (581)..(581): Xaa in position 581 is any amino acid
  Variant (583)..(583): Xaa in position 583 is any amino acid
  Variant (586)..(601): Xaa in position 586 to 601 is any amino acid
  Variant (602)..(611): Xaa in position 602 to 611 is any or no amino acid
  Variant (613)..(656): Xaa in position 613 to 656 is any amino acid
  Variant (657)..(705): Xaa in position 657 to 705 is any or no amino acid
  Variant (707)..(713): Xaa in position 707 to 713 is any amino acid
  Variant (720)..(720): Xaa in position 720 is any amino acid
  Variant (723)..(755): Xaa in position 723 to 755 is any amino acid
  Variant (756)..(805): Xaa in position 756 to 805 is any or no amino acid
  Variant (807)..(814): Xaa in position 807 to 814 is any amino acid
  Variant (815)..(820): Xaa in position 815 to 820 is any or no amino acid
  Variant (823)..(823): Xaa in position 823 is any amino acid
  Variant (828)..(829): Xaa in position 828 to 829 is any amino acid
  Variant (832)..(836): Xaa in position 832 to 836 is any amino acid
  Variant (839)..(845): Xaa in position 839 to 845 is any amino acid
  Variant (848)..(848): Xaa in position 848 is any amino acid
  Variant (850)..(850): Xaa in position 850 is any amino acid
  Variant (853)..(854): Xaa in position 853 to 854 is any amino acid
  Variant (857)..(859): Xaa in position 857 to 859 is any amino acid
  Variant (861)..(862): Xaa in position 861 to 862 is any amino acid
  Variant (865)..(865): Xaa in position 865 is any amino acid
  Variant (867)..(918): Xaa in position 867 to 918 is any amino acid
  Variant (919)..(936): Xaa in position 919 to 936 is any or no amino acid
  Variant (938)..(939): Xaa in position 938 to 939 is any amino acid
LXXXXXXXXXXXXXXXXXXXXXXXXXXXXXXXXXXXXXXXPXRVXXQDXXXXXAXXXXXXXXXXXXXXXXXXXXXXXXXPXXXXXDHXXXXXXXXXXXXXXXXXXXXXXXXNXXXXXFLXXXXXXXXXXXXXXPGXGIXHQXXLEXXXXXXXXXXXXXXXXXXXXXXXXXXXXXXXGTDSHTXXXXGXGXXXXGVGGXXAXXXMXGXPXXXXXPXXXGXXLXGXXXXXXXXXDXXLXXXXXLXXXXXXXXGXXXEXXGXGXXXXXXXXXATIXNMXXEXGATXXXFPXXXXXXXYLXXTXRXXXXXXXXXXXXXXXXXXXXXXXXXXXXXXXXXXXXXXXXXLXXXXXXXXGPXXPXXXXXXXXXXXXXXXXXXXXXXXXXXXXXXXXXXXXXXXXXXXXXXXXXXXXXXXXXXXXXXXXXXXXXXXXXXXXXXXXXXXXXXXXXXXXXXXXXIXSCTNXSXXXXXXXAXXXAXXAXXXGLXXXXXXXXXXXPGSXXXXXXXXXXGXXXXXXXXGXXXXXXXCXXCIGXXXXXXXXXXXXXXXXXXXXXXVXSXNRNFXGRXXXXXXXXXXLXSPXXVXAXAXAGXXXXXXXXXXXXXXXXXXXXXXXXXXPXXXXXXXXXXXXXXXXXXXXXXXXXXXXXXXXXXXXXXXXXXXXXXXXXXXXXXXXXXXXXXXXXXXXXXXXXXXXXXXXXXXXXXXXXXXXXLXXXXXXXTTDHISXAGXXXXXXXXXXXXXXXXXXXXXXXXXXXXXXXXXXXXXXXXXXXXXXXXXXXXXXXXXXXXXXXXXXXXXXXXXXXXXXXXXXXYXXXXXXXXXXXXXXYGXGSSRXXAAXXXXXLGXXXXXXXSFXRXIHXXNLXXXGXXPLXFXXXXXXXXXXXXXXXXXXXXXXXXXXXXXXXXXXXXXXXXXXXXXXXXXXXXXXXXXXXXXXXXXXXXXXGXXL

SEQ ID NO: 67183 - protein, 27 aa, Artificial sequence
  protein pattern
  Variant (4)..(4): Xaa in position 4 is Asp or Glu
  Variant (5)..(5): Xaa in position 5 is His or Trp
  Variant (8)..(8): Xaa in position 8 is any amino acid
  Variant (9)..(9): Xaa in position 9 is Ala, Glu or Gly
  Variant (10)..(10): Xaa in position 10 is Pro, Thr or Val
  Variant (11)..(13): Xaa in position 11 to 13 is any amino acid
  Variant (15)..(15): Xaa in position 15 is Gly, Ile or Val
  Variant (16)..(16): Xaa in position 16 is any amino acid
  Variant (17)..(17): Xaa in position 17 is Ala, Thr or Val
  Variant (18)..(18): Xaa in position 18 is any amino acid
  Variant (19)..(19): Xaa in position 19 is Ile, Leu or Val
  Variant (20)..(20): Xaa in position 20 is Ala, Cys, Ser, Thr or Val
  Variant (21)..(21): Xaa in position 21 is any amino acid
  Variant (22)..(22): Xaa in position 22 is Asp, Gly, Asn, Pro or Ser
  Variant (23)..(23): Xaa in position 23 is any amino acid
  Variant (24)..(24): Xaa in position 24 is Ala or Glu
SSRXXAAXXXXXXGXXXXXXXXXXRIH

SEQ ID NO: 67184 - protein, 48 aa, Artificial sequence
  protein pattern
  Variant (3)..(3): Xaa in position 3 is any amino acid
  Variant (4)..(6): Xaa in position 4 to 6 is any or no amino acid
  Variant (11)..(11): Xaa in position 11 is Ala, Ile or Leu
  Variant (12)..(12): Xaa in position 12 is Asp or Glu
  Variant (14)..(14): Xaa in position 14 is any amino acid
  Variant (15)..(15): Xaa in position 15 is Ala, Asp, Asn, Ser or Thr
  Variant (16)..(16): Xaa in position 16 is Ala, Cys, Gly, Ser, Thr or Val
  Variant (17)..(17): Xaa in position 17 is Ile, Leu, Met or Val
  Variant (18)..(18): Xaa in position 18 is any amino acid
  Variant (19)..(19): Xaa in position 19 is Asp, Gly or Asn
  Variant (20)..(26): Xaa in position 20 to 26 is any amino acid
  Variant (28)..(29): Xaa in position 28 to 29 is any amino acid
  Variant (30)..(30): Xaa in position 30 is Ile, Leu, Met or Val
  Variant (32)..(33): Xaa in position 32 to 33 is any amino acid
  Variant (34)..(34): Xaa in position 34 is Phe, Ile, Leu, Met or Val
  Variant (35)..(35): Xaa in position 35 is any amino acid
  Variant (37)..(42): Xaa in position 37 to 42 is any amino acid
  Variant (43)..(43): Xaa in position 43 is Ala, Ser or Thr
  Variant (44)..(44): Xaa in position 44 is Ala, Cys, Gly, Pro or Thr
  Variant (45)..(45): Xaa in position 45 is any amino acid
  Variant (47)..(47): Xaa in position 47 is any amino acid
  Variant (48)..(48): Xaa in position 48 is Ala, Ile or Val
LGXXXXGVGGXXAXXXXXXXXXXXXXPXXXGXXXXGXXXXXXXXXDXX

SEQ ID NO: 67185 - protein, 18 aa, Artificial sequence
  protein pattern
  Variant (2)..(2): Xaa in position 2 is Gly or Thr
  Variant (7)..(7): Xaa in position 7 is Ser or Thr
  Variant (9)..(9): Xaa in position 9 is any amino acid
  Variant (10)..(10): Xaa in position 10 is Glu or Pro
  Variant (11)..(14): Xaa in position 11 to 14 is any amino acid
  Variant (15)..(15): Xaa in position 15 is Ala, Cys, Gly, Ser or Val
  Variant (17)..(17): Xaa in position 17 is any amino acid
  Variant (18)..(18): Xaa in position 18 is Ile, Leu or Val
IXSCTNXSXXXXXXXAXX

SEQ ID NO: 67186 - protein, 13 aa, Artificial sequence
  protein pattern
  Variant (2)..(3): Xaa in position 2 to 3 is any amino acid
  Variant (4)..(4): Xaa in position 4 is any or no amino acid
  Variant (7)..(7): Xaa in position 7 is any amino acid
  Variant (10)..(10): Xaa in position 10 is Ile or Val
  Variant (11)..(11): Xaa in position 11 is any amino acid
PXXXGIXHQXXLE

SEQ ID NO: 67187 - protein, 15 aa, Artificial sequence
  protein pattern
  Variant (2)..(4): Xaa in position 2 to 4 is any amino acid
  Variant (5)..(5): Xaa in position 5 is any or no amino acid
  Variant (9)..(9): Xaa in position 9 is Ile or Leu
  Variant (11)..(11): Xaa in position 11 is any amino acid
  Variant (12)..(13): Xaa in position 12 to 13 is any or no amino acid
  Variant (15)..(15): Xaa in position 15 is Gly or Ile
GXXXXTDHXSXXXAX

SEQ ID NO: 67188 - protein, 11 aa, Artificial sequence
  protein pattern
  Variant (2)..(2): Xaa in position 2 is any amino acid
  Variant (4)..(4): Xaa in position 4 is any amino acid
  Variant (9)..(10): Xaa in position 9 to 10 is any amino acid
VXSXNRNFXXR

SEQ ID NO: 67189 - protein, 12 aa, Artificial sequence
  protein pattern
  Variant (2)..(2): Xaa in position 2 is Leu or Val
  Variant (3)..(5): Xaa in position 3 to 5 is any amino acid
  Variant (7)..(7): Xaa in position 7 is Ile, Leu, Met or Val
  Variant (8)..(8): Xaa in position 8 is Ile, Leu or Val
  Variant (11)..(11): Xaa in position 11 is any amino acid
NXXXXGXXPLXF

SEQ ID NO: 67190 - DNA, 1449 bp, Saccharomyces cerevisiae
  CDS (1)..(1449)
atgcctgactatgacaattacactacgccattgtcttctagatatgcctccaaggaaatgtcagcaacgttttctttgagaaacagattttccacatggagaaaactatggttaaatttggctattgctgagaaggaattgggcttaactgttgttacagatgaagcaattgagcaaatgcgcaaacacgtcgaaatcactgatgatgaaatcgcaaaagcttctgctcaagaagccattgtaagacatgatgttatggcacatgttcatacatttggtgaaacttgtccggctgctgcgggtatcattcacttaggtgctacttcctgtttcgttacagacaatgctgatctaatctttattagggacgcctacgatattattattccaaaacttgttaacgtcatcaacagattggctaagtttgctatggaatacaaggatttgcctgtattgggttggactcactttcaaccagcacaattaacgaccttgggtaagagagctactttatggatacaagagctattgtgggatttgagaaactttgaaagagctagaaacgatatcggtctacgtggtgttaagggtactactggtactcaggcatcattcttggccttattccatggtaatcatgataaagttgaagcccttgacgaaagagtaactgaattattaggtttcgataaggtatatccagtcactggtcaaacctactcaagaaaaattgacattgacgtgttggctcctttgtcttcttttgctgctactgcacacaaaatggctactgacataagattattagccaacctgaaggaagttgaggaaccttttgagaaatcacaaatcggatcctctgctatggcttacaagagaaacccaatgcgttgtgagagagtgtgctccttggctagacacttaggttccttgtttagtgacgccgttcaaactgcatccgttcaatggttcgaaagaactctggatgattctgctattagaagaatttctttaccaagtgcatttttaaccgcagatattctattatctactttgttgaacatctcatccggtttagttgtgtatccaaaggttatcgaaaggagaattaagggtgaactaccttttatggctactgaaaatatcatcatggctatggtagaaaagaatgcctccagacaagaagtacatgagcgtattagagtgctctctcatcaagccgcagcagtagtcaaggaagaaggtggggaaaatgatttaattgaacgagtaaagagggatgaatttttcaagcctatctgggaagaattagattctttactggaaccatccacttttgttggtagagctccacaacaagttgagaaatttgttcaaaaagacgttaacaatgctttacaacctttccaaaagtacctaaacgatgaacaagtcaagttaaatgtttag

SEQ ID NO: 67191 - protein, 482 aa, Saccharomyces cerevisiae
MPDYDNYTTPLSSRYASKEMSATFSLRNRFSTWRKLWLNLAIAEKELGLTVVTDEAIEQMRKHVEITDDEIAKASAQEAIVRHDVMAHVHTFGETCPAAAGIIHLGATSCFVTDNADLIFIRDAYDIIIPKLVNVINRLAKFAMEYKDLPVLGWTHFQPAQLTTLGKRATLWIQELLWDLRNFERARNDIGLRGVKGTTGTQASFLALFHGNHDKVEALDERVTELLGFDKVYPVTGQTYSRKIDIDVLAPLSSFAATAHKMATDIRLLANLKEVEEPFEKSQIGSSAMAYKRNPMRCERVCSLARHLGSLFSDAVQTASVQWFERTLDDSAIRRISLPSAFLTADILLSTLLNISSGLVVYPKVIERRIKGELPFMATENIIMAMVEKNASRQEVHERIRVLSHQAAAVVKEEGGENDLIERVKRDEFFKPIWEELDSLLEPSTFVGRAPQQVEKFVQKDVNNALQPFQKYLNDEQVKLNV

SEQ ID NO: 67192 - DNA, 1431 bp, Clostridium acetobutylicum ATCC 824
  CDS (1)..(1431): transl_table=11
atgagaaatacttatgaaacaccacttaatacaagatatgcatctaaagaaatgagttatcttttttctgatgatatgaaatttagaacatggagaaaactttgggttgctctagcagaaagtgaaatggaattaggacttaatataactaatgagcagattaacgaattaaaagctcatattgatgatataaactacgacgttgcacaagaacgagaaaaaatagtaagacatgatgtaatgagtcatgtatatgcttatggcgttcaatgtccatcagcaaagggtataatacatttaggtgctacatcctgctatgttggagataatgctgatattatcataatgaaggaagcccttatacttataagaaaaaaacttcttaatacaatacaccatttaagcaaatttgctttaaactataaatctcttcctacacttggattcactcaccttcaacctgctcagcttactactgtgggtaaaagagcaaccttatggatacaagatttaatgatagatttagaaaatcttgattttgtaatagaaaatttaaaattaagaggtgttaaaggtacaacaggaactcaagcaagttttatggacctttttaatggagaccaggaaaaaattaaaacccttgagaaaaaagtagttgaaaaaatgaactttaaatcggcatatgatgtaacgggtcaaacttatcctagaaaaatagattctatagtactaaatacactttcagagattgctcaaagtgcttataagttcagtaatgacttgagaatacttcaaaatatgaaagagatggaggagccttttgaaaaaaatcaaattggatcttcagcaatggcttataagagaaatcctatgagatctgaaagaataagtgctctatcaagatatataattgtaaattcacttaatcctgctattactgcggcaactcaatggtttgaaagaacactagatgattctgcaaacaaaagaatttctgtagcagaagctttccttgcgctagatggtgttttgaatctttatataaatgtatcgtccaatatggtagtatatgaaaatgtaataacagctcatgttaagagtgaacttccttttatggcaacagaaaatattatgatggaagctgtaaaaaaaggttgcgacaggcaagaacttcatgaaagaataagaaaacattcaatggaaacagctaaaagaattaaagctgatggattaccaaatgatttaatagaaagaataaagaaagattcttattttaaattgacagaaaaagaaattgatgaaataatagatccaaataaatttgtaggtagagccccatatcaagtagaagaatatataatcaattgtgtaaagcctattttagttaagaataaagatattgtaggtatagaagttagtattgatgtttaa

SEQ ID NO: 67193 - protein, 476 aa, Clostridium acetobutylicum ATCC 824
MRNTYETPLNTRYASKEMSYLFSDDMKFRTWRKLWVALAESEMELGLNITNEQINELKAHIDDINYDVAQEREKIVRHDVMSHVYAYGVQCPSAKGIIHLGATSCYVGDNADIIIMKEALILIRKKLLNTIHHLSKFALNYKSLPTLGFTHLQPAQLTTVGKRATLWIQDLMIDLENLDFVIENLKLRGVKGTTGTQASFMDLFNGDQEKIKTLEKKVVEKMNFKSAYDVTGQTYPRKIDSIVLNTLSEIAQSAYKFSNDLRILQNMKEMEEPFEKNQIGSSAMAYKRNPMRSERISALSRYIIVNSLNPAITAATQWFERTLDDSANKRISVAEAFLALDGVLNLYINVSSNMVVYENVITAHVKSELPFMATENIMMEAVKKGCDRQELHERIRKHSMETAKRIKADGLPNDLIERIKKDSYFKLTEKEIDEIIDPNKFVGRAPYQVEEYIINCVKPILVKNKDIVGIEVSIDV

SEQ ID NO: 67194 - DNA, 1431 bp, Clostridium perfringens str. 13
  CDS (1)..(1431): transl_table=11
gtgaaaaatttatatagcacaccattgaattcaagatatgcgtcaaaagaaatgtcatatattttctcagatgatatgaaattctcaacatggagaaaattatgggttgctcttgcagagggtgaaaaagaattaggattaaatataactgacgagcaaatagaagagcttaaaagtcatatttcagatataaattacgaagaagcaataaaaaaagaaaaagaagttagacacgatgttatgagtcacgtttatgcatatggacttcaatgtccttcagcaaaaggtatcatacatttaggagcaacaagctgctatgttggagataatacagatgtaataataatgagagatgcattattattaataaagaaaaaaatagttgcagttttaaataatttaaaaagatttgctttagaatataaggatatgcctactctaggatttactcatttccaaccagcacagcttactactgtaggtaagagagctacgttatggatgcaagatttagtaatggatatggagaacatagattttctattatcaactttaaaattaagaggagtaaaaggaactactggtactcaagcaagctttatgaatctttttgaaggtgatgaagaaaaggttaaggctttagataaaatcgttgcagaaaaaatgggatttaaaaagagttttggagttacaggtcaaacttatccaagaaaattagattctataattttaaatacattatcagagattgcacaaagtgcctataaattctcaaatgacttaagattacttcaaagtatgaaagaaatagaagaaccatttgaaaagaatcaaatagggtcatcagctatggcatataagagaaatcctatgagaagtgaaagaatgggagcattagctagatatgttatagtagatgccttaaatccagctattacggcttcaactcaatggtttgaaagaacattagatgattcagctaataagagaattgcagtagcagaagctttcttagctttagatggagttctatatctttatataaatattgctgagaatatggtagtttatgataaagttattgaagctcatgtaaatcaagaattacctttcatggcaactgaaaatataatgatggaatcagttaaaaaaggcggagatagacaagagcttcatgaaagaataagagttcattctatggatgctgctcaaagagttaaaggagaagggcttaataatgatttaatagaaagaataataaatgatccttcatttaatctttctaaagaagaaattatagctataatagatccagttaaatttgttggtagagctccaagccaagttgtagagtttattgatgagtatgtaaaccctataatagaagctaataaggatgcagctagcttaagtagtgatataacagtttaa

SEQ ID NO: 67195 - protein, 476 aa, Clostridium perfringens str. 13
MKNLYSTPLNSRYASKEMSYIFSDDMKFSTWRKLWVALAEGEKELGLNITDEQIEELKSHISDINYEEAIKKEKEVRHDVMSHVYAYGLQCPSAKGIIHLGATSCYVGDNTDVIIMRDALLLIKKKIVAVLNNLKRFALEYKDMPTLGFTHFQPAQLTTVGKRATLWMQDLVMDMENIDFLLSTLKLRGVKGTTGTQASFMNLFEGDEEKVKALDKIVAEKMGFKKSFGVTGQTYPRKLDSIILNTLSEIAQSAYKFSNDLRLLQSMKEIEEPFEKNQIGSSAMAYKRNPMRSERMGALARYVIVDALNPAITASTQWFERTLDDSANKRIAVAEAFLALDGVLYLYINIAENMVVYDKVIEAHVNQELPFMATENIMMESVKKGGDRQELHERIRVHSMDAAQRVKGEGLNNDLIERIINDPSFNLSKEEIIAIIDPVKFVGRAPSQVVEFIDEYVNPIIEANKDAASLSSDITV

SEQ ID NO: 67196 - DNA, 1431 bp, Corynebacterium glutamicum ATCC 13032
  CDS (1)..(1431): transl_table=11
gtggctgataaaaagaagatcgcaaacgtcctgtcgaaccgttacgcctccgcggaactttctaacctgtggagtgccgaagagaagatcatcatggagcgccagctctggatcgccgtgatgaaagcccagaaagatttgggagttgagatccctgccgaggcaattgaatcctatgaagcagtgatcgaccaggttgatttggcaagcatcgccgatcgtgagcgcgtcacccgccacgatgtgaaggcccgcatcgaagaattcaatgcactggctggccatgagcacatccacaagggcatgacctcccgcgacctcaccgaaaatgttgaacagctgcagatccaccgctcccttgagctggtccgcaacaagggcattgcagttgttgcagctatcggatcccgcgcagcgcagtaccaaagcctggtcatggctggccgttcccacaacgtggcagcgcaggcaactaccttgggcaagcgtttcgcaaccgcagctgatgaaatgctcgtggcacttgagcgcgtcaccgaactgctcaaccgctacccacttcgcggaatcaagggcccaatgggaaccgcccaagacatgcttgacctcatggaaggcgacgaggctcgtctctccgatctggaaacccgcatcgcagcacacctcggctttgatcgcgtcttcgactccgtcggccaggtctacccacgttcccttgacttcgatgcagtatctgctctggttcagcttggctccggcccatcatcgctgtcccacaccattcgtctcatggccggcaccgaaactgttaccgaaggttttaaggaaggccaggtcggttcctctgcaatgcctcacaagatgaacgctcgctcctgtgagcgcgtgggcggcctgcaggttattcttcgcggatacctcaccatggttgctgatctttccggccagcagtggaacgaaggcgatgtcttctgctccgtgatccgccgcgttgcactgccagacgcattcttcgcgattgacggaatgtttgaaactttcctgacagtcctggatgaattcggtgcattccctgccatgatcgagcgcgaacttgagcgttacctgccattcctggcaactacccgtatcctcatggccgctgtccgcgcaggcgttggccgcgaaaccgcacacgaagtaatcaaggaaaacgctgtcgcggttgccctcaacatgcgcgaaaatggcggtgaccaggaccttatccagcgcctcgctgctgatgagcgcctcccaatgagcgaagctgaccttgaggcagcgctggctgaccgccacgccttcatcggtgccgctgagtcccaggtctcccgtgtgctcgaccgcattcaggtgcttgtcgacgcccaccccggcgccgcagactaccgaccaggtgagattctttaa

SEQ ID NO: 67197 - protein, 476 aa, Corynebacterium glutamicum ATCC 13032
MADKKKIANVLSNRYASAELSNLWSAEEKIIMERQLWIAVMKAQKDLGVEIPAEAIESYEAVIDQVDLASIADRERVTRHDVKARIEEFNALAGHEHIHKGMTSRDLTENVEQLQIHRSLELVRNKGIAVVAAIGSRAAQYQSLVMAGRSHNVAAQATTLGKRFATAADEMLVALERVTELLNRYPLRGIKGPMGTAQDMLDLMEGDEARLSDLETRIAAHLGFDRVFDSVGQVYPRSLDFDAVSALVQLGSGPSSLSHTIRLMAGTETVTEGFKEGQVGSSAMPHKMNARSCERVGGLQVILRGYLTMVADLSGQQWNEGDVFCSVIRRVALPDAFFAIDGMFETFLTVLDEFGAFPAMIERELERYLPFLATTRILMAAVRAGVGRETAHEVIKENAVAVALNMRENGGDQDLIQRLAADERLPMSEADLEAALADRHAFIGAAESQVSRVLDRIQVLVDAHPGAADYRPGEIL

SEQ ID NO: 67198 - DNA, 1434 bp, Fusobacterium nucleatum subsp. nucleatum ATCC 25586
  CDS (1)..(1434): transl_table=11
atgagtaatgaaatctattcaaatccactatgtgaaagatacagctctaaagaaatgatgcataacttttcacctgataaaaaattttcaacttggagaaaactttgggttgcacttgcagaatctgaaaaagaattaggacttgatatatcacaagaacaaattgatgaaatgaaaaaaaatatttataacatagattatgaactagcagcaaaaaaagaaaaagaattcagacatgatgttatggctcatgtgcatacatttggtacacaagcgcctttggctatgccaataatacatttaggagccacaagtgcttttgttggagataacacagatttaatccaaattaaagatggacttcaaattataaaaacaaaacttataaatgttatgagtaatctttctaaatttgcattggataataaaagtattgcaactttgggatttacacatttccaagcagctcaacttactactgttggaaaaagagctacattgtggttacaatctttgatgttagatttagaagaattagaatttagagaaaaaactttaagatttagaggagttaaaggaactactggtacacaagcaagttttaaagatttattcaatggatatttttcaaaagttgaagaattagatattttagtttctaaaaaaatgggctttgataaaagatttgcagtaacaggtcaaacttatgatagaaaagttgattcagaaataatgaatttacttgcaaatatagctcaatctgctcataaatttactaatgatttaagattattacaacatttaaaagaagttgaagaaccttttgaaaagactcaaataggttcatctgcaatggcatataaaagaaatccaatgagaagtgaaagaatttcatctcttgctaagtttgttatagcattacaacaaagtacagctatggtggcttcaactcaatggtttgaaagaactcttgatgattcagctaacaaaagattatcattacctcaagcatttttagctgtggatgccatattaattatttggaataatattatggaaggtttagttgtatatgataaaataatagaaaaacatataatgagtgaacttccatttatggcaactgaatatataataatggaatgtgtaaaaactggtggagatagacaagaattacatgaaagaattagagttcattctatggaagctggtaaacaagtaaaagttgaaggaaaggataatgatttaatagatagaatagttaatgataattattttaaattagataaagctaaattactttctattttagaacctaaaaactttattggctttgctcctgaacaaacagaaaaatttatcaacactgaaataaaacctatattagaaaaatataaagctcttataggaatggattcagaattaaaggtataa

SEQ ID NO: 67199 - protein, 477 aa, Fusobacterium nucleatum subsp. nucleatum ATCC 25586
MSNEIYSNPLCERYSSKEMMHNFSPDKKFSTWRKLWVALAESEKELGLDISQEQIDEMKKNIYNIDYELAAKKEKEFRHDVMAHVHTFGTQAPLAMPIIHLGATSAFVGDNTDLIQIKDGLQIIKTKLINVMSNLSKFALDNKSIATLGFTHFQAAQLTTVGKRATLWLQSLMLDLEELEFREKTLRFRGVKGTTGTQASFKDLFNGYFSKVEELDILVSKKMGFDKRFAVTGQTYDRKVDSEIMNLLANIAQSAHKFTNDLRLLQHLKEVEEPFEKTQIGSSAMAYKRNPMRSERISSLAKFVIALQQSTAMVASTQWFERTLDDSANKRLSLPQAFLAVDAILIIWNNIMEGLVVYDKIIEKHIMSELPFMATEYIIMECVKTGGDRQELHERIRVHSMEAGKQVKVEGKDNDLIDRIVNDNYFKLDKAKLLSILEPKNFIGFAPEQTEKFINTEIKPILEKYKALIGMDSELKV

SEQ ID NO: 67200 - DNA, 1419 bp, Methanopyrus kandleri AV19
  CDS (1)..(1419): transl_table=11
ttgcccgttcatccgatcgagtcacggtacggatcggacgagctccgccgggtgttctcggaagagaacaaagtggcgaagatgctcgaggttgaggcggccctggtacgggcgctctccgaggtgttcgacttcgtaccggaggaggccgcggacgaggtggaacgcgtcgtcgaggagatcaccggcgacgaggaagagctacgacggttcgtggaacgcgtcaaggagatcgaggcggagatcaaacacgacgtgatggccctggtgaaggcgctatcggagcggtgcgaggttggcggggactacgtgcacctgggcgctaccagcaacgacgtgatagacaccgcgcacgcgttggtactgcgggaagcactgtcgataatctaccgcaggctgcaccgtctagcggaagtgctggcggagaaggccgaggagtacgccgacctcccgatggtgggtcgcacgcacggtcagcacgcggttcccacgacgctcggtatgaagttcgcgatctgggcacgcgaggtcgtgaggcacctgaagcgactccgggagtgcgcgaaccgggtactggtggggcagctgtccggtgccgtcggaacgatggcggcgctgggcgagaagggtcctgaggtgcagcgtcgggtgatggaactgctgaacctcaggccggtgaccgtgtccaaccaggtcattcagcgggaccgctacgcggagttgatcgcactgctcgcgctgatcggctcgacgctggataagatcggccgcgagatcaggaacctccagcggacggagatccgggaggtcgaggaaccgttcgaccccgagaagcaggtcggatcctcgacgatgccacacaagcggaatccgatccgttccgagcgggtgtgtagcctggcgagggtactgcggtcaaacgtgcagatagcgctcgagaacgtgccgctcgaacacgagcgggacctcacgaactccgcgagcgagcgggtgatcctccccgaacagttcctgctgctggacgaaatgctgcggctgacgatccacaacttggagggattacgcgtttacgaggagaacatacgggagaacctgcggctgacgaaggggcttaatatggcggaggcactgatggtcgaactggtcaagcgaggaatagggcgacaggaggcgcacgagctcgtgagacggctcgcgatgagggcttgggaggaaggacgtgacttcgcggaagtagttaaggaggaagagcgcgtccgtgagctgttcggagaagaagagttagatgaggtgttggaccccgagaagtacttgggcgtggctcccgacctggcgcgtgaggccgccgagaagacccgacgcgacctggaggagatcgatcgcgagatgaaggaggtgttgggtgtcggtgcgggataa

SEQ ID NO: 67201 - protein, 472 aa, Methanopyrus kandleri AV19
MPVHPIESRYGSDELRRVFSEENKVAKMLEVEAALVRALSEVFDFVPEEAADEVERVVEEITGDEEELRRFVERVKEIEAEIKHDVMALVKALSERCEVGGDYVHLGATSNDVIDTAHALVLREALSIIYRRLHRLAEVLAEKAEEYADLPMVGRTHGQHAVPTTLGMKFAIWAREVVRHLKRLRECANRVLVGQLSGAVGTMAALGEKGPEVQRRVMELLNLRPVTVSNQVIQRDRYAELIALLALIGSTLDKIGREIRNLQRTEIREVEEPFDPEKQVGSSTMPHKRNPIRSERVCSLARVLRSNVQIALENVPLEHERDLTNSASERVILPEQFLLLDEMLRLTIHNLEGLRVYEENIRENLRLTKGLNMAEALMVELVKRGIGRQEAHELVRRLAMRAWEEGRDFAEVVKEEERVRELFGEEELDEVLDPEKYLGVAPDLAREAAEKTRRDLEEIDREMKEVLGVGAG

SEQ ID NO: 67202 - DNA, 1419 bp, Thermoanaerobacter tengcongensis MB4
  CDS (1)..(1419): transl_table=11
atgagagaggtttatgaaacacctttggtcacaaggtatgcgagtaaagaaatggcacaaattttttctgatgatgagaagtttaaaacctggagaaaattgtgggtggctttagccaaaagtgaaaaggaattaggtcttaatataactaatgaacaaatagaagaaatggaaaaaaatatagaaaatataaattatgaagatgcggaaaggttcgaaaaagaattcaggcacgatgtaatggctcatattcacgcctacgggcttttatgcccaaaagcaaagcctataattcacttaggcgcaacttctgcgtttgtagatgacaatacggatattattttaatggatagagggcttcagctaattgagaaaaagcttttaaaagcgataaaagtcctctctgaatttgcactaaaatataaagatttaccaacattgggttatactcactttcagcctgctcagctgacaactgtaggtaaaagagcctgtctctggatacaggacctgatccttgaccttcaggatttaagatacaggcgtcaaaacatgatgctgagaggagtaaaaggaacgacaggtactcaagctagttttatggaactttttgatggagatgaggaaaaggtaaaagagcttgacaggttggttgtagaaaagatggggtataaaaaatcctttcctgtaacaggtcagacttacactcgaaagtacgattttatgattttatctgtgttaagtgggatagctcaaagtgcccacaagtttagcaacgacataaggcttttgcaacatttaagggaaatcgaagaaccttttgaagaaaagcaaattggttcttctgctatggcttacaaaagaaaccctatgagaagtgaaagaatggcagctttatctaggtatgtaattgtgacattattaaactcttctatcacggcctccaaccagtggtttgagaggaccttggatgattcagctaacaggagaattgtaattcccgagatgtttttggccacggatgctattttaaacctttatataaacatagcttccgggttgaaagtgaacgaaaaagtgattgaaaaaaacgtaaaaagagaacttccatttatggcaacagaaaaaattttaatggcggctgtgaaaaagggcggagatagacaggaattgcacgaagccataagagtatattccttaaaggctgctgaagaagtaaaaaatggcgaagacaatagactgcttgagtatatcaagcaggataaaagatttggcctttctcatgaggaaattcttgaccttactgatccaagaaagtttacaggcagatctgcaaatcaggtaaaggaatttattgaagaccatgtaagacctcttcttgatgggatagaagacatagaagtcaaagtagaagtttaa

SEQ ID NO: 67203 - protein, 472 aa, Thermoanaerobacter tengcongensis MB4
MREVYETPLVTRYASKEMAQIFSDDEKFKTWRKLWVALAKSEKELGLNITNEQIEEMEKNIENINYEDAERFEKEFRHDVMAHIHAYGLLCPKAKPIIHLGATSAFVDDNTDIILMDRGLQLIEKKLLKAIKVLSEFALKYKDLPTLGYTHFQPAQLTTVGKRACLWIQDLILDLQDLRYRRQNMMLRGVKGTTGTQASFMELFDGDEEKVKELDRLVVEKMGYKKSFPVTGQTYTRKYDFMILSVLSGIAQSAHKFSNDIRLLQHLREIEEPFEEKQIGSSAMAYKRNPMRSERMAALSRYVIVTLLNSSITASNQWFERTLDDSANRRIVIPEMFLATDAILNLYINIASGLKVNEKVIEKNVKRELPFMATEKILMAAVKKGGDRQELHEAIRVYSLKAAEEVKNGEDNRLLEYIKQDKRFGLSHEEILDLTDPRKFTGRSANQVKEFIEDHVRPLLDGIEDIEVKVEV

SEQ ID NO: 67204 - DNA, 1446 bp, Drosophila melanogaster
  CDS (1)..(1446)
atggctagcaactacgagggctacaagtcgccgctgagcacccggtacgccagcaaagagatgcagttcctcttcagtgaccagaacaagttctccacctggcgccggttgtgggtgtggctggcgaaggcggagagcaggctgggactagagatcagcgatgcccagattgccgagatggagctccagatcagcaacatcgactttgaggcggccgccgccgaggagcgacttacgcgccacgacgtaatggcccacgtccatgtctttgccaaacagtgtccctctgctgcgccggtgatccatttgggagcaacctcgtgctatgtgggcgacaacactgatctgattgtactgagggacgctcttaaactgctccttccacgagtcgccagcgtgatagctcgtctaagccagtttgcccagagctacaaggatcagcccacgttgggattcacccatctccagcctgcgcagttgaccacggttggcaagcgggcgtgcctgtggatccaggatctgatcatggacgaacgcgcgctgtcccgctgtttagaggacctgcgcttccgtggagtcaagggaactactggtacccaggcctcgttcctgcaacttttcaatggggatggcgagaaggtgaagcagctggatcagttggtcaccgaactggctggcttcaagaaggcctatgcggtaaccggtcaaacatactcccgaaaggtggatgtggagatcgtggccgcgcttgccagtctcggcaccaccatccacaagatgtgctccgatctgcgcatcctcgcttctcgcaaagagctggaggagcccttcgagagcactcagattggctcctcggccatgccgtacaagaggaaccctatgcgctcggagcgttgttgcgccctggcccgtcacctcatcaccttgttcagcagtgctgctaatacacatgccactcagtggctggaacgcactctggatgactctgccaacaggaggttgaccctatccgaggccttcctggctgcagatgccgccctgcttactctgctgaacatctcgcagggactggtcgtttacccaaaggtgattgaacggcacatttcccaagagctgccgttcatgtccacagagaacataatcatggccatggtgaaggcgggaggagatcgccaggtgtgccacgagaagattcgcgtgctgtcccaggaggccggagcccaggtgaagcagcatggcaaggacaacgacctcgtggttcgagtgcgaaaggatccctacttttcgcccatcctggagcaactggacaccatactggatgccaaaacctttactggacgtgccagcgaccaagtgggcgagttcgtcaaggaggaagtggaacccgtgctggcacgctactccgaagccctgaagaacgttcaagacgtcaaactgaacatctag

SEQ ID NO: 67205 - protein, 481 aa, Drosophila melanogaster
MASNYEGYKSPLSTRYASKEMQFLFSDQNKFSTWRRLWVWLAKAESRLGLEISDAQIAEMELQISNIDFEAAAAEERLTRHDVMAHVHVFAKQCPSAAPVIHLGATSCYVGDNTDLIVLRDALKLLLPRVASVIARLSQFAQSYKDQPTLGFTHLQPAQLTTVGKRACLWIQDLIMDERALSRCLEDLRFRGVKGTTGTQASFLQLFNGDGEKVKQLDQLVTELAGFKKAYAVTGQTYSRKVDVEIVAALASLGTTIHKMCSDLRILASRKELEEPFESTQIGSSAMPYKRNPMRSERCCALARHLITLFSSAANTHATQWLERTLDDSANRRLTLSEAFLAADAALLTLLNISQGLVVYPKVIERHISQELPFMSTENIIMAMVKAGGDRQVCHEKIRVLSQEAGAQVKQHGKDNDLVVRVRKDPYFSPILEQLDTILDAKTFTGRASDQVGEFVKEEVEPVLARYSEALKNVQDVKLNI

SEQ ID NO: 67206 - DNA, 1443 bp, Streptomyces coelicolor A3(2)
  CDS (1)..(1443): transl_table=11
gtgacttccgctcccgccaagccccgcatcccgaacgtcctcgccggacgctacgcctccgccgagctcgccaccctctggtcgcccgagcacaaggtgaagctcgagcggcagctctggctcgccgtgctgcgggcccagaaggacctgggcatcgaggtgcccgacgccgcgatcgccgactacgagcgcgtcctcaaccaggtcgacctggcctcgatcgccgagcgcgagaaggtcacgcggcacgacgtgaaggcgcggatcgaggagttcaacgacctcgccgggcacgagcacgtccacaagggcatgacctcccgcgacctgacggagaacgtcgagcagctccagatccggctctcgctggagctggtccgggaccgttccgtggccgtcctggcccgcctcggcaagctggccggcgagtacggcgagctggtcatggccggccgctcgcacaacgtggcggcgcaggcgacgacgctgggcaagcggttcgccagcgccgccgacgagctgctcgtggcgtacggccgggtggaggagctgctcggccgctacccgctgcgcggcatcaagggcccggtcggcaccgcccaggacatgctggacctgctcggcggtgacgcgggcaagctggcggacctggagcagcggatcgccgggcacctcggcttctcgcaggcgttcacctcggtcggccaggtgtacccgcgctccctggactacgaggtcgtcaccgcgctggtgcagctcgccgccgcgccgtcctcgctggccaagacgatccgcctgatggccgggcacgagctggtcaccgagggcttcaagcccggccaggtcggctcgtccgcgatgccgcacaagatgaacacccgttcctgcgagcgcgtcaacggcctgacggtgatcctgcgcggctacgcctcgatgaccggtgagctggcgggcgaccagtggaacgagggcgacgtgtcctgctcggtggtgcgccgggtggcgctccccgacgccttcttcgcgctggacgggctgctggagacgttcctgaccgtgctcgacgagttcggcgccttcccggccgtcgtggcccgggagctggaccgctacctgccgttcctggccaccaccaaggtgctgatgggcgcggtgcgcggcggtgtgggccgcgaggtcgcgcacgaggcgatcaaggagaacgcggtcgcctccgcgctggccatgcgcgagcagggcgccgagcgcaacgagctgctcgacaagctggccgccgacgaccgcatcccgctggaccgtgccgccctggacgcgctgatggccgacaagctctccttcaccggcgccgcggccgaccaggtcggtgtggtcgtcggccggatcgaggacatcgtcaagcggcacccgcaggccgccggttacacccccggagcgatcctctga

SEQ ID NO: 67207 - protein, 480 aa, Streptomyces coelicolor A3(2)
MTSAPAKPRIPNVLAGRYASAELATLWSPEHKVKLERQLWLAVLRAQKDLGIEVPDAAIADYERVLNQVDLASIAEREKVTRHDVKARIEEFNDLAGHEHVHKGMTSRDLTENVEQLQIRLSLELVRDRSVAVLARLGKLAGEYGELVMAGRSHNVAAQATTLGKRFASAADELLVAYGRVEELLGRYPLRGIKGPVGTAQDMLDLLGGDAGKLADLEQRIAGHLGFSQAFTSVGQVYPRSLDYEVVTALVQLAAAPSSLAKTIRLMAGHELVTEGFKPGQVGSSAMPHKMNTRSCERVNGLTVILRGYASMTGELAGDQWNEGDVSCSVVRRVALPDAFFALDGLLETFLTVLDEFGAFPAVVARELDRYLPFLATTKVLMGAVRGGVGREVAHEAIKENAVASALAMREQGAERNELLDKLAADDRIPLDRAALDALMADKLSFTGAAADQVGVVVGRIEDIVKRHPQAAGYTPGAIL

SEQ ID NO: 67208 - DNA, 1440 bp, Streptomyces avermitilis MA-4680
  CDS (1)..(1440): transl_table=11
gtgactgcgcctgccaagccccgtatccccaacgtcctcgccggacgctacgcctccgccgagctcgccacgctatggtcccccgagcagaaggtgaagctggagcgacagctctggctcgccgtactgcgggcccagaaggacctggggatcgaggtgccggacgcggcgatcgccgactacgagcgcgtcctcgaccaggtcgacctcgcctcgatcgcggagcgcgagaaggtcacccggcatgacgtcaaggcgcggatcgaggagttcaacgacctcgccgggcacgagcacgtgcacaagggcatgacgtcccgtgacctcaccgagaacgtggagcagctgcagatccggctctcgctggagctgatgcgcgaccgcacggtgtccgtcctcgcccggctcggcaagctctcgggcgagtacgccgagctggtcatggccggccggtcgcacaatgtcgccgcgcaggccaccaccctcggcaagcgtttcgcgaccgctgccgacgagctgctcgtcgcgtacggccgcgtcgaggagctcctcggccgctacccgctgcgcggcatcaagggcccggtcggcaccgctcaggacatgctcgacctgctcggcggcgacgcggccaagctcgcggagctggagcagcggatcgcccgccacctgggcttctcccaggcgttcacctcggtcggccaggtctacccgcgctcgctcgactacgaggtcgtgaccgcgctggtgcagctggccgcggcgccttcgtcgctggcgaagacgatccggctgatggccgggcacgagctggtgaccgagggcttcaagccgggccaggtcggttcctccgcgatgccgcacaagatgaacacccgctcctgcgagcgcgtcaacggcctcatggtcatcctgcgcggctacgcctcgatgacgggcgagctggcgggcgaccagtggaacgagggcgacgtgtcctgctcggtggtgcgccgggtcgcgctgcccgacgcgttcttcgcgctcgacggtctgctggagacgttcttgacggtgctcgacgagttcggcgcgttcccggcggtcgtcgcccgtgagctggaccgctacctgccgttcctcgcgaccaccaaggtgctgatgggcgcggtgcgtgcgggtgtcggccgtgaggtcgcgcacgaggccatcaaggagaacgccgtggcctccgccctcgccatgcgcgagcagggcgccgagcgcaacgagctgctggacaagctcgccgccgacgggcgcatcccgctggaccgtgcccagctcgacgagctgatggcggacaagctgtccttcacgggcgccgccgccgaccaggtcgccgtggtcgtcggccgcatcgaggagatcgtgaagcagcaccccgaggcggcggcctacaccccgggggcgatcctctga

SEQ ID NO: 67209 - protein, 479 aa, Streptomyces avermitilis MA-4680
MTAPAKPRIPNVLAGRYASAELATLWSPEQKVKLERQLWLAVLRAQKDLGIEVPDAAIADYERVLDQVDLASIAEREKVTRHDVKARIEEFNDLAGHEHVHKGMTSRDLTENVEQLQIRLSLELMRDRTVSVLARLGKLSGEYAELVMAGRSHNVAAQATTLGKRFATAADELLVAYGRVEELLGRYPLRGIKGPVGTAQDMLDLLGGDAAKLAELEQRIARHLGFSQAFTSVGQVYPRSLDYEVVTALVQLAAAPSSLAKTIRLMAGHELVTEGFKPGQVGSSAMPHKMNTRSCERVNGLMVILRGYASMTGELAGDQWNEGDVSCSVVRRVALPDAFFALDGLLETFLTVLDEFGAFPAVVARELDRYLPFLATTKVLMGAVRAGVGREVAHEAIKENAVASALAMREQGAERNELLDKLAADGRIPLDRAQLDELMADKLSFTGAAADQVAVVVGRIEEIVKQHPEAAAYTPGAIL

SEQ ID NO: 67210 - DNA, 1419 bp, Mycobacterium bovis AF2122/97
  CDS (1)..(1419): transl_table=11
gtgagcattcccaacgtgctggccacccgatacgccagcgccgagatggtcgcgatctggtcgccggaggccaaggtggtctcggagcggcggttatggctggccgtattgcgggcacaggcagagctgggggtagcggttgccgattcggtgctcgccgactacgaacgtgtggtcgacgatgtggacttggcctcgatctcagcccgggagcgggtgctgcgccacgatgtcaaggcccgcatcgaggaattcaacgcattggccggtcatgagcacgtgcacaaggggatgaccagccgcgacctgaccgagaacgtggagcaactgcagattcggcggtcgctggaagtgattttcgcccatggggtggcggcggtggcgcggctggccgagcgggcggtgagctaccgtgacctgatcatggccgggcgcagccacaacgtggccgctcaggccaccaccttgggcaagcggttcgcctcggcggcccaagagatgatgatcgcgttgaggcggttgagggagttgatcgaccgctaccccctgcgtggcatcaagggcccgatgggcaccggtcaggacatgctcgatctgctgggcggtgaccgtgcggcgctggccgatctcgagcggcgcgtcgccgacttcttgggctttgcaactgttttcaacagcgtggggcaggtgtatccgcgttcattggaccacgacgtggtttcggctctggtgcagctcggcgcggggccgtcatcactggcacacacgattcgattgatggccggccacgagctcgccaccgagggtttcgcgccgggtcaggtcggttcgtcggcgatgccgcacaagatgaacacccgcagctgcgaacgggtcaacgggctgcaggttgtgctacgcggctatgcatccatggtggccgagttagccggtgcacagtggaacgagggtgatgtgttttgctccgtggtgcgccgggttgcgttgccggacagcttctttgccgtcgacgggcagatcgagacgtttttgacggtgctggacgagttcggcgcctacccggcggtgatcggccgcgagttggatcgttatctgccgttcctggccaccactaaggtgctaatggcggccgtgcgcgcggggatgggtcgcgagtccgcgcaccggttgatctccgagcacgcggtggcgacggcgctggccatgcgagaacacggcgcggagcccgacctgctggaccggttggccgccgatccgcggctgccgctgggacgagacgctttggaggccgcgctggccgacaagaaggcatttgccggtgccgcgggtgaccaggtcgatgatgtggtcgcgatggtggacgcgctggtgagccgttacccggacgcggctaaatacacgccgggtgcaattctttag

SEQ ID NO: 67211 - protein, 472 aa, Mycobacterium bovis AF2122/97
MSIPNVLATRYASAEMVAIWSPEAKVVSERRLWLAVLRAQAELGVAVADSVLADYERVVDDVDLASISARERVLRHDVKARIEEFNALAGHEHVHKGMTSRDLTENVEQLQIRRSLEVIFAHGVAAVARLAERAVSYRDLIMAGRSHNVAAQATTLGKRFASAAQEMMIALRRLRELIDRYPLRGIKGPMGTGQDMLDLLGGDRAALADLERRVADFLGFATVFNSVGQVYPRSLDHDVVSALVQLGAGPSSLAHTIRLMAGHELATEGFAPGQVGSSAMPHKMNTRSCERVNGLQVVLRGYASMVAELAGAQWNEGDVFCSVVRRVALPDSFFAVDGQIETFLTVLDEFGAYPAVIGRELDRYLPFLATTKVLMAAVRAGMGRESAHRLISEHAVATALAMREHGAEPDLLDRLAADPRLPLGRDALEAALADKKAFAGAAGDQVDDVVAMVDALVSRYPDAAKYTPGAIL

SEQ ID NO: 67212 - DNA, 1458 bp, Rhodopirellula baltica SH 1
  CDS (1)..(1458): transl_table=11
gtgcccttgcaagagaccaaaatgaccgaaacgcaggaaactccgtaccaaaaccccctgattgagcgttacgcgtcacgagaaatggcgtttcactggggtccccagcggcgattcgcatcctggcgaaaggtctggattgcgctagcggaggccgaacaagagctcggaatcgcaatcaccgatgcccaaatcgaacaactgaagtcgttcgaaaacaaattaaatctggacgcggcggccaaatacgaacgtgaacttcgccacgatgtgatggcccacgtccacgcttacggcgatcagtgcccggacgcccgtgggatcatccacctcggcgcgaccagttgtttcgtgaccgacaacgccgacctgctgctgattcgcgaagcccttgagctcactgctaaacgcttggcggccacgatcgaccaaatggcaaaattcgcggccgagcaccgcgacctgccctgtctcgcctttacccactttcaaccagcccagcccacaacggtcggcaagcgagcatgtttgtggatctacgacctagttcttgatctcgaagcgatcgaacatcgtctcgaaactctgcgtgcacgctcagccaaaggcaccactggaacccaggcgagctttttggaattgttctccggcgaccacgacaaggtccgtgcgttggaaaaacgaatcgctgaaaagctctcgtttgagtcggtctacgccgtcaccggacaaacctaccctcgcaaagtcgacgctcaattgctcgacgccctgtccgggatcgggcaaagcctgcacaagatcgccaccgacatccgcttgctggccggtcgcaaagaagtcgaagagccgtttgagaagaagcaaatcggcagctcggcaatggcctacaaacgcaacccgatgcggagcgagcgaatctgtgcactcggtcgatttgtcatgagcctgcaaagcagccccgcgatgaccgcagcgacccagtggatggaacgcactctcgacgacagcgccaaccgccgcttggtcatcccgcaagcgttcttggcaatcgacgcggcactcgtgttgatgcaaaacgttgccgacggaatggtcgtctacccagccacgatcgcaaaaaacttgggtgccgagcttccgttcatggcgaccgagaacatcttgatgcaagcggtcgctgcgggcggtgaccgtcaagatttgcacgagcaaattcgcgtgcacagccaagcggcagcactagaagtcaaacagaacgctggcgacaacgacctgctggaacgtctcaaaggcgacgagaacttcgccggcatcgacttggaagctgcgattgatccgcacgcttacgtggggcgagctccccaacaagtcgacgagttcatggaagcgatcatcacccccatccgccagcgttactctggcagcgacagcttgagcgttgaagtcacggtctga

SEQ ID NO: 67213 - protein, 485 aa, Rhodopirellula baltica SH 1
MPLQETKMTETQETPYQNPLIERYASREMAFHWGPQRRFASWRKVWIALAEAEQELGIAITDAQIEQLKSFENKLNLDAAAKYERELRHDVMAHVHAYGDQCPDARGIIHLGATSCFVTDNADLLLIREALELTAKRLAATIDQMAKFAAEHRDLPCLAFTHFQPAQPTTVGKRACLWIYDLVLDLEAIEHRLETLRARSAKGTTGTQASFLELFSGDHDKVRALEKRIAEKLSFESVYAVTGQTYPRKVDAQLLDALSGIGQSLHKIATDIRLLAGRKEVEEPFEKKQIGSSAMAYKRNPMRSERICALGRFVMSLQSSPAMTAATQWMERTLDDSANRRLVIPQAFLAIDAALVLMQNVADGMVVYPATIAKNLGAELPFMATENILMQAVAAGGDRQDLHEQIRVHSQAAALEVKQNAGDNDLLERLKGDENFAGIDLEAAIDPHAYVGRAPQQVDEFMEAIITPIRQRYSGSDSLSVEVTV

SEQ ID NO: 67214 - DNA, 1440 bp, Corynebacterium diphtheriae NCTC 13129
  CDS (1)..(1440): transl_table=11
atgagctacgtggctgagaagaagaagatcgcaaacgtcctgtccaaccgctacgcctctgctgagctcaccgaactgtggagcccagaggcaaagatcctcctagaacgccagttgtggatcgcagtaatgaaggcccagaaaaatctgggtgttgatattccaacagaagcaatttctgcttatgaagcagtgatcgaccgcatcgatcttgacagcatcgcacagcgtgagaagatcacccgccatgatgtgaaagctcgtatcgaggagttcaatgctctcgcaggctacgagcatattcataagggcatgacctcccgcgacctcaccgagaacgtggaacagctgcagatctaccgttcgcttgagatgatgcgtaacaagtcggtgtctgttgccgctgctatcgcacagcacgcagcacagtaccagtccttggtcatggctggccgctcccacaacgtggctgctcaggctaccactttgggtaagcgttttgcctctgctgccgaggaaattttggttgctattgaccgcgttgaggatcttctgagccgctatccactgcgcggtattaagggccctatgggcaccgcccaagacatgcttgatctcgttggtggcgatgagtccaagcttgccgcattggaaactcaaatcgcagatcacctaggtattgcccgcgtgttcgattcagtgggacaggtttacccccgctccttggacttcgatgcggtgtctgctctggttcagttgggtgctggtccatcctcgttggctcacaccatccgtttgatggctggcaatgagacggtgactgagggctttaaggaaggccaggtcggttcctcggctatgccgcacaagatgaatgcgcgttcgtgtgagcgtgttggcggcctgcaggtgatcttgcgtggttacctcaccatggtggcggatctttctggtcagcagtggaatgagggcgacgtgttctgctcggttattcgtcgtgtggctcttccggatgcgttcttcgcgctggatggcatgtacgagacattcctcacagtgttggctgagttcggtgctttcccagcgatgattgatcgtgagcttgagcgctacctgccattccttgctaccactcgtattctgatggctgctgttcgcgtgggtgttggccgtgaaactgcccatgaggtgattaaggagaacgctgtggcggttgccttgaacatgcgtgaaaacggtggtgagcaagacctcattgatcgccttgcggcggatgagcggttgccgatgactcgtgaacagttggatgaggcgttggctgatcgacatgcctttattggtgctgcagaatcgcaggttgctcgcgttgttgaccgcgtgaatgatctggttcgtcgttatccagcggctgcccagtacacccccggtgacattctctaa

SEQ ID NO: 67215 - protein, 479 aa, Corynebacterium diphtheriae NCTC 13129
MSYVAEKKKIANVLSNRYASAELTELWSPEAKILLERQLWIAVMKAQKNLGVDIPTEAISAYEAVIDRIDLDSIAQREKITRHDVKARIEEFNALAGYEHIHKGMTSRDLTENVEQLQIYRSLEMMRNKSVSVAAAIAQHAAQYQSLVMAGRSHNVAAQATTLGKRFASAAEEILVAIDRVEDLLSRYPLRGIKGPMGTAQDMLDLVGGDESKLAALETQIADHLGIARVFDSVGQVYPRSLDFDAVSALVQLGAGPSSLAHTIRLMAGNETVTEGFKEGQVGSSAMPHKMNARSCERVGGLQVILRGYLTMVADLSGQQWNEGDVFCSVIRRVALPDAFFALDGMYETFLTVLAEFGAFPAMIDRELERYLPFLATTRILMAAVRVGVGRETAHEVIKENAVAVALNMRENGGEQDLIDRLAADERLPMTREQLDEALADRHAFIGAAESQVARVVDRVNDLVRRYPAAAQYTPGDIL

SEQ ID NO: 67216 - DNA, 1482 bp, Strongylocentrotus purpuratus
  CDS (1)..(1482)
atggcagcacctacgtcgaatcctcctgttccagaaaacgggaagaatgctgatatgtacaagtacaggtctcctttggtttcccgatatgcaagccctgagatggcctacaacttcagtgaagtgaagaagttttcaacctggagaaaattatggttatggcttgctaaaggacaacagacccttggtcttgatgtcagcaatgagcagatcaaagagatggaggccaaccttgagaacattgactttgagatggctgctgcagaagagaagaagagacgtcatgatgtcatggctcatgtttacacctttgctcagtgctgtcccaaggctgcccctatcatccaccttggtgcaacatcttgctacgtcggtgataacacagacctgatcgtgatgaaggatgcattgtcgatcttgcttcctcgactggcacgctgtatacagagactggctgtcttcgctgaggagcacaaggctcttcccacgcttggttttacacactaccaaccagcccagctgacaacggtaggaaagcgtgcttgcctctggatctctgatctctgcatggaccttcgtaacctgaccagggctaaagatgacctcaggtttaggggcgtcaaaggcaccactgggacacaagccagtttcctagccttgtttgaagggaatggtgagaaagtagacatgctggatgcattcgttaccaaccaggctggtttcccaaagtcctacatggtgactggtcagacgtacagtagaaagattgatgtagatgttttatctgctcttgccagcctgggagcatctgtccacaagatctgcactgatatacgtctgctagcaaacctgaaggaagtggaggagccgtttgagaaggatcagattggttctagtgccatgccttacaaacgtaaccccatgagaagcgagaggtgctgttccctagcaaggcatctcacaacgctcgtcatggatcctctgcagactctctctgttcaatggtttgaaagaacactggatgatagcgctaacaggaggatatgtatagcagaagctttcttgacagcggatgtcttactcagtactctccagaacatttcagaaggaatggtcgtctacctcaaggtgatagagcgtcatatactccaagagcttccctttatggcaactgaaaacatgattgtagcgatggtgaaggcagggggcagcagacaggattgccacgagcacatccggactttgtcccaagaagctgcagcagtggtcaagcaagaaggtggagataatgacctggtagccagagttagagggtcagcatactttgcacctattcatgaccagctggacaagctacttgacccaaccacctttgtcggcagagccccagaacaggtgaccaatttcttagaggctgaagtcaaaccagctctcaagcccttcgcaagctttctggatggaatatcagagctttcattgtga

SEQ ID NO: 67217 - protein, 493 aa, Strongylocentrotus purpuratus
MAAPTSNPPVPENGKNADMYKYRSPLVSRYASPEMAYNFSEVKKFSTWRKLWLWLAKGQQTLGLDVSNEQIKEMEANLENIDFEMAAAEEKKRRHDVMAHVYTFAQCCPKAAPIIHLGATSCYVGDNTDLIVMKDALSILLPRLARCIQRLAVFAEEHKALPTLGFTHYQPAQLTTVGKRACLWISDLCMDLRNLTRAKDDLRFRGVKGTTGTQASFLALFEGNGEKVDMLDAFVTNQAGFPKSYMVTGQTYSRKIDVDVLSALASLGASVHKICTDIRLLANLKEVEEPFEKDQIGSSAMPYKRNPMRSERCCSLARHLTTLVMDPLQTLSVQWFERTLDDSANRRICIAEAFLTADVLLSTLQNISEGMVVYLKVIERHILQELPFMATENMIVAMVKAGGSRQDCHEHIRTLSQEAAAVVKQEGGDNDLVARVRGSAYFAPIHDQLDKLLDPTTFVGRAPEQVTNFLEAEVKPALKPFASFLDGISELSL

SEQ ID NO: 67218 - DNA, 1446 bp, Nasonia vitripennis
  CDS (1)..(1446)
atggcagagaacagtgagttctgtgactacaggagtcccctggccacgcgttatgcctccaaggagatgcgtttcaacttcagcgatcaaaacaaattcagcacgtggcgcaaactctggatttacctcgccaaagccgaaatgaatctgggcttggccataacacctgaccaaatcgcggagatggaggcgcacatcaacgacatcgacttcgaggcggctgccaaggaggagaaggcgaccagacacgacgtcatggctcacgttcacgtttttggaaaccagtgccccaaagccgcccccatcatccatctcggagccactagctgttatgtcggtgacaacaccgacctcatcattttgcgcgacggcttcgacatactcctgcccaagctcggcgccgtcatccgtcgtctggccaagttcgccctggacaaccgctctatcccgacgctcggtttcacccacctgcaacctgcccagctgaccaccgtcggcaagagggctaccctctggcttcacgatctactcatggacgagcgcgcgattcgcagagctaggaacgatctccgcttccgaggcgtcaagggcaccactggtacccaggcttcgttcttgcagctcttcaacggtgacggcgagaaggtgaagaagttggacgagctcgtgacgaaaatggcaggcttcgagaagcgctaccccgtgaccggtcagacctacagccggaaggtcgacctcgagtgcttgaacgctctgagctctctgggagcgacggtgcacaagatctgcagcgacatcaggatcctcgctaacatgaaggagatcgaggagccgtttgagtcgacgcagatcggctcctcggcgatgccctacaagcgcaacccgatgcgtagcgagcgctgctgcagcatagcccgccacctcatgacccttgtcaacaacaccctgcagaccgccgccaaccagtggatggagcgtaccctcgacgactcggccaacaggcgcatcaccctccccgaggcctacctctcggccgacgtcatcctcatgacgctgcagaacatcaccgagggccttgtcgtctaccctaaggtcatcgccaggcacatcgcccaggagctgcccttcatgaccgccgagaacgtaatcatggcgatggtcaaggctggcggtgacagacaggtctgccacgagaagattcgcgtgctctcgcacgaggcgggtgcccaggtgaagcagcacggcaaggacaacgatctgatcgagcgtatccgtcgcgacaagtacttcgagcctatcctcggtcaactggacgccctcctggaaccgtccaccttcgtcggcagggcacccgagcaggtactcgagttccttcaagaggaggtctacccggtcctggccaactacgagggcaaggacgtgtcgcccgtcgaactcagcatttag

SEQ ID NO: 67219 - protein, 481 aa, Nasonia vitripennis
MAENSEFCDYRSPLATRYASKEMRFNFSDQNKFSTWRKLWIYLAKAEMNLGLAITPDQIAEMEAHINDIDFEAAAKEEKATRHDVMAHVHVFGNQCPKAAPIIHLGATSCYVGDNTDLIILRDGFDILLPKLGAVIRRLAKFALDNRSIPTLGFTHLQPAQLTTVGKRATLWLHDLLMDERAIRRARNDLRFRGVKGTTGTQASFLQLFNGDGEKVKKLDELVTKMAGFEKRYPVTGQTYSRKVDLECLNALSSLGATVHKICSDIRILANMKEIEEPFESTQIGSSAMPYKRNPMRSERCCSIARHLMTLVNNTLQTAANQWMERTLDDSANRRITLPEAYLSADVILMTLQNITEGLVVYPKVIARHIAQELPFMTAENVIMAMVKAGGDRQVCHEKIRVLSHEAGAQVKQHGKDNDLIERIRRDKYFEPILGQLDALLEPSTFVGRAPEQVLEFLQEEVYPVLANYEGKDVSPVELSI

SEQ ID NO: 67220 - DNA, 1452 bp, Anopheles gambiae str. PEST
  CDS (1)..(1452)
atggccgaactaaacgctgaattccgcggctatcgctcgccgctgagcactcgctatgctagcaaggagatgcagtacctgttcagcgatcagcacaagttttccacctggcgcaagctatggatcctgctggcgaaggcggaaaaggcgctgggattggacatcagcgaggcacaaattgcggagatggaaaagcacgtcgaagacatcgacttcaaggcggccgcggccgaggaagcgctcacccggcacgacgtgatggcgcacgtgcacgtgttcgccaagcagtgcccgctggccgcaccgatcatccatctcggggccacttcctgcttcgtgggcgataacacggatctgctcgttctgaaggacgcgctggaccagctgctgccgaagctggtgggcgtcattaagcagctggcccactttgccatgcagtatcgcgagctgcccacgctgggtttcacccatctgcagccggcccagctaacgacggtcggcaaacggtgctcgctctggatccaggatctgctgatggacgagcgggcgctgcgcgcctgccgggataatttgcgcttccgcggcgtcaagggcacgaccggtacgcaggcctccttcctgcagctgttcgccggcgacggtgcgaaggtgcgccagctcgaccaaaccgtcacgcggctggccgggttcgagcggtactacgccgtcaccggccagacgtactcgcgcaaggtcgatctggagattgtgtcggcgctggccagcctcggcgctaccgtgcacaagatgtgttccgatttgcggctgctcgcctcgcgcaaggagctggaggaaccgttcgagcagacgcagatcggcagctccgccatgccgtacaagcgcaacccgatgcgctccgagcggtgctgtgcgctggcccgccatctgatcacgctgcaggcgaacgcggccaacacgctggcgacgcagtggctcgagcgcacgctggacgattccgcgaaccggcggttgacgctgtccgaggcgttcctgtcggcggacgcttgtctgctgacgctgctcaacatctcgcaggggctggtcgtgtacccgaaggtgatcgagcgcaacatcgcccaggagctgccgttcatgtcgaccgagaacgtcattatggcgatggtgaaggcgggcggtgatcggcaggtgtgccacgagaagattcgcgtcctgtcgcacgaggccggcgcacaggtgaagcagcacggcaaggacaacgatctggtggagcgtatccgggccgatccgtactttgcgccgatactggggcagctgagcagaatactcgatccgaaaacgttcacgggccgggcggcggaacaggtggttgagtttgtgaccgaggaagtgaaccccgttgtggcgctttatgcggacagggtcgttaccaagtcggcgcagctgaacatttga

SEQ ID NO: 67221 - protein, 483 aa, Anopheles gambiae str. PEST
MAELNAEFRGYRSPLSTRYASKEMQYLFSDQHKFSTWRKLWILLAKAEKALGLDISEAQIAEMEKHVEDIDFKAAAAEEALTRHDVMAHVHVFAKQCPLAAPIIHLGATSCFVGDNTDLLVLKDALDQLLPKLVGVIKQLAHFAMQYRELPTLGFTHLQPAQLTTVGKRCSLWIQDLLMDERALRACRDNLRFRGVKGTTGTQASFLQLFAGDGAKVRQLDQTVTRLAGFERYYAVTGQTYSRKVDLEIVSALASLGATVHKMCSDLRLLASRKELEEPFEQTQIGSSAMPYKRNPMRSERCCALARHLITLQANAANTLATQWLERTLDDSANRRLTLSEAFLSADACLLTLLNISQGLVVYPKVIERNIAQELPFMSTENVIMAMVKAGGDRQVCHEKIRVLSHEAGAQVKQHGKDNDLVERIRADPYFAPILGQLSRILDPKTFTGRAAEQVVEFVTEEVNPVVALYADRVVTKSAQLNI

SEQ ID NO: 67222 - DNA, 1458 bp, Magnaporthe grisea 70-15
  CDS (1)..(1458)
atgcctgactatgatagctaccagaccccgctgggcatgagatatgccagccgggagatgctcacactgttctctcctcgaagccgcaacaacacctggaggcaactctggattcatctcgccgaggccgaacacgaacttggactgccccaagttacccaggaaaagattgatgagctaaaggcccatgcccatgtaacagacgaggcctttgaggtgatcaaggctgaggagaagatccgtcgccatgatgttatggctgccgtacacgcatacggaaaggaggctccaggcgcggccggtatcatccatctgggtgccacatcttgctatgtgactgacaacgcagagctcatcttcatcaagaagggccttgagctgcttctgcccaagttggcgaaggtcatcagcaatctccagaagtttgccctcaagtacaaggacctcccgacactcggctacactcatctccagccagctcagctcatcacagtcggcaagcgggtgtgccaatggatccaggagctgaccatggatctggaggatatagagcacgtcctctccgccctcaagctgcgtggtatccagggaaccacggggaccaaagcatccttcatggagctcttccagggggacgaggttaaagtcaacaagctcaatgacatcctttgcaagaagctcggctttcagggtgtctatgacatctccactcagacttacactcgaaaggtcgacctccgtgtcgcaaacgcgctttctgcttttggcgccacagccgagcgcatcggcttggatatcaggcatctggccaattggaaggagattgaggagccttttgaggcgggccagatcgggtcgtccgcgatggcgtacaagaggaacccaatgcgtagcgagcgcattaccagtctcgggcgcaaactttcgacgctgtccgtcaacttcaccaagacatttgaggtgcagatgatggagcgcacactggacgactcagccatccgtcgcattgacattcccgagatgttcctgcttgctgacgctatcctgatctcgctcgacaacgtgaccgacggcctggtcgtctaccccgccacagtccgcagccgcgttatgcaggagcttccattcatggcaactgagaacatcatcatgaagatggttgcacaaggtgcatcgcgacaggaatgccacgaagagatcagggttctgtctcaccaagcgtcgcatgcggtcaagatggagggcaagagcaacgatctgctagagaggatcaaaaacaccgagtatttcaagccggtgcatgccgagcttgatgccatgcttgaccctgcacttttcactggctgctcgcaatctattgtcgagcggtactgcggtcccgatggaacggtggagaaggcattggcaccctacaaggaacacatcgcatctgcagccaccgcggagctttctgtatag

SEQ ID NO: 67223 - protein, 485 aa, Magnaporthe grisea 70-15
MPDYDSYQTPLGMRYASREMLTLFSPRSRNNTWRQLWIHLAEAEHELGLPQVTQEKIDELKAHAHVTDEAFEVIKAEEKIRRHDVMAAVHAYGKEAPGAAGIIHLGATSCYVTDNAELIFIKKGLELLLPKLAKVISNLQKFALKYKDLPTLGYTHLQPAQLITVGKRVCQWIQELTMDLEDIEHVLSALKLRGIQGTTGTKASFMELFQGDEVKVNKLNDILCKKLGFQGVYDISTQTYTRKVDLRVANALSAFGATAERIGLDIRHLANWKEIEEPFEAGQIGSSAMAYKRNPMRSERITSLGRKLSTLSVNFTKTFEVQMMERTLDDSAIRRIDIPEMFLLADAILISLDNVTDGLVVYPATVRSRVMQELPFMATENIIMKMVAQGASRQECHEEIRVLSHQASHAVKMEGKSNDLLERIKNTEYFKPVHAELDAMLDPALFTGCSQSIVERYCGPDGTVEKALAPYKEHIASAATAELSV

SEQ ID NO: 67224 - DNA, 1458 bp, Gibberella zeae PH-1
  CDS (1)..(1458)
atggcagcttacgatacctaccagacttccctgacgggtcgctactgcagccaggagctgtctcacctcttcagccagcgatctcgtcactcaacatggcgcaagctctggctctacctcgctgagagtgagaaggagcttgggatccccactatcactgatgaggctcttgagcagatgcgggctaatcttgtcgtcactgatgatgactttgagactgcccgtgttgaggaaaagattcgacgacatgatgtcatggctcacgtccacgcctttggacaagtcgcccctgctgccgccggaatcatccactacggcgcaacaagctgcttcgtcaccgacaacacagagctcatcctcatgcgcgacgccctcgacctcctcatccccaagctagccaaggtcctctccaacctccaatccttcgccctcgagtggaagaacgagcccaccctctcctttactcatctccaacccgcccagatcagcacagtcggcaagcgagccgctgcctgggcccaggatctcctcatggacctcaacgagtttgagcgcgtccgagctgatctcaagttccgtggtgcgcagggtaccactggtactcaggccagtttccttgagattttcgctggtgatcatgacaagtgcgacaagctgaatgagttgctttgccaaaaggctggttttgaggagtgctatgatatttctacccagacatatacccgaaaggtcgactgtcttgttgccaacgctgttactggttttggtaccagtgttaccaagattgcttctgatctccgacatctcgctactatgaaggaggttggagagcccagagagaagggtcaaattggcagcagtgccatggcctacaagcaaaaccccatgcgatctgagcgcattgccagtcttgcccgtgtccttcaaggaaaggctgccaacttccagagcacccactctacccagtggatggagcgatctctggatgattccgcttgccgacgcatggatatccccgagatgttcctcctcgccgacgccatcgccatcaccctccagaacgtcaccgagggtctcgttgtcttccctctcaagatccactccaacatcatggccgagctgccctttatgatcacagagaacgtcatcatgcgcctagtagccatgggcgtctcccgccaagaggcccacgagcaaatccgtgtcctctctttcgaggcctctcaccaggtccaaagtctcggcaagcccaacgacatggtcgagcgtatcaagaagaccgacttcttcaagcccatctgggctgacctcgacgacatgatgaagcctgagctgtacattggccgcagtgcccagcttgttgacaagttctgcggacctggtggtaagttggagaagaagcttcagccttaccaggaggtcatccagaaggccaaagctgctgagttgaatgtttaa

SEQ ID NO: 67225 - protein, 485 aa, Gibberella zeae PH-1
MAAYDTYQTSLTGRYCSQELSHLFSQRSRHSTWRKLWLYLAESEKELGIPTITDEALEQMRANLVVTDDDFETARVEEKIRRHDVMAHVHAFGQVAPAAAGIIHYGATSCFVTDNTELILMRDALDLLIPKLAKVLSNLQSFALEWKNEPTLSFTHLQPAQISTVGKRAAAWAQDLLMDLNEFERVRADLKFRGAQGTTGTQASFLEIFAGDHDKCDKLNELLCQKAGFEECYDISTQTYTRKVDCLVANAVTGFGTSVTKIASDLRHLATMKEVGEPREKGQIGSSAMAYKQNPMRSERIASLARVLQGKAANFQSTHSTQWMERSLDDSACRRMDIPEMFLLADAIAITLQNVTEGLVVFPLKIHSNIMAELPFMITENVIMRLVAMGVSRQEAHEQIRVLSFEASHQVQSLGKPNDMVERIKKTDFFKPIWADLDDMMKPELYIGRSAQLVDKFCGPGGKLEKKLQPYQEVIQKAKAAELNV

SEQ ID NO: 67226 - DNA, 1458 bp, Apis mellifera
  CDS (1)..(1458)
atgagttcgtcgacgattgagaacagtgaatacagtgactatcggagtcccttggcaacaaggtacgcctcgaaggaaatgcgttataatttcagcgaacaaaataaattcagcacgtggcgaaaactatggatttacttggccaaggcagaaatggagctgggcctggccattacccctgaacaagtcgcggaaatggaggcccacgcgaacgatatcgacttcgaggcagcggcgaaggaagaaaagaccacgagacacgatgtgatggcccatgtccacgttttcgggaaccaatgcccgaaagcggctcccataatccatctgggggcgacaagttgctacgtcggtgacaacacggatttaatcgttcttcgccaaggattcgatatccttcttccgaaattggctaatgttttgtcgcgcctcgccaaatttgcgatgatgtatcgggagttgccgacattgggatacacccatcttcaacctgcgcaactgacaactgttggaaaacgggcgacgttgtggctccacgatcttctgatggacgagagagctcttcgacgagccagggacgatctgaagtttcgaggcgtgaaaggaacgacaggcacccaagcatcgttccttcagttgttcaatggcgacggagaaaaggtgaagaagttggatcggttggtaaccaaaatggcaggattcgagaagtgttatcctgtaacggggcaaacttatagcagaaaggtcgatgtggaatgcttgaacgctctaagttctttaggatccactgtccacaagatctgcagcgacattcgattgttggcaagcatgaaagaaatcgatgagccattcgaaagcactcaaattggatcaagcgcaatgccatacaaaaggaatccaatgagatcagaaagatgttgcagtatagcaaggcatttgatgactctggttaacaatgctttacaaacagcggctactcaatggatggaaagaacattggacgactctgccaataggagaattaccctttctgaagcgtttttatccggggatgtgattttaatgacacttcaaaatattacagagggtatgatcgtttatcccaacgtgattgccaggcacatcgaccaagaattacctttcatggcctcagaaaatgtaataatggctatggtaaaagctggaggtgatagacaggtttgtcacgagaaaataagagtgttgtcccaagaagcaggtgcacaggtgaagcaatacggcaaggacaacgatctagtcgagaggattaagaaggatccttacttcaaaccgatcctcgaccaattggacaatcttctagatccacgaactttcgttggcagggcacctgaacaagtcattgaatttttagaagaggaagtccaacctgtgctcgaaaattatcaaggactcttaagtgaaagcgtggaactcaatatttga

SEQ ID NO: 67227 - protein, 485 aa, Apis mellifera
MSSSTIENSEYSDYRSPLATRYASKEMRYNFSEQNKFSTWRKLWIYLAKAEMELGLAITPEQVAEMEAHANDIDFEAAAKEEKTTRHDVMAHVHVFGNQCPKAAPIIHLGATSCYVGDNTDLIVLRQGFDILLPKLANVLSRLAKFAMMYRELPTLGYTHLQPAQLTTVGKRATLWLHDLLMDERALRRARDDLKFRGVKGTTGTQASFLQLFNGDGEKVKKLDRLVTKMAGFEKCYPVTGQTYSRKVDVECLNALSSLGSTVHKICSDIRLLASMKEIDEPFESTQIGSSAMPYKRNPMRSERCCSIARHLMTLVNNALQTAATQWMERTLDDSANRRITLSEAFLSGDVILMTLQNITEGMIVYPNVIARHIDQELPFMASENVIMAMVKAGGDRQVCHEKIRVLSQEAGAQVKQYGKDNDLVERIKKDPYFKPILDQLDNLLDPRTFVGRAPEQVIEFLEEEVQPVLENYQGLLSESVELNI

SEQ ID NO: 67228 - DNA, 1449 bp, Candida glabrata CBS 138
  CDS (1)..(1449)
atgtctgagtttgataagtacgctaccccactatcgtccagatatgcttctaaggagatgtctgctgttttctctttgagaaacaggttctctacatggagaaagttatggttgaatctagccattgctgaaaaggaattaggtcttgatgtcattacagatgaggccattgaacaaatgaaggcccacttggaaattacagatgaagaaattgccaaggctagtgaacaagaagctattgtcaggcatgatgttatggcccatgttcatacatttggtgaaacatgtcctgctgcggctggtatcatccacttgggtgccacttcttgttttgtcacagacaatgccgatttaatcttcctaagagatgcatacgatattgttattccaaaactcgtcaatgttatcaaccgtttagctaaatttgctctagagtacaaggacttaccagttctgggttggactcacttccaaccagctcaattaactactttgggtaagagagcaactctatggatccaagaactactatgggatttgagaaactttgaaagagctagaaatgatattggtttgcgtggtgttaaaggtaccactggtacacaagcgtcattcttggccctatttcacggtaatcatgacaaagttgaagaacttgatgaaagagttactgaacttctaggctttgacactgtttatccagtcactggtcaaacttactccagaaagatcgacattgatgttcttgcaccattatcatcatttgctgccagtgcccacaagatggctaccgatatcagactgctagccaacttgaaggaagttgaagagccatttgaaaaatcccaaattggttcttcagcaatggcttataagagaaacccaatgcgttgtgaacgtgtttgttctttggctagacatttgggctctctattcagtgatgctgtccaaactgcttccgtccaatggttcgagagaacattagatgactcagctataagaagaatctctttaccaagtgctttcctaacaacagatatcttgttgactacaattctaaatatctcttcaggtttagttgtatatccaaaggtaattgaaagaagaattaagagtgagttgccattcatggctactgagaatatcattatggctatggtcgaaaagggtgcttctaggcaagaagtgcatgaagaaatcagagtcctgtctcaccaagctgctgctgtggtaaaagaacaaggtggtgacaatgacctgatcgaacgtgtcaaggccaatgagtttttcaagcctatctggaatgaattggatcaattgctagatccatctacatttgttggtagagctcctcaacaaacagaaaaatttgttggtaaggatgttaagaacgccttgcagccattccaaaaatacatcaacgatgctgaagttaaactaaatgtttga

SEQ ID NO: 67229 - protein, 482 aa, Candida glabrata CBS 138
MSEFDKYATPLSSRYASKEMSAVFSLRNRFSTWRKLWLNLAIAEKELGLDVITDEAIEQMKAHLEITDEEIAKASEQEAIVRHDVMAHVHTFGETCPAAAGIIHLGATSCFVTDNADLIFLRDAYDIVIPKLVNVINRLAKFALEYKDLPVLGWTHFQPAQLTTLGKRATLWIQELLWDLRNFERARNDIGLRGVKGTTGTQASFLALFHGNHDKVEELDERVTELLGFDTVYPVTGQTYSRKIDIDVLAPLSSFAASAHKMATDIRLLANLKEVEEPFEKSQIGSSAMAYKRNPMRCERVCSLARHLGSLFSDAVQTASVQWFERTLDDSAIRRISLPSAFLTTDILLTTILNISSGLVVYPKVIERRIKSELPFMATENIIMAMVEKGASRQEVHEEIRVLSHQAAAVVKEQGGDNDLIERVKANEFFKPIWNELDQLLDPSTFVGRAPQQTEKFVGKDVKNALQPFQKYINDAEVKLNV

SEQ ID NO: 67230 - DNA, 1449 bp, Kluyveromyces lactis NRRL Y-1140
  CDS (1)..(1449)
atgtctgattacgataagtacaccacaccactatcttctcgttatgcttctgaggagatgtcttccatattctctttgagaaacagattctctacctggagaaagctttggttgaatttggctattgctgaaaaggaattaggtcttgatgtcattagtgaagaagccattgagcaaatgaaggctcatttgaccatcaacgatgaagaaatcgctgctgcttccaagcaagaggccattgtcagacacgatgttatggctcacgttcacacttttggtgaaacttgtcctaaagccgctggtatcatccatctaggtgctacctcatgttttgtcaccgataatgctgacttgatcttcttgagagatgcttacgatatcttgattcctaagttggtcaatgttatcaacagattgtccaagtttgctttggagtacaaggatctaccagtattgggctggactcatttccaaccagctcaattgactaccttgggtaaaagagtcacattgtggatccaagaactattgtgggatctaagaaactttgtcagagctagaaacgatatcggtctacgtggtgtcaagggtaccaccggtacccaagcttctttcttaactttgttccatggtgatcacgacaaagtggaagctttggacaagagagttgctgaactattgggattctctactgtctacccagttaccggtcaaacttattctagaaagattgatatcgacgtgttggctccattatcctcatttgcagctactgctcacaagatggcgactgatatcagattattggctaacttgaaggaattggaagaaccgttcgaaaaatctcaaattggttcctctgccatggcttacaagagaaacccaatgcgttgcgaacgtgtgtgttctcttgccagacatttgggttctttgttcaacgatgccgtacaaaccgcgtcagtgcaatggtttgaaagaactttggatgactctgccatcagaagaatctctttgccaagtgctttcttgaccgcagacattctactatccactttgctaaacatctcttccggtttagtcgtttatccaaaggtcatcgaaagaagaattatgggtgaattgccattcatggccactgaaaatattatcatggccatggtcgagcacggtgcatccagacaagaagttcatgaagctatcagagtgctatctcaccaagctgccgctgtcgtcaaggaacaaggtggtgacaacgacttgatcgaacgtgtgagacaggacaagttcttcgaacctatctggaatgaattggactcattgttggagccatccacctttgtcggtagagctcctcaacaagttgagaagttcgttgccaacgatgtcaaacaagcgttggctgctttccaaaatgatatcactgatgtcgaagttaagctaaacgtttaa

SEQ ID NO: 67231 - protein, 482 aa, Kluyveromyces lactis NRRL Y-1140
MSDYDKYTTPLSSRYASEEMSSIFSLRNRFSTWRKLWLNLAIAEKELGLDVISEEAIEQMKAHLTINDEEIAAASKQEAIVRHDVMAHVHTFGETCPKAAGIIHLGATSCFVTDNADLIFLRDAYDILIPKLVNVINRLSKFALEYKDLPVLGWTHFQPAQLTTLGKRVTLWIQELLWDLRNFVRARNDIGLRGVKGTTGTQASFLTLFHGDHDKVEALDKRVAELLGFSTVYPVTGQTYSRKIDIDVLAPLSSFAATAHKMATDIRLLANLKELEEPFEKSQIGSSAMAYKRNPMRCERVCSLARHLGSLFNDAVQTASVQWFERTLDDSAIRRISLPSAFLTADILLSTLLNISSGLVVYPKVIERRIMGELPFMATENIIMAMVEHGASRQEVHEAIRVLSHQAAAVVKEQGGDNDLIERVRQDKFFEPIWNELDSLLEPSTFVGRAPQQVEKFVANDVKQALAAFQNDITDVEVKLNV

SEQ ID NO: 67232 - DNA, 1449 bp, Debaryomyces hansenii CBS767
  CDS (1)..(1449)
atgtcagctaacgataaatactccactccattatcttcaagatatgcgtcggatgagatgtccaaaatcttttcgttgaggaacagattctcaacctggagaaagttatggctcaatttagctatcgctgagaaggaagtcggattagacatgatttcagacaaggctattgagcaaatgaaggcacacttggaaatcactgatgaagaaattgaagctgcttccaaggaagacgcaatcgttagacacgacgttatggcccacgttcacgtctttggtaaaacttgtccagatgctgctgggattatccatctaggtgctacctcatgtctcgtcacagacaatgccgatctcaccctcttgagggatgcctacgacgttttgattccaaaattggtcaatgtcattaacagattatctgaatttgcattaaagtataaggatttgccagttttaggatggactcacttccagcctgctcaattgacaactgttggtaagagagctacattgtggattcaagagttgttatgggatttgagaaacatggaaagagctagaaatgatctcgggttgagaggagttaaaggtaccacaggtacacaagcttcattcttgtctttgttccacggtaaccacgaccaagttgaacaattagatgaaagagttgttgaattattaggattcgaccatgtttatccagttactggtcaaacttattctagaaaaattgatattgatgttttatccccattagcgtccttgggtgctactgcgcacaaatttgctactgatatcagattattagctaacttgaaggaagttgaagaaccatttgagaagtcccaaattgggtcttctgctatggcttacaagagaaacccaatgagatgtgaaagagtctgctctttagcaagacacatgggtggtttattaaatgatgccattcagaccgcctccgttcaatggtttgaaagaacattagatgattcagccattagaagaatctcccttccatcagcgtttttaactgctgacattttattatccaccatgaataacatttcctctggattagtcgtctatccaaaggtcattgaaagaaggatcaattccgaattaccattcatggctactgaaaatatcattatggccatggttgaaaagggtgaatctagacaagaatgtcacgaagaaatcagagtcttgtcccaccaagccagtgctgtcgttaagcaagaaggtggtgataatgacttaatccaaagggtcagagccactgaatatttcaagcctatctggaacgagttagatactttgttagacccttccactttcgttggtagagctcctcaacagactgaaaagtttattaataaggacgttgcgaatgctttaaaaaattacaagcatttggttaacgatgaatcagtttccttgaacgtttaa

SEQ ID NO: 67233 - protein, 482 aa, Debaryomyces hansenii CBS767
MSANDKYSTPLSSRYASDEMSKIFSLRNRFSTWRKLWLNLAIAEKEVGLDMISDKAIEQMKAHLEITDEEIEAASKEDAIVRHDVMAHVHVFGKTCPDAAGIIHLGATSCLVTDNADLTLLRDAYDVLIPKLVNVINRLSEFALKYKDLPVLGWTHFQPAQLTTVGKRATLWIQELLWDLRNMERARNDLGLRGVKGTTGTQASFLSLFHGNHDQVEQLDERVVELLGFDHVYPVTGQTYSRKIDIDVLSPLASLGATAHKFATDIRLLANLKEVEEPFEKSQIGSSAMAYKRNPMRCERVCSLARHMGGLLNDAIQTASVQWFERTLDDSAIRRISLPSAFLTADILLSTMNNISSGLVVYPKVIERRINSELPFMATENIIMAMVEKGESRQECHEEIRVLSHQASAVVKQEGGDNDLIQRVRATEYFKPIWNELDTLLDPSTFVGRAPQQTEKFINKDVANALKNYKHLVNDESVSLNV

SEQ ID NO: 67234 - DNA, 1449 bp, Yarrowia lipolytica CLIB122
  CDS (1)..(1449)
atgtccaacaacgactcgtaccagactcccctgtcctcgcgatacgccagcaaggagatgtcgtcgctcttctctatgaagaaccgatactccacctggcgaaagctgtggtacaacctggctgtggccgagaaggagcttggaatcacccagatcaccgacgaggcccttgagcagctcaaggcccaccaggagatcaccgacgacgagatcgccgaggccaccaagcaggaagccattgtgcgtcacgacgtcatgtcccacgtccatgtgtacggactcactgcccccgctgccgctggcatcatccatctgggagccacctcctgctttgtcaccgacaacgccgatcttatcttcctgcgagacggtctggacattctgatccccaagctcgttaacgtcattgaccgactctctcagtttgccctcaagtacaaggatctgcccgttctgggatggacccacttccagcccgcccaactgaccaccgttggtaagcgagccacactctggatccaggagcttctgtgggatctgcgaaacctgcagcgagcccgagacgaccttggtctccgaggtgtcaagggtaccaccggtactcaggcctctttcctgtctctgtttgagggtaaccacgacaaggtcgagcagcttgacgagcgagtcgttgagctccttggcttcgactacgcctacccctgcactggacagacctactctcgaaagattgatgtcgacgtccttgcccctctcgcctctctcggctgcactgcccacaagttcgccaccgacgtgcgtctccttgccaacctcaaggagatggaggagcctttcgagaagtcccagatcggatcatctgccatggcctacaagcgaaaccccatgcgatccgagcgaatctgctctctgtctcgacacctgcagtcttgtttccaggacgcaactcagaccgcttctgtccagtggttcgagcgaactctcgatgactctgctattcgacgagtctctcttcccggcgccttcctcaccgccgacattgttctgtccactcttctgaacgttgtctctggtctggtcgtctaccccaaggtcattgagcgacgaattgccgccgagcttcctttcatggccactgagaacatcatcatggcaatggtccagcgaggaggagaccgacagcagtgccacgaggagatccgagttctttctcaccaggccgcccaggttgtcaaggagcagggaggagataacgatcttattgagcgaatcaagaacaccccctacttcaagcccgttcacgacgaccttgacaagctgctcgatccctctactttcgtcggccgagcacccgagcagaccgaaaagtttgtcaacaagactgttgccaaggctctagagccttacaagaagatgatcaaccaggagggcttccagcttgctgtctaa

SEQ ID NO: 67235 - protein, 482 aa, Yarrowia lipolytica CLIB122
MSNNDSYQTPLSSRYASKEMSSLFSMKNRYSTWRKLWYNLAVAEKELGITQITDEALEQLKAHQEITDDEIAEATKQEAIVRHDVMSHVHVYGLTAPAAAGIIHLGATSCFVTDNADLIFLRDGLDILIPKLVNVIDRLSQFALKYKDLPVLGWTHFQPAQLTTVGKRATLWIQELLWDLRNLQRARDDLGLRGVKGTTGTQASFLSLFEGNHDKVEQLDERVVELLGFDYAYPCTGQTYSRKIDVDVLAPLASLGCTAHKFATDVRLLANLKEMEEPFEKSQIGSSAMAYKRNPMRSERICSLSRHLQSCFQDATQTASVQWFERTLDDSAIRRVSLPGAFLTADIVLSTLLNVVSGLVVYPKVIERRIAAELPFMATENIIMAMVQRGGDRQQCHEEIRVLSHQAAQVVKEQGGDNDLIERIKNTPYFKPVHDDLDKLLDPSTFVGRAPEQTEKFVNKTVAKALEPYKKMINQEGFQLAV

SEQ ID NO: 67236 - DNA, 1470 bp, Aspergillus nidulans FGSC A4
  CDS (1)..(1470)
atgtcttcaagcaatgatgtgtaccagacgcctctcaactcgcgatatgcaagtgatgagatgaagtatctcttctctcccaggaataggttctctacatggagacagttgtggctgtggcttgcagaggctgagaaagagcttggcttgcccatcaccgatgaagccattgagcagatgcggaaacacaccacgatcaatgacgaagagttcaaggttgctgctgaggaggagaagcgccgaagacacgatgtcatggcccatgtccacgcttacggccaagttgcccccgcagctgctggaatcatccactggggtgcgacttcctgttactgcactgataatgccgacctgatattcctgcgtgatggcctgaacatcctcattcccaagttggcggttgtcatcgataagctgtctgcctttgctaagcagtacaaggatctgccctgccttggtttcacccatggacagcctgcacagctcgtcactgttggaaaacgtgcgtgcctgtggattcaagacttgctgatggatctgagaaacctcgaaagggcgcgcgatgatctgcgtttccgtggtgtcaagggcacaacgggtacacaggcgtcgtttcttcaaattttcaacggagatcacgacaaggtcgagcaattggatgaactcgttactaagaaggccggctttgattctgctttcatcatctcaagtcaaacttactctcgcaagatcgatgttgacgtagctaacgccttgggctcctttggttccacctgcgagcgcattggtattgatatccgccacttggccatgctcaaggaggttgaggaaccctttgagaaggatcagattggcagcagtgcgatggcttacaagcgaaaccctatgcggtccgagcgcctgtgctcgctgggcaggcaccttcagaacctccccaaggacgccctggacacctactccgctcagtggtttgaacgttcattgctactaatggccgataaggatgacagcgccatccgccggatcagtatccccgagctttacctctgcgctgacgcgtgcctcatcctcttgaacaacgtaacttccggattcgtggtgtaccctgaagtcatcaagcgccgtgtgaacgatgagcttccatttatggcaactgagaacgttatcatggcctgcgtgaagaagggactttcccgccaggacgcccatgaggaaattcgtgtcctctcacaccaagcctccgacaacgttaagaagcacggcaagaataacgacctcctcgaccgcatccgccgcaccgagttcttcgcgcctatcctcggcgagctcgacgctctcctcgaccccagcacctttgtcggccgtgcccctcaacaggtcgagaaattcacctcgaccgaggtcaagaaggccctgcagccctacgagacttatctcgctactgccgagacctctgcgcttcacgtttaa

SEQ ID NO: 67237 - protein, 489 aa, Aspergillus nidulans FGSC A4
MSSSNDVYQTPLNSRYASDEMKYLFSPRNRFSTWRQLWLWLAEAEKELGLPITDEAIEQMRKHTTINDEEFKVAAEEEKRRRHDVMAHVHAYGQVAPAAAGIIHWGATSCYCTDNADLIFLRDGLNILIPKLAVVIDKLSAFAKQYKDLPCLGFTHGQPAQLVTVGKRACLWIQDLLMDLRNLERARDDLRFRGVKGTTGTQASFLQIFNGDHDKVEQLDELVTKKAGFDSAFIISSQTYSRKIDVDVANALGSFGSTCERIGIDIRHLAMLKEVEEPFEKDQIGSSAMAYKRNPMRSERLCSLGRHLQNLPKDALDTYSAQWFERSLLLMADKDDSAIRRISIPELYLCADACLILLNNVTSGFVVYPEVIKRRVNDELPFMATENVIMACVKKGLSRQDAHEEIRVLSHQASDNVKKHGKNNDLLDRIRRTEFFAPILGELDALLDPSTFVGRAPQQVEKFTSTEVKKALQPYETYLATAETSALHV

SEQ ID NO: 67238 - DNA, 1449 bp, Candida albicans SC5314
  CDS (1)..(1449): transl_table=12
atgtctgaatacgataaatactcaactccattatcttcaagatatgcttctgaagaaatgtccaagattttctctttgagaaacagattttctacttggagaaaattatggttgaatttagccattgctgaaaaagaagttggactttctgtcattactgatgaagcaattgaacaaatgaaacaacatttggaaatcaccgataaagaaattcaagatgctgctgttgaagaagctaaagttagacatgatgtcatggcccacgttcatgttttcggtgaaacttgtcctctggctgctggaattattcatttgggtgctacttcatgttttgtcactgataatgcagatttaattttccttagagatgcttatgatgttttaattcctaaattggtcaacgtcattgatagattatcgaagtttgctttggaatataaagacttaccagtattaggttggactcatttccaaccagcacaattgaccacagttggtaaaagagccactttatggttacaagaattgttatgggatttaaggaatatggttagagccagaaatgatattggattaagaggggttaaaggtactactggtactcaagcttctttcttatcattattccatggtgatcatgataaagtagaagaattggataaaagagttgttgaattattaggatttgatattgtttatccagttactggtcaaacttattcaagaaaaattgatattgacgttttatcaccattggcttcatttggtgctactgctcacaaatttgctactgatattagattattggccaatttaaaagaaattgaagaaccatttgaaaaatcccaaattggatcatctgctatggcttataagagaaatccaatgagatgtgaacgtgtatgctcattggctagacatttgggtggattgttcaatgatgctgtgcaaactgcttctgtgcaatggtttgaaagaactttggatgattctgctattagaagaatcagtttaccatcagctttcttgaccgttgatattttattatctactatgcttaatattaccagtggattggttgtttatccaaaagttattgaaagaaggatcaattctgaattgccattcatggctactgaaaacattattatggccatggtcgaaaaaggtggttctagacaagattgtcatgaagaaattagagttttatctcatcaagccagtgctgttgttaaacaagaaggtggcgataatgatttgattgaaagaatcaaatcaactgaatatttcaaacctatttggaatgatttggatactttgttggatcctaagacttttgttggtagagctcctcaacaaactgaaaaatttgtcaagaatgatgttgccaatgctttgaaaccatttgaaaaatacatcaccactgaaaatgttgccttgaaggtgtaa

SEQ ID NO: 67239 - protein, 482 aa, Candida albicans SC5314
MSEYDKYSTPLSSRYASEEMSKIFSLRNRFSTWRKLWLNLAIAEKEVGLSVITDEAIEQMKQHLEITDKEIQDAAVEEAKVRHDVMAHVHVFGETCPSAAGIIHLGATSCFVTDNADLIFLRDAYDVLIPKLVNVIDRLSKFALEYKDLPVLGWTHFQPAQLTTVGKRATLWLQELLWDLRNMVRARNDIGLRGVKGTTGTQASFLSLFHGDHDKVEELDKRVVELLGFDIVYPVTGQTYSRKIDIDVLSPLASFGATAHKFATDIRLLANLKEIEEPFEKSQIGSSAMAYKRNPMRCERVCSLARHLGGLFNDAVQTASVQWFERTLDDSAIRRISLPSAFLTVDILLSTMLNITSGLVVYPKVIERRINSELPFMATENIIMAMVEKGGSRQDCHEEIRVLSHQASAVVKQEGGDNDLIERIKSTEYFKPIWNDLDTLLDPKTFVGRAPQQTEKFVKNDVANALKPFEKYITTENVALKV

SEQ ID NO: 67240 - DNA, 1449 bp, Candida albicans SC5314
  CDS (1)..(1449): transl_table=12
atgtctgaatacgataaatactcaactccattatcttcaagatatgcttctgaagaaatgtccaagattttctctttgagaaacagattttctacttggagaaaattatggttgaatttagccattgctgaaaaagaagttggactttctgtcattactgatgaagcaattgaacaaatgaaacaacatttggaaatcaccgataaagaaattcaagatgctgctgttgaagaagctaaagttagacatgatgtcatggcccacgttcatgttttcggtgaaacttgtcctctggctgctgggattattcatttgggtgctacttcatgttttgtcactgataatgctgatttaattttccttagagatgcttatgatgttttaattcctaaattggtcaacgtcattgatagattatcgaagtttgctttggaatataaagacttaccagtattaggttggactcatttccaaccagcacaattgaccacagttggtaaaagagccactttatggttacaagaattgttatgggatttaaggaatatggttagagccagaaatgatattggattaagaggggttaaaggtactactggtactcaagcttctttcttatcattattccatggtgatcatgataaagtagaagaattggataaaagagttgttgaattattaggatttgatattgtttatccagttactggtcaaacttattcaagaaaaattgatattgacgttttatcaccattggcttcatttggtgctactgctcacaaatttgctactgatattagattattggccaatttaaaagaaattgaagaaccatttgaaaaatcccaaattggatcatctgctatggcttataagagaaatccaatgagatgtgaacgtgtatgttcattggctagacatttgggtggattgttcaatgatgctgtgcaaactgcttctgtgcaatggtttgaaagaactttggatgattctgctattagaagaatcagtttaccatcagctttcttgaccgttgatattttattatccactatgcttaatattaccagtggattggttgtttatccaaaagttattgaaagaagaatcaattctgaattaccattcatggctactgaaaacattattatggccatggtcgaaaaaggtggttctagacaagattgtcatgaagaaattagagttttatctcatcaagccagtgctgttgttaaacaagaaggtggcgataatgatttgattgacagaatcaaatcaactgaatatttcaaacctatttggaatgatttggatactttgttggatcctaagacttttgttggtagagctcctcaacaaactgaaaaatttgtcaagaatgatgttgccaatgccttgaaaccatttgaaaaatacatcaccactgaaaatgttgccttgaaggtgtaa

SEQ ID NO: 67241 - protein, 482 aa, Candida albicans SC5314
MSEYDKYSTPLSSRYASEEMSKIFSLRNRFSTWRKLWLNLAIAEKEVGLSVITDEAIEQMKQHLEITDKEIQDAAVEEAKVRHDVMAHVHVFGETCPSAAGIIHLGATSCFVTDNADLIFLRDAYDVLIPKLVNVIDRLSKFALEYKDLPVLGWTHFQPAQLTTVGKRATLWLQELLWDLRNMVRARNDIGLRGVKGTTGTQASFLSLFHGDHDKVEELDKRVVELLGFDIVYPVTGQTYSRKIDIDVLSPLASFGATAHKFATDIRLLANLKEIEEPFEKSQIGSSAMAYKRNPMRCERVCSLARHLGGLFNDAVQTASVQWFERTLDDSAIRRISLPSAFLTVDILLSTMLNITSGLVVYPKVIERRINSELPFMATENIIMAMVEKGGSRQDCHEEIRVLSHQASAVVKQEGGDNDLIDRIKSTEYFKPIWNDLDTLLDPKTFVGRAPQQTEKFVKNDVANALKPFEKYITTENVALKV

SEQ ID NO: 67242 - DNA, 1464 bp, Tribolium castaneum
  CDS (1)..(1464)
atgagtgaaactattgactacaacaacccctattgcaactatcgatcccccctgagcaccaggtatgccagcaaggaaatgcagtacaatttcagcgaccagaagaagttttccacttggagacgactctggatcaacctggccaaagcagaaaaggaattggggctggacatcagcgatgcccaaatcgccgagatggagagaaatgtgcacaatatcaatttcgcggaatgtgcggaagaggagaaattgacgaggcacgatgttatggcccacgtgcacgttttcgcaaaacagtgcccgacagcggcacccattatccatctaggggcgacctcgtgcttcgtgggggataacacggatttgattgttatcaaggatgggttggagctgttgctgccaagggttgcgggggtcatccagaatttggcccgctttgccgaacagtacaaatccctcccaacgctgggcttcacccacctccaacccgcccaactgaccaccgtcggcaaacgcgccacgctctggctcttcgacttcctcctcgacgaggaggaattgcgccaaatcaaggccaagctccgcttccgcggcgccaaaggcaccaccggcacccaggcctccttcctccagctcttcgacggcgacggcaccaaagtccggaagttggacaaacgcgtcgctgaattatccggctttgccaaaacctacccggtcactggccaaacctacacgcgcaaaatcgacctccaggtcgtgggggcgctctcccatctaggggcctccgtccacaagatgtgctccgacttgcgcctcttggccaacatgaaggaaatcgaggagccattcgagacgacgcaaatcggcagcagcgccatgccctacaagcgaaaccctatgcggtcggaacggtgctgcgccctcgcccggcatttgatttccctgcactcgaacgcggcaaacacgcatgccgtccagtggctggaacgcactctggacgactcggccaacaagagattgacgctcccggaggcgtttctgagcgccgatgccgcgctcatggttctggagaacataacgcaaggcctggtcgtgtacccgaaggtgatcgaacgaaggatcatgcaggagctgcccttcatgtccgcggagaacataatcatggccatggtgaagaaagggggagatcggcaaatttgccacgagaaaatcagggttttgtcgcaacaagcgggcgcccaggtgaaggaacacgggaaggacaacgatttcctggatagggtcaaggcggataaatacttccaaccaatcgtcggggatttagccacgatcctgcaaccgtccacttacataggccgggcggcggaacaagtcaccgagtttttgcaagaggaggttgccccaatcctccaaatgtacaagaatcaattaaaggagcacaaaaccatcactctgaacatatag

SEQ ID NO: 67243 - protein, 487 aa, Tribolium castaneum
MSETIDYNNPYCNYRSPLSTRYASKEMQYNFSDQKKFSTWRRLWINLAKAEKELGLDISDAQIAEMERNVHNINFAECAEEEKLTRHDVMAHVHVFAKQCPTAAPIIHLGATSCFVGDNTDLIVIKDGLELLLPRVAGVIQNLARFAEQYKSLPTLGFTHLQPAQLTTVGKRATLWLFDFLLDEEELRQIKAKLRFRGAKGTTGTQASFLQLFDGDGTKVRKLDKRVAELSGFAKTYPVTGQTYTRKIDLQVVGALSHLGASVHKMCSDLRLLANMKEIEEPFETTQIGSSAMPYKRNPMRSERCCALARHLISLHSNAANTHAVQWLERTLDDSANKRLTLPEAFLSADAALMVLENITQGLVVYPKVIERRIMQELPFMSAENIIMAMVKKGGDRQICHEKIRVLSQQAGAQVKEHGKDNDFLDRVKADKYFQPIVGDLATILQPSTYIGRAAEQVTEFLQEEVAPILQMYKNQLKEHKTITLNI

SEQ ID NO: 67244 - DNA, 1428 bp, Clostridium thermocellum ATCC 27405
  CDS (1)..(1428): transl_table=11
ttgaaaaatacatatgaaagtcctttaaattcaagatatgcgagcaaggagatgcaggaactgttttctcccgacatgaagtttcgcacatggaggaggctctggattgcgctcgcagaggcagaaaaggaactggggcttaacattaccgatgaacagatagaagagcttaagaaatataaagatgacataaattatgatgtggctgaaatgaaagaaaaagagtttcgccatgacgtaatggcgcacatacatgcttacggagaacagtgtccaaatgccaggcccataattcatttgggcgctacatcctgctatgttggcgacaataccgatattataataatgacggaggctttaaaactcataaagaaaaaacttctttgtgtaatatctaaattgtccgattttgcgatgaaatacaaagatcttcccactttagggtatacacattttcagccggcacagcttgttacggtggggaagagagcaactttgtggattcaggatttgttaatggatcttgaagacttggattatattctgtccaatatgaaacttttaggttccaaaggcaccacgggaacacaggcaagctttttaaatctttttgaaaacgaccatgaaaaagtaaaaaaactggacatgcttatagcaaagaaaatgggctttgacaaggttttccctgtatcgggacaaacctataccagaaagcttgacagcagaattctaaatctcttaagctcaattgcacagagtgcttacaagtttggcaatgacttaaggcttcttcagagcatgaaagaaattgaagaaccttttgaaaagcatcagataggctcgtctgcaatggcatacaagagaaatccgatgaggtccgagaggatttgtgctttggcaagatatgttattgttaacgctctaaatcccgcgattaccgcatccacccagtggtttgaaagaactttggatgattcggcaaacaaacgtatatgcataccggaggctttccttgcagtggatgcaatactgaacatatatataaatgtcgcagacggcatggttgtgtatccaaaggttatagaaaaacacgttttggaagaacttccgtttatggctacggagaacataatgatggaagccgttaaaaaaggcggagacagacaggagctccatgaacgtataagggttcattcaatggaagctgcaaaacaggttaaggttgaaggaaagaaaaatgaccttattgaaagaatagcggccgatgaaatgtttggacttagcattgacgaactgaattccgttcttgctccggaaaactacgttggaagagctccgcagcaggtggaggagtttatcaatgaatatgtaaagcctgttcttgaaaagaataaggttgaggatatagaggttgaacttaaggtttga

SEQ ID NO: 67245 - protein, 475 aa, Clostridium thermocellum ATCC 27405
MKNTYESPLNSRYASKEMQELFSPDMKFRTWRRLWIALAEAEKELGLNITDEQIEELKKYKDDINYDVAEMKEKEFRHDVMAHIHAYGEQCPNARPIIHLGATSCYVGDNTDIIIMTEALKLIKKKLLCVISKLSDFAMKYKDLPTLGYTHFQPAQLVTVGKRATLWIQDLLMDLEDLDYILSNMKLLGSKGTTGTQASFLNLFENDHEKVKKLDMLIAKKMGFDKVFPVSGQTYTRKLDSRILNLLSSIAQSAYKFGNDLRLLQSMKEIEEPFEKHQIGSSAMAYKRNPMRSERICALARYVIVNALNPAITASTQWFERTLDDSANKRICIPEAFLAVDAILNIYINVADGMVVYPKVIEKHVLEELPFMATENIMMEAVKKGGDRQELHERIRVHSMEAAKQVKVEGKKNDLIERIAADEMFGLSIDELNSVLAPENYVGRAPQQVEEFINEYVKPVLEKNKVEDIEVELKV

SEQ ID NO: 67246 - DNA, 1428 bp, Mycobacterium sp. JLS
  CDS (1)..(1428): transl_table=11
gtgacgatcccgaacgtgctggccaaccgctacgccagcgaggacatggtggcgatctggtcgccggaagccaagatcgtcgccgagcgccgattgtggctggcagtgctgcgtgcgcagatagagctcggcatgggcaacacggtcgttcccgacggggtggtcgccgactacgaacgcgtcctcgaccaggtggacctcgcgtccatcgcagcgcgcgaacgcgtcacccgccacgacgtgaaggcccgcatcgaggagttcaacgcgctggccggccacgaacacgtgcacaagggcatgaccagccgcgacctcaccgagaacgtcgaacagctacagatccgccgctccctggaactcgtccacgcccacggcgttgccgtggtggcccggctcgccgagaaggccgtgagctaccgcgacctcgtgatggccggccgcagccacaacgtcgccgcacaggccaccacactgggcaagcggttcgcctccgccgctgaggagacgttgctcgccctgcagcgggtcgaggaactgatcgcgcgttacccgctgcgcggtatcaagggcccgatgggcaccgcccaggacatgctcgacctgttcggcggcgacaccgcgaaactggccgacctcgagcggcgggtcgccgaattcctcggcttccgagacgttttcaccagcgtcggccaggtgtacccccgatccctcgaccacgacgtcgtctccgcgctggtgcaactcggcgcgggtccctcctcgctcgcgcacaccatccggctgatggccggccacgagctggtgaccgagggcttcgcaccgggccaggtcggatcgtcggccatgccgcacaagatgaacacccggtcgtgtgaacgcgtcaacggcctgcaggtggtgctgcgcggctacggttcgatggccgccgaactggcgggtgcgcagtggaacgaaggcgacgtgttctgctcggtggtgcgccgggtggcgctgcccgacgcgttcttcgcgatcgacgggcagaccgagacgttcctgaccgtgctcgacgagttcggcgcctatccggcggtcatccagcgcgaactggaccgctacctgccgttcctggccaccacccgcatcctcatcgccgcggtgcgggccggcgtgggccgcgagaccgcgcacgaggtcatcaaggagcatgcggtggccgtcgcgctggcgatgcgggagaaggggcaggagcccgacctactggaccggctggccgccgacccgcggctgccgctggaccgcgtcgcgctcgaggatgcgctggccgacaagcaggcgttcagcggggccgccggcgatcaggtcgaccgcgtcgccgaggcggtcgacgagttggtcagccgctatccggaggcggcccagtacacctcgggcgccatcctgtga

SEQ ID NO: 67247 - protein, 475 aa, Mycobacterium sp. JLS
MTIPNVLANRYASEDMVAIWSPEAKIVAERRLWLAVLRAQIELGMGNTVVPDGVVADYERVLDQVDLASIAARERVTRHDVKARIEEFNALAGHEHVHKGMTSRDLTENVEQLQIRRSLELVHAHGVAVVARLAEKAVSYRDLVMAGRSHNVAAQATTLGKRFASAAEETLLALQRVEELIARYPLRGIKGPMGTAQDMLDLFGGDTAKLADLERRVAEFLGFRDVFTSVGQVYPRSLDHDVVSALVQLGAGPSSLAHTIRLMAGHELVTEGFAPGQVGSSAMPHKMNTRSCERVNGLQVVLRGYGSMAAELAGAQWNEGDVFCSVVRRVALPDAFFAIDGQTETFLTVLDEFGAYPAVIQRELDRYLPFLATTRILIAAVRAGVGRETAHEVIKEHAVAVALAMREKGQEPDLLDRLAADPRLPLDRVALEDALADKQAFSGAAGDQVDRVAEAVDELVSRYPEAAQYTSGAIL

SEQ ID NO: 67248 - DNA, 1446 bp, Clostridium difficile 630
  CDS (1)..(1446): transl_table=11
atgatagataataaatatactacttactcaaacccacttacagacagatattgtagcaaggacatgagttatatattttctccacaatttaaattctctacatggagaaggttatgggttgcacttgcagaaggtgaacatgagttaggaatcaatataactgaagaacaattagatgagctaagagctaatatagataatataaattttgatgaagctagaaaaatagaaaaagaagtaagacatgatgtaatgtctcacgtaaaagcttatggtttacaatgtgaaaaagccaaaggaataatacatttaggagcaacatctgcatatgttggagataatacagatgttatacaaatgaatgaagctttaaaacttctaagagtaaagcttgtaaatttaataaacaatttaaaagaatttgcacttaagtacaaagatatgccagctcttggatttacacacttccaagctgctcaacttacaacagtaggaaaaagagcttgtttatgggctcaagatttaattcttgatttggaagatttaaactatagaatagacaacatgaagttaagaggagttaaaggtactactggtactcaagcaagttttttaagcttatttgaaggagaccacgaaaaagtaaaagagttagataagaaaatttgtaaaaagatgggataccattcttcctatgcagtaagtggacagacatatactagaaagttagattatcaagtaataagcatactatcagggatagctcaaagtatgcataagatgactaatgatataagacttttacaaagtttaaaagaattagaagagccatttgaaaaaaatcaaataggttcatcagcaatggcttataagaggaatccaatgagaagtgagagaatagcatctttatctaagtatataatctctgaatctataagccctgcaatggtacaagccactcaatggttagagagaacattagatgactcagccaataagagattggcaatacctcaagcatttatggcagcagatgctatacttgaaatagggataaatgtaactgatggtttagtagtatatgaaaatatgataaatagacgtgtaaatgaggaacttccttttatggctacagaaacaatacttatggaagctgtaaaaagaggtggagatagacaggaattacatgaaataataagagaatattctatgaaagctgcctatagagtaaagcatgaaggcaaggataataacttaattgaacttataatgaatgatgattcatttaaaatgagcaaggaagaaatactatctataatggacccaaaaaactttataggtagagctccagaacaagttgtagaatttgtaaatgaagttgtagaacctgctataaaagattataaggaagacttaggaaaagtagatgtagacctaagagtatag

SEQ ID NO: 67249 - protein, 481 aa, Clostridium difficile 630
MIDNKYTTYSNPLTDRYCSKDMSYIFSPQFKFSTWRRLWVALAEGEHELGINITEEQLDELRANIDNINFDEARKIEKEVRHDVMSHVKAYGLQCEKAKGIIHLGATSAYVGDNTDVIQMNEALKLLRVKLVNLINNLKEFALKYKDMPALGFTHFQAAQLTTVGKRACLWAQDLILDLEDLNYRIDNMKLRGVKGTTGTQASFLSLFEGDHEKVKELDKKICKKMGYHSSYAVSGQTYTRKLDYQVISILSGIAQSMHKMTNDIRLLQSLKELEEPFEKNQIGSSAMAYKRNPMRSERIASLSKYIISESISPAMVQATQWLERTLDDSANKRLAIPQAFMAADAILEIGINVTDGLVVYENMINRRVNEELPFMATETILMEAVKRGGDRQELHEIIREYSMKAAYRVKHEGKDNNLIELIMNDDSFKMSKEEILSIMDPKNFIGRAPEQVVEFVNEVVEPAIKDYKEDLGKVDVDLRV

SEQ ID NO: 67250 - DNA, 1434 bp, Propionibacterium acnes KPA171202
  CDS (1)..(1434): transl_table=11
atgagcgtacccaatatccttgccacccgttatgcctccgcggccatgcgttccatctggacgccggaaaacaaaatccgtgccgagcgcagactctggctgaccgtcatggaagctcaagccgatctcggtgtgagctttggtggcgacgatcccgaacaggtgttggccgactaccaggcggttctcgacgacgttgaccttgactcgatcgccgagcgggaggcgattactcgtcatgacgtcaaggccaggattgaggagttcaacgccctggccggtcatgagcacattcacaagggcatgacgagccgtgacctcaccgaaaacattgagcagatgcaggtgctggagtcgctgcggctagtgcgcgacaaaatggttgccacgctcaaccagctgtcgcgcctggccgctcagttctccgatcaagccattgctggacgctctcacaatgttgccgcccaggtgacgaccctgggcaagcggttcgccaccgctatcgatgagatgctggtggcatgggatcacgtcaacgagctcattgagcgctacccggctcgtggtatcaagggcccgatgggaactgcccaggacatgcttgacctgcttggcggtgatgagtccaagcttgacgatcttgagcatcgcgttgctgatcatctggggtttaaccaggtactcacttcgaccggtcagatttacccgaggtccttggactttgaggtcatgtcaactctggtgcaggtgctgtcaggcccgtctaacctggcgacgtctatccgccttatggccggtaacgaacttgtcaccgaggggttcaagcccggccaggtgggttcctcggcgatgccgcacaagatgaatgctcgttcctgcgagcgggtcaacggcttccttgttgtgttacgtggctatttgactatggccaccggtctggcgggagtgcagtggaacgagggtgacgtgtcctgttcggtggtgcgtcgtgtggcgctgcccgattccttctatgccattgatggtgcttttgagacctttttgacgatccttggcgacttcggggcgttccccgctgtcattgaggctgagcttgagcgctacctgcccttcctgacgactactaaggtccttatggcttgtgtgcgtgctggcgtcggtcgggaggacgcccacgaggccatcaaggaacacgccgtagccgtggccctcgacatgcgcgaaaccggtcgcactggtaacgaccttttcgcccgtctggccgccgatccgcgcatcccgctcaccaaggagcagctacgtggtttggtgtcctctccgctggatctcactggtggcgcccaggatcaggtcgaggcgctgtgcgccaaggtggaggacattgttcgggaatacccgaaggctgccaactacctgcctggtctggtgttgtga

SEQ ID NO: 67251 - protein, 477 aa, Propionibacterium acnes KPA171202
MSVPNILATRYASAAMRSIWTPENKIRAERRLWLTVMEAQADLGVSFGGDDPEQVLADYQAVLDDVDLDSIAEREAITRHDVKARIEEFNALAGHEHIHKGMTSRDLTENIEQMQVLESLRLVRDKMVATLNQLSRLAAQFSDQAIAGRSHNVAAQVTTLGKRFATAIDEMLVAWDHVNELIERYPARGIKGPMGTAQDMLDLLGGDESKLDDLEHRVADHLGFNQVLTSTGQIYPRSLDFEVMSTLVQVLSGPSNLATSIRLMAGNELVTEGFKPGQVGSSAMPHKMNARSCERVNGFLVVLRGYLTMATGLAGVQWNEGDVSCSVVRRVALPDSFYAIDGAFETFLTILGDFGAFPAVIEAELERYLPFLTTTKVLMACVRAGVGREDAHEAIKEHAVAVALDMRETGRTGNDLFARLAADPRIPLTKEQLRGLVSSPLDLTGGAQDQVEALCAKVEDIVREYPKAANYLPGLVL

SEQ ID NO: 67252 - DNA, 1497 bp, Desulfotalea psychrophila LSv54
  CDS (1)..(1497): transl_table=11
gtgtccccttttctattgaacatattgaaattattctcggagaaaatcatgtcacagacaacaacataccaagagcccctggtgagtcgatataccagccctgaaatgcagtaccttttttcagcggaaaagaaatttactacctggagaaaatgttgggtcgctcttgccgaggctcaatacgaacttggcctcaccgatatcgttactccggaaatgattgccgagctcaaggcaaatgtgaacaatattgactacgatattgccgctcaaaaagaaaaagaaattcgccatgatgttatggcccatgtctatgaatatggcctcaagtgccccaccgcggcgggcatcattcacctgggtgcaacctcgcagtttgttgtctgtaataccgatcttattgttcagcgcgagggcctgctcctcgccaaaaaagcccttcttcaggttatcagcaatatggcagaattttgcgacgagcataaagatctggcaaccttgggcttcactcactaccagcctgctcaacctaccacagtgggcaaaagaaataccctgattcttcaagacctggtgatggatctaaactaccttgatttcttgctcgacaacatcaaggcccgtggagccaagggaaccgttggtacccaggcgaccttccttgacctctttaagggagatcacgccaaggtacgtgcccttgacgagttagtggcaaagaaactcggcttttcctctacctttgatgtaaccggccaaacatacaccagaaagcatgatatgaaactggcagagaccctggcaggaatcggttcaaccgcccataaatttgccgtagacctccgtctactgtcaaatttaaaggtacaggaagagccctttgccaagaaccagaccggatcttcagccatggcctacaagagaaaccccatgcgttccgagcgtatgacaggacttgcccgtaagctgatgaatctgccacaaaattttgcagccacctatgccaatcagtggtttgaacgtacccttgatgattccgctattcgtcgcatggatattcctcaatgctttctcttaaccgatgccatactcaagctctttattaatatcagctctgatatggttgtttttccaaaacagatcgaaaaacatcttcgagccgaactaccctttatgtccaccgagaaaattttaatggaagccgtggagaagggtgaaaatcgtcaagacatgcatgaacttatcaaagaacactctttggcagccggcaaggtcgtaaaggaagagggtctggataatgatctcctcaaccgcctggctgaagatgatcgcattccctttgatcttgacagtcttttggcaatgattactgactatacacagtttaccggtcgtgcctcggcacaaacaacggattacctgactgaagttatcaatcccctcttacaaaagaacagtgagtatatgggcgaaatagatagctctctctccgtatag

SEQ ID NO: 67253 - protein, 498 aa, Desulfotalea psychrophila LSv54
MSPFLLNILKLFSEKIMSQTTTYQEPLVSRYTSPEMQYLFSAEKKFTTWRKCWVALAEAQYELGLTDIVTPEMIAELKANVNNIDYDIAAQKEKEIRHDVMAHVYEYGLKCPTAAGIIHLGATSQFVVCNTDLIVQREGLLLAKKALLQVISNMAEFCDEHKDLATLGFTHYQPAQPTTVGKRNTLILQDLVMDLNYLDFLLDNIKARGAKGTVGTQATFLDLFKGDHAKVRALDELVAKKLGFSSTFDVTGQTYTRKHDMKLAETLAGIGSTAHKFAVDLRLLSNLKVQEEPFAKNQTGSSAMAYKRNPMRSERMTGLARKLMNLPQNFAATYANQWFERTLDDSAIRRMDIPQCFLLTDAILKLFINISSDMVVFPKQIEKHLRAELPFMSTEKILMEAVEKGENRQDMHELIKEHSLAAGKVVKEEGLDNDLLNRLAEDDRIPFDLDSLLAMITDYTQFTGRASAQTTDYLTEVINPLLQKNSEYMGEIDSSLSV

SEQ ID NO: 67254 - DNA, 1341 bp, Methanococcoides burtonii DSM 6242
  CDS (1)..(1341): transl_table=11
atggcaatccatcctatcgaataccgttacggtactgacgaaatgaaatatgtctggagcgaggcaaaccgtcttgaaaagctcttaaagaccgaagcagcactctcaaatgccgaagcaaagatcggtatggtgcctgctgaagctgcagcagagatcgagaaaagcatagctcatgtaaagatcgagagagttgctgagatcgaggatgagatccaccatgacatgatggccattgttattgctatttctgagcaatgtacagatgatgctgccaagtgggtacactttggtgcaacttccaacgacatcctggacacagctactgctcttcagatgatggatgctgttgctatccttgaggaaaagacaagaacacttcttgatgtactgctcacaaaagcggaagagcacaagaacactgtctgtgccggcaggacacacggtcagatcggtgtgccgaccacatacggcctgaggtttgctatctgggcaagtgaggtcgcaaggcacctcgaacgcttagcacagcttacaccacgccttctggtaggtcagatgacaggcgctgtgggtacacaggcagcattcggtaaagatggtatcgagatccaggcacacgcaatggaatatctcggtcttggcagtgttgatgtttcaaatcagatcatccagcgtgaccgccacgcagaattcgtcatgtggatggcaaacacagtaaccacccttgacaagatcgctgtggagatacgcaccctccagagaagcgagatcgcagaagtggaggaaagcttccgcaagaaccaggtaggttcatccacaatgcctcacaagaggaaccctatcaaatcagaacagataagtggtctagcacgtatcgttcgttcaatggtcgagccggaacttctgaacaacaccctctgggatgaacgtgacctcactaactcctcctgcgaaaggatagttttccctgaaagctgtgtccttacagaccatctcttaaagctcgcaataggcgttatagagaatctgagattctatcctgagaacatccgcaagaacctcgatctcttacgtggtcttaacatgggtgaagctatcatgatcgatctggcaaaacgcggtgttggcaggcaggaagctcatgagatcgtgcgcagttccgcaatggaagcccacgaatcaggaaagcatctcaaggatgtcctcctcagcagaccggacgttacaaagtatttgaacgaatctgagatcaacgatcttcttgatcctgacatgtacatcggtaccgcagtagctcaggtcgagaacgttgtggcaaagctcagggctcagttataa

SEQ ID NO: 67255 - protein, 446 aa, Methanococcoides burtonii DSM 6242
MAIHPIEYRYGTDEMKYVWSEANRLEKLLKTEAALSNAEAKIGMVPAEAAAEIEKSIAHVKIERVAEIEDEIHHDMMAIVIAISEQCTDDAAKWVHFGATSNDILDTATALQMMDAVAILEEKTRTLLDVLLTKAEEHKNTVCAGRTHGQIGVPTTYGLRFAIWASEVARHLERLAQLTPRLLVGQMTGAVGTQAAFGKDGIEIQAHAMEYLGLGSVDVSNQIIQRDRHAEFVMWMANTVTTLDKIAVEIRTLQRSEIAEVEESFRKNQVGSSTMPHKRNPIKSEQISGLARIVRSMVEPELLNNTLWDERDLTNSSCERIVFPESCVLTDHLLKLAIGVIENLRFYPENIRKNLDLLRGLNMGEAIMIDLAKRGVGRQEAHEIVRSSAMEAHESGKHLKDVLLSRPDVTKYLNESEINDLLDPDMYIGTAVAQVENVVAKLRAQL

SEQ ID NO: 67256 - DNA, 1422 bp, Rhodococcus sp. RHA1
  CDS (1)..(1422): transl_table=11
gtgagccgcatcccgaacgtccttgccaaccgttacgccagccccgaactcgtcgagttgtggtcgcccgagcacaagatcgtcctcgagcgtcagctgtggctcgccgtgctgcgtgcccaggcggaactcgggatcgacgtgcctgccgaggcgctcgccgactacgagcgggtgctcgagcaggtggacctcgactccatcgccgaccgtgagcgcgtcacgcgccacgacgtgaaggcccgcatcgaggagttcaacgcgctcgccgggcacgagcaggttcacaagggtctgaccagccgcgacctcaccgagaacgtcgagcagttgcagatcctgcggtcgctcgagcacgtccacgcgcacggtgtcgcggtcgcggcccggctggccgagcgggccgccgagtacggcagcctcgtcatggcaggccggtcgcacaacgtcgcggcgcaggccaccacgctgggcaagcggttcgcgtcggccgccgacgaactgctcgtcgcgctcacccggctgcgcgagctgatcgaccgctacccgctgcgcggcatcaagggacccatgggcaccgcgcaggacatgctcgacctcctcgacggtgacgcgtccaagctggaggcgctggagcagaaggtcgccgagcacctcggcttctcccacgtgttcacgagcgtcggccaggtgtacccgcggtcgctggaccacgacgtgctgtccgcgctggtgcaggtggcggccgggccgtcgtcgttcgcgcacaccatccgcctgatggccggccacgaactggtcaccgaggggttccagcccggccaggtcgggtcgtccgcgatgccgcacaagatgaacacccgttcctgcgagcgcgtcaacggactgcaggtcgtgctgcgcggatacgcgtccatggccgccgagctcgcgggcgcgcagtggaacgagggcgacgtgttctgctcggtggtgcgccgcgtcgcgctgccggacgcattcttcgcgatcgacggattgatcgagacgttcctgacggtgctcgccgaattcggcgcctaccccgccgtcatcgagaaggaactcacccggtacctgccgttcctcgccacgaccaaggtcctgatggctctggtgcgggcaggagttggccgggagacggcgcacgaggtcatcaaggaacacgccgtcgccgtcgcgctggcgatgcgcgaggagggcagggaacccgacctcctcgaccgcctggccgccgacgaccgcctgcccctcgaccgggccgccctcgacgaggcccttgccgacaagaaggcgttcatcggtgccgccgaggcgcaggtcgccacggtcgtcgcgcaggtgcagaagctcgtcgacgccgaccccgaggcggccgcgtaccagccgtccccgatcctgtag

SEQ ID NO: 67257 - protein, 473 aa, Rhodococcus sp. RHA1
MSRIPNVLANRYASPELVELWSPEHKIVLERQLWLAVLRAQAELGIDVPAEALADYERVLEQVDLDSIADRERVTRHDVKARIEEFNALAGHEQVHKGLTSRDLTENVEQLQILRSLEHVHAHGVAVAARLAERAAEYGSLVMAGRSHNVAAQATTLGKRFASAADELLVALTRLRELIDRYPLRGIKGPMGTAQDMLDLLDGDASKLEALEQKVAEHLGFSHVFTSVGQVYPRSLDHDVLSALVQVAAGPSSFAHTIRLMAGHELVTEGFQPGQVGSSAMPHKMNTRSCERVNGLQVVLRGYASMAAELAGAQWNEGDVFCSVVRRVALPDAFFAIDGLIETFLTVLAEFGAYPAVIEKELTRYLPFLATTKVLMALVRAGVGRETAHEVIKEHAVAVALAMREEGREPDLLDRLAADDRLPLDRAALDEALADKKAFIGAAEAQVATVVAQVQKLVDADPEAAAYQPSPIL

SEQ ID NO: 67258 - DNA, 1425 bp, Mycobacterium smegmatis str. MC2 155
  CDS (1)..(1425): transl_table=11
gtgttcgtgacgattccgaatgttctggccaaccgctacgcaagcgacgagatggttgccatctggtcgccggaagccaagatcatcgcggaacggcggttgtggctggccgttctgcgtgcccaggccgaactgggggtggccgtgccagacggcgtcgtcgaggactatgagcgggtgctggagaacgtcgacctggagtcgatcgccgcgcgtgaacgcgtcacccgccacgacgtcaaggcgcgcatcgaggagttcaacgcgctggccgggcacgagcacgtgcacaagggcatgacgagccgcgacctcaccgagaacgtcgagcaactgcagatccgccagtcgctcgagctggtgttctcccacggcgtcgccgtggtggcccgcctggccgagcgcgccgtcgtctaccgcgacctcgtgatggcaggccgcagccacaacgtcgcggcccaggccacgacgctgggcaagcgattcgcgtcggccgccgaggaaaccctggtggcgttgacccggctgcgcgagctgatcgaccgctacccactgcgcggcgtcaagggccccatgggcaccgcgcaggacatgctcgacctgttcggcggcgacgtgggcaaactcgccgaccttgagcgccgcgtcgccgaattcctcgggttcaccgaggttttcaccagtgtcggccaggtctacccgcgttcgctcgatcacgacgtgctctcggcgctggtgcagttcggcgcaggcccgtcgtcgatggcacacaccatccgcctgatggcgggccacgaactggtcaccgagggcttcgcgcccgggcaggtggggtcgtcggccatgccgcacaagatgaacacccgctcatgtgagcgcgtcaacgggttgcaggtggtcctgcgcggatacgcgtcgatggccgccgaactcgccggtgcgcagtggaacgagggcgacgtgttctgctcggtggtgcgccgcgtcgcactgcccgacgcgttcttcgcgatcgacgggcagaccgagacgttcctgacggtgctcgacgagttcggtgcctacccggcggtcatccagcgcgaactcgaccgctacctgccgtttttggccaccacccgcatcctcatggccgcggtgcgcgcgggtgtcggacgcgaggccgcccacgaggtcatcaaggaacacgccgtcgcggtggcgctcgcgatgcgcgagcagggcagggaacccgacctcatcgaccgcctggcgggcgatccgcgcctgccgctggacaaggtggcccttgaggccgcgctggaggacaagcaggctttcacgggcgcggcaggcgatcaggtggacggtgtcgtcgcagccgtcggtgaactggtgagccgttatccggaagcggcgaaatacacctcgggcgcgatcttgtga

SEQ ID NO: 67259 - protein, 474 aa, Mycobacterium smegmatis str. MC2 155
MFVTIPNVLANRYASDEMVAIWSPEAKIIAERRLWLAVLRAQAELGVAVPDGVVEDYERVLENVDLESIAARERVTRHDVKARIEEFNALAGHEHVHKGMTSRDLTENVEQLQIRQSLELVFSHGVAVVARLAERAVVYRDLVMAGRSHNVAAQATTLGKRFASAAEETLVALTRLRELIDRYPLRGVKGPMGTAQDMLDLFGGDVGKLADLERRVAEFLGFTEVFTSVGQVYPRSLDHDVLSALVQFGAGPSSMAHTIRLMAGHELVTEGFAPGQVGSSAMPHKMNTRSCERVNGLQVVLRGYASMAAELAGAQWNEGDVFCSVVRRVALPDAFFAIDGQTETFLTVLDEFGAYPAVIQRELDRYLPFLATTRILMAAVRAGVGREAAHEVIKEHAVAVALAMREQGREPDLIDRLAGDPRLPLDKVALEAALEDKQAFTGAAGDQVDGVVAAVGELVSRYPEAAKYTSGAIL

SEQ ID NO: 67260 - DNA, 1431 bp, Nocardioides sp. JS614
  CDS (1)..(1431): transl_table=11
gtgaccgtccccaacgtcctggccacccgctacgcctccgccgagctggcgcggatctggtcgccggagcacaagatcgtgctggagcggcagctctggatcgcggtcctggaggcgcagcgcgacctcgggatcgcggtgccggacggtgtcgtcgaggcctaccgcggcgtcgcggagctcggtgagaagggggtggacctcgagtcgatcgcggcccgcgagcgggtgacccggcacgacgtgaaggcccggatcgaggagttctcggcgctggcgggtcacgagcacatccacaagggcatgacctcgcgcgacctcaccgagaacgtcgagcagctgcaggtcaggcagagcgtggcgctggtccgcgaccgggcggtcgcggcactggcccggctcgcccggctggccgccgagcacgaggccaccgtgatggccggacgcagccacaacgtcgccgcccaggcgaccacgctcgggaagcggttcgcgaccgtggccgacgagatgctggtcgccctcgaccgggtcgaggacctgctggtgcgctacccgctgcgcgggatcaaggggccgatggggaccgcgcaggacatgctcgacctgctcgacggcgacgccgccaagctggccgagctcgagcagcgggtcgcggcgcacctgggcttcgagcgggtgctgaccagcgtcgggcaggtctacccgcgcagcctcgacctcgacgtcgtcagcgccctggtccagctggtgtccggaccgtcgaacctcgcgaccacgatccggctgatggccggcaacgagctggtgaccgagggcttcaaggagggccaggtcggctcctcggcgatgccgcacaagatgaacagccgctccgccgagcgggtcaacgggctctcggtcgtgctccgcggccacctctcgatggtcagcgagctggccggcgaccagtggaacgagggcgacgtctccgactccgtcgtccgccgggtggccctgccggacgcgttcttcgccgccgacgggctgttcgagacgttcctgacgatcctcgacgagttcggggccttcccggccgtcatccagcgcgagctggaccgctacctgccgttcctcgccaccacgaaggtgctgatggccgcggttcgcaacggggtgggccgggaggccgcccacgagtcgatcaaggaggcggcggtcggcaccgccctcgacatgcgccgcggccaggccgacaacgacgtcttcgcccggctggccgccgacacccggctggggctgacctccgaccagctggcgtccctggtggccgagccgatcacgttcaccggcgcggcggtcgcgcaggtgcaggccgtcgtacgccgggtcgccgaggtgaccgaccggcaccccgcggccgcggcgtacgcacccggcgacatcctctag

SEQ ID NO: 67261 - protein, 476 aa, Nocardioides sp. JS614
MTVPNVLATRYASAELARIWSPEHKIVLERQLWIAVLEAQRDLGIAVPDGVVEAYRGVAELGEKGVDLESIAARERVTRHDVKARIEEFSALAGHEHIHKGMTSRDLTENVEQLQVRQSVALVRDRAVAALARLARLAAEHEATVMAGRSHNVAAQATTLGKRFATVADEMLVALDRVEDLLVRYPLRGIKGPMGTAQDMLDLLDGDAAKLAELEQRVAAHLGFERVLTSVGQVYPRSLDLDVVSALVQLVSGPSNLATTIRLMAGNELVTEGFKEGQVGSSAMPHKMNSRSAERVNGLSVVLRGHLSMVSELAGDQWNEGDVSDSVVRRVALPDAFFAADGLFETFLTILDEFGAFPAVIQRELDRYLPFLATTKVLMAAVRNGVGREAAHESIKEAAVGTALDMRRGQADNDVFARLAADTRLGLTSDQLASLVAEPITFTGAAVAQVQAVVRRVAEVTDRHPAAAAYAPGDIL

SEQ ID NO: 67262 - DNA, 1434 bp, Fusobacterium nucleatum subsp. vincentii ATCC 49256
  CDS (1)..(1434): transl_table=11
atgagtaatgaaatttattcaaacccactatgtgaaagatacagttcaaaagaaatgatgtataatttttcacctgataaaaaattttcaacttggagaaaactttggattgcacttgcagaatctgaaaaagaattaggacttaatatatcacaagaacaaattgatgaaatgaagaaaaatatctataatatagattatgaactagctgcaaaaaaagaaaaggaatttagacatgatgttatggctcatgtacatacatttggtacacaagcacctttggctatgcctataatacatttagggactacaagtgcttttgttggagataacacagatttaatccaaattaaagatggacttcaaattataaaaacgaaacttataaatgttatgaacaatttatctaaatttgcattggataataaaagtgtagcaactcttggatttacacattttcaagctgcccaacttactactgttggaaaaagagctacattgtggctacaatctttaatgttagacttagaagaattagagttcagagaaaaaactttaagatttcgaggagttaaaggaactactggtacacaagcaagttttaaagatttattcaatggagatttttcaaaagttgaagaactagatatcttagtttctaaaaaaatgggctttgataaaagatttacagtaacaggacaaacttatgatagaaaagttgattctgaaataatgaatttacttgcaaatatagctcaatctgctcataagtttaccaatgatttaagattattacaacatttaaaagaagttgaagaaccttttgaaaaaagtcaaattggttcatctgctatggcatataaaagaaatcctatgagaagtgaaagaatttcatctcttgctaaatttgttatagcattacaacaaagtacagctatggttgcttcaacccaatggtttgaaagaacacttgatgattcagctaataagagattgtctttaccacaagcatttttagcaatagatgcaatattaattatttggaataatattatggaaggtttggttgtatatgataaaataatagaaaaacatataatgagtgaacttccatttatggcaactgaatatataataatggaatgtgtgaaagctggtggagatagacaaaaattacatgaaagaataagggttcattctatggaagctggtagacaagtaaaagttgaagggaaagataatgatttaatagatagaattgttaatgatgattatttcaaattagataaagctaaattactttctattttagaacctaaaaactttattggttttgctcctgaacaaacagaaaagtttattgatatagaaataaaaccgatactaaaaaaatataaaaatcttttaggaatagattctgaattaaaagtatag

SEQ ID NO: 67263 - protein, 477 aa, Fusobacterium nucleatum subsp. vincentii ATCC 49256
MSNEIYSNPLCERYSSKEMMYNFSPDKKFSTWRKLWIALAESEKELGLNISQEQIDEMKKNIYNIDYELAAKKEKEFRHDVMAHVHTFGTQAPLAMPIIHLGTTSAFVGDNTDLIQIKDGLQIIKTKLINVMNNLSKFALDNKSVATLGFTHFQAAQLTTVGKRATLWLQSLMLDLEELEFREKTLRFRGVKGTTGTQASFKDLFNGDFSKVEELDILVSKKMGFDKRFTVTGQTYDRKVDSEIMNLLANIAQSAHKFTNDLRLLQHLKEVEEPFEKSQIGSSAMAYKRNPMRSERISSLAKFVIALQQSTAMVASTQWFERTLDDSANKRLSLPQAFLAIDAILIIWNNIMEGLVVYDKIIEKHIMSELPFMATEYIIMECVKAGGDRQKLHERIRVHSMEAGRQVKVEGKDNDLIDRIVNDDYFKLDKAKLLSILEPKNFIGFAPEQTEKFIDIEIKPILKKYKNLLGIDSELKV

SEQ ID NO: 67264 - DNA, 1449 bp, delta proteobacterium MLMS-1
  CDS (1)..(1449): transl_table=11
atgaaccatgaagtctatcaggaaccattggtcagccgttacaccagccccgagatgcagcggctcttttccgagcgcagtaaattttccacctggcgccgctgttggctcgccctggccgaagcccagcacgaactgggcctggatgacctggttacccgggccatggtcgaggaattgcgccagaataccgatgatatcgattttgccctggcggccgagaaggaaaaggagatccgccatgatgtcatggcccacgtgtacgcctacggccggcagtgccccaccgccgagcccattatccatctgggcgccacttcccagtttgtcggctgcaacaccgatctgctgctccagaaacaggccctggccctgatcaagcgctccttgctgcaaaccatggccaacctggcggccttttgtcgccaccataagggactggtcaccctgggttatacccactaccagccggcccagcccaccacggtgggcaagcgccataccctttatctccaggacctgctgatggatctggaagccatcgagtggctggaaggccagctcaaagcccggggcgccaagggcacggtgggcacccaggctactttcctggagctgtttggcggcgatcatcagaaagtgcgtcaactcgatgagctggtggccaagaaactgggttttacacgggtttttccggtcaccggccagacctatagccggaaactggattgcaagatcgccgagaccctggctgggattgccacctcggcccacaaattcgccgtcgatctgcgattgctctccaaccttaaggtccaggaagagccctttgagaagaaccaggtgggcagctcggccatggcttacaagcgcaaccccatgcgttcggagcggatgaccggtctggcccgcaaactgatgggcctggtaccggatttctacgccacctacgccaatcagtggttcgagcgcaccctggacgattcggcgatccgccgaatggatatcccccaggctttcctgttggccgatgcaatcttgaaattgtacattaatatcacatctgatatggttgtttatccgaaacaaattgagaaaatattgcgtcaggagctgccctttatggccaccgagaagatcctgatggccgccgtcgccaagggggccagccgtcagcagatgcatgaagtgatcaaggtccattcggtggccgccggcaaggtggtcaaggaggaaggcggtgacaacgacctgctggccaggttggcggccgatgaccgggttcccttttctttggccgaactcgaggagttgatggccaacccggccgaattcgccggccgtgccgaagcccagaccgaggatttcctgcgcgaggaggtggaaccccgcttggccgcttaccgggagcaactggcccacggggtggatagcagcctcaacgtttga

SEQ ID NO: 67265 - protein, 482 aa, delta proteobacterium MLMS-1
MNHEVYQEPLVSRYTSPEMQRLFSERSKFSTWRRCWLALAEAQHELGLDDLVTRAMVEELRQNTDDIDFALAAEKEKEIRHDVMAHVYAYGRQCPTAEPIIHLGATSQFVGCNTDLLLQKQALALIKRSLLQTMANLAAFCRHHKGLVTLGYTHYQPAQPTTVGKRHTLYLQDLLMDLEAIEWLEGQLKARGAKGTVGTQATFLELFGGDHQKVRQLDELVAKKLGFTRVFPVTGQTYSRKLDCKIAETLAGIATSAHKFAVDLRLLSNLKVQEEPFEKNQVGSSAMAYKRNPMRSERMTGLARKLMGLVPDFYATYANQWFERTLDDSAIRRMDIPQAFLLADAILKLYINITSDMVVYPKQIEKILRQELPFMATEKILMAAVAKGASRQQMHEVIKVHSVAAGKVVKEEGGDNDLLARLAADDRVPFSLAELEELMANPAEFAGRAEAQTEDFLREEVEPRLAAYREQLAHGVDSSLNV

SEQ ID NO: 67266 - DNA, 1464 bp, Mycobacterium leprae
  CDS (1)..(1464): transl_table=11
atgttcccgttttgcagtgcgaacccgaccgtaagctgtgcttctgtgagcattccgaatgttctagccgcccgatacgccagcgctgaattggtcgcgatatggtctccggaagccagggttatcgcggagcggcagttgtggctggccgtgctacgagcacaggcggaactgagtgttccgatgcctgttaaagcgatcgccgactacgagcgggtgcttggcgaggtcgatttggcttcgatcgccgcccgcgaacgtgtgttgcgtcacgacgtcaaggcgcgcatcgaggaattcaacgcgctggccggccatgagcaggtacataaggggatgaccagccgcgacttgaccgagaacgtggagcaactgcagatccggcggtcgttggaattggttttctgccatggtgtggccgtagtagcacggctggccgaatgcgcggtgtcctatcgcgacctggtgatggccggacgcagccataacgttgccgcgcaggccacgacattgggcaaacgcttcgcgtccgcgacgcaggaaacactgatagcgttgactaggctgcgcgagttgatcgaccgctacccactgcgcggtatcaagggcccgatgggtaccgggcaggacatgctcgacctgcttggcggtgacgctgcggcgctagcagaacttgagcaaagaatagctgaattcctaggattcacaaaggttttagccagtgtcgggcaggtatatccgcgttcactagaccacgatgtgatttcagcgttggtgcagctcggtgccggctcttcctcgttagcgcacaccatacggttgatggcaggtcacgagctcgttaccgaaggctttgcaccggggcaggttggctcgtcagcgatgccacacaagatgaacagccgcagctgtgaacgggtcaacggtctgcaggtggtgttgcgcggttacgccgcaatggcagccgaactagctggcgcgcagtggaacgagggcgacgttttctgctcagtagtacgtcgagttgctttgccagacagcttctttgccatcgacggccagatcgagacgtttttgacggtgctcgacgagtttggtgcttacccggcagtgatccgccgcgagctggaccgctatttgccattcctggccaccaccaaggtgctgattgcggctgtgcgtgctggtatgggtcgcgaggccgctcaccacgtgattcgcgaacacgcggtggcgacggcgctggccatgcgggagtgcggtgccgagcctgacctgctggaccggttggctgccgatgggcggttgccgctggaccgagcggcgctagacgccgcgctggccgacaagaaggcgttcaccggcgccgcggcagaccaggtagacgaggttgtcgcgatggtcgacaagctagtgggccgctacccggaagcagccaagtacacgccgggtgctatcctgtga

SEQ ID NO: 67267 - protein, 487 aa, Mycobacterium leprae
MFPFCSANPTVSCASVSIPNVLAARYASAELVAIWSPEARVIAERQLWLAVLRAQAELSVPMPVKAIADYERVLGEVDLASIAARERVLRHDVKARIEEFNALAGHEQVHKGMTSRDLTENVEQLQIRRSLELVFCHGVAVVARLAECAVSYRDLVMAGRSHNVAAQATTLGKRFASATQETLIALTRLRELIDRYPLRGIKGPMGTGQDMLDLLGGDAAALAELEQRIAEFLGFTKVLASVGQVYPRSLDHDVISALVQLGAGSSSLAHTIRLMAGHELVTEGFAPGQVGSSAMPHKMNSRSCERVNGLQVVLRGYAAMAAELAGAQWNEGDVFCSVVRRVALPDSFFAIDGQIETFLTVLDEFGAYPAVIRRELDRYLPFLATTKVLIAAVRAGMGREAAHHVIREHAVATALAMRECGAEPDLLDRLAADGRLPLDRAALDAALADKKAFTGAAADQVDEVVAMVDKLVGRYPEAAKYTPGAIL

SEQ ID NO: 67268 - DNA, 1527 bp, Phaeosphaeria nodorum
  CDS (1)..(1527)
atggcgataaacgcagacgcaaccctggacatccagcgccaaatcgccgacatgaagagcaaaatcggctccccggtattcgacacgtaccaaacgtctctaaccgggcgctactgctccaaggagatgtcgcagctgttcagccagcgctcgcgacacagcacgtggcgcaagctgtggctgtaccttgctgaggcggagaaagagctgggcattgagaacattagcgaagaggcgctgaaggagatgagagatcatcttgtggtgacggatgaggactttgaggttgcgagggtcgaggaaaagaagaggaggcatgatgttatggcgcatgtgcatgcgtttggacaggttgcgccgaaggcggcggggattatacattatggggcgacgagctgctatgtcaccgacaacgctgagctcatcctcatgcgcgatgccatggatctcctcctccccaaactcgcaaaggtcctctccaacctatccgcgtttgctatgcaatggaagtccgaacccaccctcgcctacacccatcttcagccagctcaactcatcaccgtcggcaagcgcgccgcccaatgggcccaggacctcctctttgacctcgaagccatagagcacgtccgtcaaggccttcagttccgcggtgcacaaggaaccactggaacccaagcctccttcctcgagatctttagcggcgactccaagaagtgcgaccagctcaacgagctgctgtgcaaaaagactggcttcccatcgtgctaccccatctctacgcagacgtacacccgcaaagtcgacctgctaatcgcctccgccatctccggactcggcgcaaccgcacaaaagatctctggcgacatccgccatctcgccgcatggaaagaagtcgaagagccctttgaaaaagaccaaatcggcagctctgccatggcatacaagcgcaaccccatgcgcagcgagcgcatctactcgctctcgcgcgaactcatgtccaagcccgcaagtttcgccaacacgctctcagaccaatggatggagcgcacgctcgacgacagcgccatccgccgcatcgacatccccgaaatgttcctgctcgccgacgccatcctgctctctctcgacaacgtcacttcaggcctagtcgtgtaccccaagcgcgtggacgcacgcgtccaggaagaactgcccttcatgatcaccgagagcatcatcatgcggctcgtggcgaagggcgagagtcgccaggaagcgcacgagcagatccgcgtgctgtcacacgaggcgggcagtcaggtgaagaacgagggcaagagcaatgatctcgtcgacagaatacgcacgacggagttcttcaagccgatttgggctgatttggacggcatgctggatgcgactttgtacacgggccgcagtgcggaaatcgtggagaagttctgcgggaagggaggcgagttggatagtaagctcgccaagtacagggaatatattgcaaaggcgggcgtggcggaactcaatgtgtag

SEQ ID NO: 67269 - protein, 508 aa, Phaeosphaeria nodorum
MAINADATLDIQRQIADMKSKIGSPVFDTYQTSLTGRYCSKEMSQLFSQRSRHSTWRKLWLYLAEAEKELGIENISEEALKEMRDHLVVTDEDFEVARVEEKKRRHDVMAHVHAFGQVAPKAAGIIHYGATSCYVTDNAELILMRDAMDLLLPKLAKVLSNLSAFAMQWKSEPTLAYTHLQPAQLITVGKRAAQWAQDLLFDLEAIEHVRQGLQFRGAQGTTGTQASFLEIFSGDSKKCDQLNELLCKKTGFPSCYPISTQTYTRKVDLLIASAISGLGATAQKISGDIRHLAAWKEVEEPFEKDQIGSSAMAYKRNPMRSERIYSLSRELMSKPASFANTLSDQWMERTLDDSAIRRIDIPEMFLLADAILLSLDNVTSGLVVYPKRVDARVQEELPFMITESIIMRLVAKGESRQEAHEQIRVLSHEAGSQVKNEGKSNDLVDRIRTTEFFKPIWADLDGMLDATLYTGRSAEIVEKFCGKGGELDSKLAKYREYIAKAGVAELNV

SEQ ID NO: 67270 - DNA, 1470 bp, Candidatus Kuenenia stuttgartiensis
  CDS (1)..(1470): transl_table=11
ttgcgtgacatttttatgacaacagatagccgctataagcaatatcaatctcctctttctgaaaggtatgcaagtaaagagatgtgctatatcttctcagaccattacaagttcagcacgtggagaaaactctggatagcgctcgccgaagcacagcatgaactaggattgcagactgttacagaagcgcaaatcagtgaaatgaaacgttttcaggataccattaattttgagatggcaagagaatacgaaaagaccctgcgacacgacgtaatgtctcacattcacgcatacggagaacagtgtcctgcggcaaagcccattatccaccttggtgcgacgagtgcttatgtacaggacaacacagacctgatccaaatgagggacgcactaaaccttctccttgcaaaactaattaatataataaaaatcctctctgaccaggcaatagcctataaagaagttgcggctttaagttttacccatttccaatctgcacagccaacaactctgggaaaacgtttttgcctgtggctgcaggattaccttttcgatatcgaagagattgaaaccagggttgagaaactgcgttttcttggcgcaaagggaacgaccggtacgcaagcaagttttatgttgctttttaataatgataccgaaaaggtcaggaaactagacgaacttgtaacaaaaaaaatgggattcgaccgcttttacccggtgacggggcaaacttacccgcgcaaaattgatagtcagataatgttttgcctggcaggcattgcacaatcatcatacaaattttccaatgatatccggttgttgcagcatatgaaggaagcggaagaaccgtttgagaaagaccaggttgggtcttccgcaatggcgtacaaaagaaatcccatgcgctgtgaacgaatagcggctcttgctcgttatgttctttgtaactgcttaaacccggcatttaccgcggcttcacaatggtttgaaaggacattggacgattctgccaataagcgaatttcaatcccggaggcatttcttgcagttgacggcatcttaaatattgtgctaaacgttgctgcaggattgaacatctatccacaggttattgccggcaatcttcaaaatgaattgccttttatggtcacggaaaatatacttatggaaatagtaaacgccggaggtgaccgacaggagtatcacgaaaggattcgaaaacacgcaatagcatccgcagagaggatgaaaaaagagggcgtcgaaaacgacctgctggaaagaatcgcagaagaccctgcctttttcagaatacgggcaaagatgggggagatttctgaccctcacaggcttaccggaagatccgtacagcaagtggaagagtttataacacaggtagtttcacccattttaaaacaaaatagccagcgtattgataaaaaattgataccaacgctgcacgtataa

SEQ ID NO: 67271 - protein, 489 aa, Candidatus Kuenenia stuttgartiensis
MRDIFMTTDSRYKQYQSPLSERYASKEMCYIFSDHYKFSTWRKLWIALAEAQHELGLQTVTEAQISEMKRFQDTINFEMAREYEKTLRHDVMSHIHAYGEQCPAAKPIIHLGATSAYVQDNTDLIQMRDALNLLLAKLINIIKILSDQAIAYKEVAALSFTHFQSAQPTTLGKRFCLWLQDYLFDIEEIETRVEKLRFLGAKGTTGTQASFMLLFNNDTEKVRKLDELVTKKMGFDRFYPVTGQTYPRKIDSQIMFCLAGIAQSSYKFSNDIRLLQHMKEAEEPFEKDQVGSSAMAYKRNPMRCERIAALARYVLCNCLNPAFTAASQWFERTLDDSANKRISIPEAFLAVDGILNIVLNVAAGLNIYPQVIAGNLQNELPFMVTENILMEIVNAGGDRQEYHERIRKHAIASAERMKKEGVENDLLERIAEDPAFFRIRAKMGEISDPHRLTGRSVQQVEEFITQVVSPILKQNSQRIDKKLIPTLHV

SEQ ID NO: 67272 - DNA, 1497 bp, Aspergillus oryzae
  CDS (1)..(1497)
atgtccgcaaacgatgtttaccagacccctctcaactcgcgttatgcgagcgatgagatgaaataccttttctctccgagaaaccgtttctccacctggagaaagctctggctgtggcttgctgagtccgagaaagagctcggcttgtctatctccgatgatgccattgagcagatgaaggcccaccttaccattcaggacgaagagttcaaggttgctgctgaggaggaaaagcgccgcaggcacgatgtcatggctcacgtccatgcttacggtcaggtcgcgcccgccgccgctggcatcattcactggggtgccacttcgtgctactgcacggacaatgcggatctgatcttcctccgtgacggtctcgatatcctcattcccaagcttgctgttgtcatcgacaagctgtccgcgttcgctcagcagtataaggacttgccttgccttggtttcactcacggccagcccgctcagcttgtcactgtcggaaagagagcctgtctctggatccaggacttgctcatggatttgaggaacttggagagggcccgtgatgacttgcgcttccgtggtgtcaagggtaccaccggtactcaggcttctttcctccagatcttcgacggagaccactccaaggttgaacagctggacgagcttgtcacccagaaggctggcttcgattccgcattcatcatctccagtcagacctactctcgaaagattgacgttgacgttggcaacgccctgggctcttttggatccacctgcgagcgcatcggcattgacatccgccatttggctatgcttaaggaggttgaggagcctttcgagaaggatcagatcggcagcagtgccatggcttacaagcgcaaccccatgcgttctgagcgtctatgctctctcggaagacacctccagaacctccccaaggatgcgttagacacctactccgcgcagtggttcgagcgttctttggtaaggcaatactccttctccgaagaactctttcctaacaatcaccaggacgacagcgccatccgtcgtatcagcattcccgaactttacctctctgccgatgcttgtctcattctcctgaacaacgtcacctccggcttcgttgtctaccccgaagtcatcaagcgtcgtgtcaatgacgaactcccgttcatggccactgagaacattatcatggcctgcgtcaagaagggtctctcccgccaggatgcccacgaggagattcgtgtcctctcccaccaggcagcagacaacgtcaagaagcacggcaaggacaatgacctgctcgagcgcatccgccgcaccgaattcttcaaccccatcttaggcgaacttgacaccctcctcgagcctagcacctttgtcggccgtgctccccagcaagtcgagaaattcacctccactgaggtcaagaaggccctcgagccatatgccgctgccgttgccaaggctgagacctctacgctcagcgtttaa

SEQ ID NO: 67273 - protein, 498 aa, Aspergillus oryzae
MSANDVYQTPLNSRYASDEMKYLFSPRNRFSTWRKLWLWLAESEKELGLSISDDAIEQMKAHLTIQDEEFKVAAEEEKRRRHDVMAHVHAYGQVAPAAAGIIHWGATSCYCTDNADLIFLRDGLDILIPKLAVVIDKLSAFAQQYKDLPCLGFTHGQPAQLVTVGKRACLWIQDLLMDLRNLERARDDLRFRGVKGTTGTQASFLQIFDGDHSKVEQLDELVTQKAGFDSAFIISSQTYSRKIDVDVGNALGSFGSTCERIGIDIRHLAMLKEVEEPFEKDQIGSSAMAYKRNPMRSERLCSLGRHLQNLPKDALDTYSAQWFERSLVRQYSFSEELFPNNHQDDSAIRRISIPELYLSADACLILLNNVTSGFVVYPEVIKRRVNDELPFMATENIIMACVKKGLSRQDAHEEIRVLSHQAADNVKKHGKDNDLLERIRRTEFFNPILGELDTLLEPSTFVGRAPQQVEKFTSTEVKKALEPYAAAVAKAETSTLSV

SEQ ID NO: 67274 - DNA, 1398 bp, Borrelia hermsii
  CDS (1)..(1398): transl_table=11
atggatcaatatataaaccctttaaaatcaagatatgccagtaaagcaatgctttacattttttcaccaaaatttaagtacaccacatggagaaagctatggtacaacttagctttagtgcaaaaagaattgggaatagatattagcaataatcaactcaataatttatccaaacacattgaagatattgattttgaacttgtagaaaaatatgaggcaaaatttaaacatgaagtcatggcacatctttatgcttatgccgacttagctggtgatgatgctagaaaaattctacaccttggtgttacaagtgcatatttaatggataacacagacttaatccaaatcaaagaagctctattacttattgaaagtaaactgataaaacttattaaaactttaagagaattttcaataaaacataaagatttggcaacacttgcatatacacatctacaagaagcacaattaacaactcttggaaaaagaagtagcttatggcttcaaagtttgatttttgactttcaagaacttaagttcattatgtctaacatgtgctttagaggagtaaagggaactattggaaatcaaaatagctttaaagaactgtttgcatctaactttgaaaagagcaaaagccttagacatcaatcttgcaaaaaaatggggtttgacaaagtttataaaatgactagtcaaacttatgatcgcaaatttgattcatcaatattaaattttttaagcaatttagctcaaagtgcacataagattactaatgatatcaggttcatgcaacatcttaaagaacttgaagaacattttgcagagcaccaaataggttcatctgcaatgccttacaaaaaaaaccctatttacagtgaaagagtagcttcccttgctaagtttacaatgagcctacaatcaagtggcggatttatagctgcaactcaatggcttgagagaactctagatgattcagcttgcaaaagactaaacattcctcaagcattcttagctactgatgctgccctgatattactagataaaatattcaacaatatcagggtaaacaaaaaaataattgaaaaccatgttaaaacagaaatgccatttatattaacagaagacatattaatgaaagcaacaaaaaatggtggggatagacaaatattacatgaaaagataagaatttattcaatgcaagtaagggaaaatctttattcaggggcaactgagaacggcttaattaaactaatccttaacgataaaagttttagattaacatacataaagaacatagatgaaatcttaaatccaaatgaaaatataggttatgcctcataccaagttgaagatttcattaaagaaataattgatcctattcttaaaaataaataa

SEQ ID NO: 67275 - protein, 465 aa, Borrelia hermsii
MDQYINPLKSRYASKAMLYIFSPKFKYTTWRKLWYNLALVQKELGIDISNNQLNNLSKHIEDIDFELVEKYEAKFKHEVMAHLYAYADLAGDDARKILHLGVTSAYLMDNTDLIQIKEALLLIESKLIKLIKTLREFSIKHKDLATLAYTHLQEAQLTTLGKRSSLWLQSLIFDFQELKFIMSNMCFRGVKGTIGNQNSFKELFASNFEKSKSLRHQSCKKMGFDKVYKMTSQTYDRKFDSSILNFLSNLAQSAHKITNDIRFMQHLKELEEHFAEHQIGSSAMPYKKNPIYSERVASLAKFTMSLQSSGGFIAATQWLERTLDDSACKRLNIPQAFLATDAALILLDKIFNNIRVNKKIIENHVKTEMPFILTEDILMKATKNGGDRQILHEKIRIYSMQVRENLYSGATENGLIKLILNDKSFRLTYIKNIDEILNPNENIGYASYQVEDFIKEIIDPILKNK

SEQ ID NO: 67276 - DNA, 1404 bp, Borrelia miyamotoi
  CDS (1)..(1404): transl_table=11
atggatgaatatataaatcccctaaaatcaagatatgcaagtaaaaaaatgctttacattttttcaccaaaatttaaatatactacatggagaaaattgtggtacaacttagctttagtccaaaaagaattaggaatagatattagcaaaaaacaacttgataaattatctaaacatattgaaaacattgattttgagattgtaaaaaaatatgaggaaaaatttcaacatgaaatcatggcacatccttatgcttatgctgacttagttggcgacgatgctagaaaaattttacaccttggcgttacaagtgcatatttaacagataacacagacttaatccaaatcaaagaagctctattgatcatcaagaataatctaataaaattcattaaatctttaaaagaattctcaacaaagcataaaaacctgacaactcttgcatatacacatctacaaaaagcacaattgacaactcttgggaaaagaagtagcttatggcttcaaagtctaatttttgactttgaagaactcaatttcattctatccaatatgtgtcttagaggagtcaagggaacagttggaaatcaaaacagctttaatgaattgttttcgtctaactttgaaaaggtaaaaaatctagacattagtctagcaaaaaaaatgggatttaacaaagtttataaagtaactagtcaaatctacgaccgtaaatttgatgcatcaatattaaattttttaagcaacctatctcaaagtgcacacaaaatcactaatgacattagattcatgcaacatcttgaagagattgaagaacattttgaaaaaaaccaaataggttcatcagcaatgccttataaaagaaaccctatttatagtgaaagagtagcttcccttgctaagtttatcatgagtctacaatcaagtggtggatttatagcggcaacgcaatggcttgagagaactctagacgattcagcttgcaagaggatcaatattcctcaagcattcctagccgctgatgctattttaatattattaaataaaatatttaataatattagagtaaacaaaacaataattgaaaaacatgtcaaaaaagaaataccatttatattaacagaagacatattgatgaaagcaacaaaaaatggtggtgatagacaaatattacatgaaaagataagaatttattcaatgcaagtaagagaaaatcttacttcaaaaacaactgaaaacgacttaattaaactaatcctcaatgatgaaagctttaaattaacacctaaagatatagatgaagttttaaatccaaatgaaaatataggttttgcatcattgcaagtcgaagactttattaaagagacagttgatcctattcttgaaaaaaataagaaatactag

SEQ ID NO: 67277 - protein, 467 aa, Borrelia miyamotoi
MDEYINPLKSRYASKKMLYIFSPKFKYTTWRKLWYNLALVQKELGIDISKKQLDKLSKHIENIDFEIVKKYEEKFQHEIMAHPYAYADLVGDDARKILHLGVTSAYLTDNTDLIQIKEALLIIKNNLIKFIKSLKEFSTKHKNLTTLAYTHLQKAQLTTLGKRSSLWLQSLIFDFEELNFILSNMCLRGVKGTVGNQNSFNELFSSNFEKVKNLDISLAKKMGFNKVYKVTSQIYDRKFDASILNFLSNLSQSAHKITNDIRFMQHLEEIEEHFEKNQIGSSAMPYKRNPIYSERVASLAKFIMSLQSSGGFIAATQWLERTLDDSACKRINIPQAFLAADAILILLNKIFNNIRVNKTIIEKHVKKEIPFILTEDILMKATKNGGDRQILHEKIRIYSMQVRENLTSKTTENDLIKLILNDESFKLTPKDIDEVLNPNENIGFASLQVEDFIKETVDPILEKNKKY

SEQ ID NO: 67278 - DNA, 1446 bp, Drosophila melanogaster
  CDS (1)..(1446)
atggctagcaactacgagggctacaagtcgccgctgagcacccggtacgccagcaaagagatgcagttcctcttcagtgaccagaacaagttctccacctggcgccggttgtgggtgtggctggcgaaggcggagagcaggctgggactagagatcagcgatgcccagattgccgagatggagctccagatcagcaacatcgactttgaggcggccgccgccgaggagcgacttacgcgccacgacgtaatggcccacgtccatgtctttgccaaacagtgtccctctgctgcgccggtgatccatttgggagcaacctcgtgctatgtgggcgacaacactgatctgattgtactgagggacgctcttaaactgctccttccacgagtcgccagcgtgatagctcgtctaagccagtttgcccagagctacaaggatcagcccacgttgggattcacccatctccagcctgcgcagttgaccacggttggcaagcgggcgtgcctgtggatccaggatctgatcatggacgaacgcgcgctgtcccgctgtttagaggacctgcgcttccgtggagtcaagggaattactggtacccaggcctcgttcctgcaacttttcaatggggatggcgagaaggtgaagcagctggatcagttggtcaccgaactggctggcttcaagaaggcctatgcggtaaccggtcaaacatactcccgaaaggtggatgtggagatcgtggccgcgcttgccagtctcggcaccaccatccacaagatgtgctccgatctgcgcatcctcgcttctcgcaaagagctggaggagcccttcgagagcactcagattggctcctcggccatgccgtacaagaggaaccctatgcgctcggagcgttgttgcgccctggcccgtcacctcatcaccttgttcagcagtgctgctaatacacatgccactcagtggctggaacgcactctggatgactctgccaacaggaggttgaccctatccgaggccttcctggctgcagatgccgccctgcttactctgctgaacatctcgcagggactggtcgtttacccaaaggtgattgaacggcacatttcccaagagctgccgttcatgtccacagagaacataatcatggccatggtgaaggcgggaggagatcgccaggtgtgccacgagaagattcgcgtgctgtcccaggaggccggagcccaggtgaagcagcatggcaaggacaacgacctcgtggttcgagtgcgaaaggatccctacttttcgcccatcctggagcaactggacaccatactggatgccaaaacctttactggacgtgccagcgaccaagtgggcgagttcgtcaaggaggaagtggaacccgtgctggcacgctactccgaagccctgaagaacgttcaagacgtcaaactgaacatctag

SEQ ID NO: 67279 - protein, 481 aa, Drosophila melanogaster
MASNYEGYKSPLSTRYASKEMQFLFSDQNKFSTWRRLWVWLAKAESRLGLEISDAQIAEMELQISNIDFEAAAAEERLTRHDVMAHVHVFAKQCPSAAPVIHLGATSCYVGDNTDLIVLRDALKLLLPRVASVIARLSQFAQSYKDQPTLGFTHLQPAQLTTVGKRACLWIQDLIMDERALSRCLEDLRFRGVKGITGTQASFLQLFNGDGEKVKQLDQLVTELAGFKKAYAVTGQTYSRKVDVEIVAALASLGTTIHKMCSDLRILASRKELEEPFESTQIGSSAMPYKRNPMRSERCCALARHLITLFSSAANTHATQWLERTLDDSANRRLTLSEAFLAADAALLTLLNISQGLVVYPKVIERHISQELPFMSTENIIMAMVKAGGDRQVCHEKIRVLSQEAGAQVKQHGKDNDLVVRVRKDPYFSPILEQLDTILDAKTFTGRASDQVGEFVKEEVEPVLARYSEALKNVQDVKLNI

SEQ ID NO: 67280 - DNA, 2203 bp, Pichia angusta
  CDS (716)..(2203)
aggatctgtcccgacgatgtttatggctccttggaagcagattttgtttcggctatgcagcagaaaagtatctctttacacaagggcagagttgtcaagctagagccacgaagcagtgaggatggacgactgggcagggcaattcttgacgacggcaccgcgatcgagctcgatgtgctctacacgattccaccttcaaccatcaacaataaggagattattaccaagctgggcgttgaattggacgagatgggacttattaaagtctctccccagcagaagacgaacgtggagggcgtttttgcaatcggtgacaacactacccgcatgagagcactggcctttgtagttggccagggtatgcttgcagcatcctccatttgtcatgaaatcctacacgagcgctggaacgcgtaagttagtggtccctttaagatatcggagtgagatttttcagtgtctagtctaactttaatttttcttgttatttgattgtcgttcatcgagttgaagagattttaaggaaatgaaaatgtccctccatataaaatgatccttccagcatccaaagcgtagacgaagctatcagccctgtggactgatttgtaagagaaatggcacccccttgtcctatatctcgcacctatagtgccccctcgtagcacccccaccttgtgccccacagttaccttttggaccggaatacatttccaatatgcagagtcaaattaatttaattaatttttatttttctaccatgtccaacgacacctatgccaccccgctgtcgtcgcggtacgcgtccaaggagatgtcgcagatcttctctctgcggaacaggttctccacgtggagaaagctgtggtacaacttggcaattgccgagaaatcgctggggctttctgtcgtcaccgatgaagctatcgagcagatgtccaagcacctcgaaatcacggacgaggaaatcgaggccgccaaaaaggaggaggccattgtcagacacgacgtgatggcccacgtccacgttttcggcgaaacctgtcctgctgctgccggaatcatccatttgggagccacctcgtgctacgttacagataacgcggatctgatttttctcagggacgcgtacgacgttttgatccccaaacttgtgaatgttatcaacagactggccaaatttgctctggaccacaaagacctgccagtgcttggctggactcatttccagcccgcccagctgacgactgtcgggaaaagagcaactctgtggctccaagagctgctctgggacctcagaaacatgcagcgtgccagaaatgacatcggactgcgcggagtcaagggaactaccggtacccaggcctctttcctgtctcttttccacggagaccatgacaaggtcgaggccttggacgaaaaggtggtggagctactaggattcgagtacgcgtacccttgcacggggcagacctactcacgtaaaatcgacatcgacgccctgcacccactatcgtctttgggcgcctcgtgtcacaagatggccaccgatataagattgctggccaacctaaaagaaatggaagagccgtttgaaaaaagccagatcgggtcgtctgccatggcctacaaaaggaacccgatgaggtgcgagcgtgtgtgttcgctgtcgcgtcacttgggttcgttgtaccaggacgcattccagacggcgtccgtgcagtggtttgagagaacgctggacgactctgccatcagaagaatctcaattccagaggcttttctgacggcagacattttgctttcgacgctgctgaatattacttccggcctcgtggtgtacccgaaagtgattgagcgccgtattaaggcagaactgcccttcatggcgaccgagaacatcatcatggcgatggtggagcagggtgcttcgcggcaggagtgccacgaggagatccgcgtgctctcgcaccaggcatcggcagtggtcaagcaggaaggcggcgacaacgacttgattgagagaattaagagcacagactacttcaagcctatttggtcgcaattggacaaattactcgacccgtccacttttgttggtcgtgccccacaacaaactgaaaaattcgtaaacgtcactgttgcaaacgcactggaaccataccggtcgcttatcaacgaggagcacgttcaattggccgtctag

SEQ ID NO: 67281 - protein, 495 aa, Pichia angusta
MQSQINLINFYFSTMSNDTYATPLSSRYASKEMSQIFSLRNRFSTWRKLWYNLAIAEKSLGLSVVTDEAIEQMSKHLEITDEEIEAAKKEEAIVRHDVMAHVHVFGETCPAAAGIIHLGATSCYVTDNADLIFLRDAYDVLIPKLVNVINRLAKFALDHKDLPVLGWTHFQPAQLTTVGKRATLWLQELLWDLRNMQRARNDIGLRGVKGTTGTQASFLSLFHGDHDKVEALDEKVVELLGFEYAYPCTGQTYSRKIDIDALHPLSSLGASCHKMATDIRLLANLKEMEEPFEKSQIGSSAMAYKRNPMRCERVCSLSRHLGSLYQDAFQTASVQWFERTLDDSAIRRISIPEAFLTADILLSTLLNITSGLVVYPKVIERRIKAELPFMATENIIMAMVEQGASRQECHEEIRVLSHQASAVVKQEGGDNDLIERIKSTDYFKPIWSQLDKLLDPSTFVGRAPQQTEKFVNVTVANALEPYRSLINEEHVQLAV

SEQ ID NO: 67282 - DNA, 1440 bp, Corynebacterium ammoniagenes
  CDS (1)..(1440): transl_table=11
atgaagcccgtggctgataagaagaagatttccaacgttttgtcctcgcgttacgcctctgcagagttatccaacttgtggagcccggaacacaaaatcatcatggagcgccagctctggatcgcggtcatgcgcgcccagaaagacctcggcgttgacattccatctgaagcaattgacgcatacgaagcagtcattgaccaggtagacctaggttccatcgcggatcgtgagcgcgtgacgcgccatgacgtgaaagctcgcatcgaagaattcaacgcgctggctggtcatgagcacattcacaagggcatgacctcccgtgacctgacggagaacgtcgagcagctgcaaatctaccgctccctggagctcattcgtgataaagccatcgcggtttgcagcgcgcatttggtgagcaccgccgcgaaataccagactttggtcatggcgggccgctctcacaacgttgccgcgcaggcgaccaccttgggtaagcgtttcgcatcggctggtgatgaaatgctgctcgccattgagcgcgtagaaaacctccttgcccgctacccactgcgcggcatcaagggaccaatgggcacttcccaggacatgctggacttgatgggcggcgacgaaaacaagctcgcagcgctcgaaaccgacatcgcggaccacttgggctttgcccgcgtgttcaactcggtgggccagatttacccacgcacccttgattttgatgcggtttccgcgctggttgagctgggtgcctcgccatcgtctctggctaccaccatccgcttgatggccggcaacgaaaccgtcaccgaaggtttcaaggaaggccaagttggctcttccgcgatgccgcacaagatgaatgcccgctcctgcgaacgcgtcggtggcctccaggttatcttgcgcggctacctgactatggttgcagaccttgctggtcagcagtggaacgaaggcgacgtattctgctcggtggttcgccgtgtagccctgccggacgctttcttcgccatcgatggccagtttgaaaccttccttaccgtgttggatgagttcggcgcattcccagcaatgatcgaccgcgaactcgagcgctacctgccattcttggccaccacccgcatccttatggctgcggtgcgcgcaggcgttggccgcgaaaccgcacacgaagtcatcaaggaaaacgcagtggctgttgcgctgaacatgcgcgaaaacggcggggaacaagacctactggagcgccttgctgccgatgagcgcctgcccatgagcaaggaacagctcgaagaagcactcgctgacaagcacgcgtttatcggcgctgctgaatcccaggtagatgcagttcttagacgcattaaggaactcgcggaccagcatccgaagcgggcctacaccccaggcgaaatcttgtaa

SEQ ID NO: 67283 - protein, 479 aa, Corynebacterium ammoniagenes
MKPVADKKKISNVLSSRYASAELSNLWSPEHKIIMERQLWIAVMRAQKDLGVDIPSEAIDAYEAVIDQVDLGSIADRERVTRHDVKARIEEFNALAGHEHIHKGMTSRDLTENVEQLQIYRSLELIRDKAIAVCSAHLVSTAAKYQTLVMAGRSHNVAAQATTLGKRFASAGDEMLLAIERVENLLARYPLRGIKGPMGTSQDMLDLMGGDENKLAALETDIADHLGFARVFNSVGQIYPRTLDFDAVSALVELGASPSSLATTIRLMAGNETVTEGFKEGQVGSSAMPHKMNARSCERVGGLQVILRGYLTMVADLAGQQWNEGDVFCSVVRRVALPDAFFAIDGQFETFLTVLDEFGAFPAMIDRELERYLPFLATTRILMAAVRAGVGRETAHEVIKENAVAVALNMRENGGEQDLLERLAADERLPMSKEQLEEALADKHAFIGAAESQVDAVLRRIKELADQHPKRAYTPGEIL

SEQ ID NO: 67284 - DNA, 1335 bp, Archaeoglobus fulgidus
  CDS (1)..(1335): transl_table=11
atgatagttcaccccatcgattaccgctacggcacccccgaaatgaagaggatttggagcgaggatagcaagatcaagaggatggtaagggttgaaatggctcttctacgcgctcttgcaaaaaaaggatacctcagcgaagaggaggccaaagaggccaaaaagaaggcttacagcgtaacaccagagagagtgaaggaaattgaggcagagataaagcacgacataatggcgctggtaaaggccattaccgaggccaccggatgcaggtgggttcacttcggagccacatcaaacgacataatcgacacagcaacggctttgcagctaagggacagtttgaaaatcctcgaggttaaaataaagcgccttgcgaaggttcttgcggacaaagccttagaatataaggacgtggtctgcctcggcagaactcacggtcaggcggctttgcccacaacctacggcttcagattcgccctgtgggcggctgaggttgcaaggcactacatcaggctgcagcagatgaaggacaggcttctcgtagggcagatgagcggggcagtgggaacacaggccgccttcggcaaagacggcttcgagatagaggaggaggttatgaggctgctgaaccttaaaccggctctgatttcaagccagataatacccagggactcctactgcgagtacctcgagtttctcgcaaatcttgctgcaacactcgaaaagattgctctgaacttcagactccttcaaagagctgaagttggagagttgatggaaaaattcgaggccaagcaggtcggaagctccacgatgccccacaaaaggaacccaatagactgcgagaatgtttgcggcttggcgagggtcgtgagggggttcgtggagcctcagcaccagtcggcaattctgtgggaggagagagaccttacaaactcctcggcggagaggataacccttgttgagtcaacggttctggcggaccacattctaacgaagatgataaaggttgtttccagcgttagtctcaacctcgagaacatcaggaggaatcttgagatgcagagggggctcaacctgagcgaggcggtgatgatagagatgacgaaaagaggggtggggaggcaggaggcgcacgagattctcaggcaggcggcgatgagggcttacgagaacaattcatcgcttcttgacgagcttttgaaagacgagagagttatgaagtacttcaaagaggatgagcttagggagattctgaaacctgaaaattatctggggactgcaagggaaagggtcgagagggttgtgagatgggtgaacgaggtgttgaaatga

SEQ ID NO: 67285 - protein, 444 aa, Archaeoglobus fulgidus
MIVHPIDYRYGTPEMKRIWSEDSKIKRMVRVEMALLRALAKKGYLSEEEAKEAKKKAYSVTPERVKEIEAEIKHDIMALVKAITEATGCRWVHFGATSNDIIDTATALQLRDSLKILEVKIKRLAKVLADKALEYKDVVCLGRTHGQAALPTTYGFRFALWAAEVARHYIRLQQMKDRLLVGQMSGAVGTQAAFGKDGFEIEEEVMRLLNLKPALISSQIIPRDSYCEYLEFLANLAATLEKIALNFRLLQRAEVGELMEKFEAKQVGSSTMPHKRNPIDCENVCGLARVVRGFVEPQHQSAILWEERDLTNSSAERITLVESTVLADHILTKMIKVVSSVSLNLENIRRNLEMQRGLNLSEAVMIEMTKRGVGRQEAHEILRQAAMRAYENNSSLLDELLKDERVMKYFKEDELREILKPENYLGTARERVERVVRWVNEVLK

SEQ ID NO: 67286 - DNA, 1353 bp, Pyrococcus abyssi
  CDS (1)..(1353): transl_table=11
atggcggttcaccctatagattatcgctacggtagcgaggaaatgaggagggtctgggaagaggaaaacaaactgcagaaactcctcgatgttgaagcggctttggctagggcccatgcaaaactcggaaacattccggaggaaagcgctagggtgatatcggaaagggcaaacacgaaatgggttaagcttgagagggtcaaggagatagaggctgaaattcaccacgatataatggccgtagtaaaagccttaagtgaggtctgcggggagcatggaaagtacgtccaccttggcgctacgtcaaatgacataatagacacggccaacgcacttctcataaaggagagtcttgccatagttgagaaggatttaaaggagctcagatctatattgaaggaactcgccaagaagcatatagataccgtatgcatagggagaacacatggacaacatgctgttccaacgacgtatggaatgaagttcgcactatggttggacgagatacagagacatatagagagacttcagcaacttaaggatagggttcttgtgggaaaaatgagaggtgcagtaggaacggcggcatcctttggagacaaggccttcgagatagagaaactcgtcatggaagatctaggcttaaagccagctaggataactaaccagataattcaaagagacgtgtacgctgaactgatgttcttcctagcattggtggcctcaaccctcgacaagatggctttggagataaggaacttgcagagaactgagatattggaggtaagcgagcccttcggggagaagcaagttggctcatcaaccatgccccacaagaggaacccgataagaactgagaaagtgtgcgggctcgccagggttctttactctaacgttattcctgccttacttaacaatcccctctggcacgaaagggatttaactaactcctcagtagagagggtaattctcccagaaagctttgttttgctcgatgaaatgctcaaggtcatgaagaaggttctcaaaggactagagttcttcccggagaacattaagaggaacctctatttaaccaagaacctgattatggccgagcctttgatgcttaagcttgccgagaaaggaatgggaagacaggaggctcacgaattggttagacagcttgctatgaaagcgtttaaagagggaagggatttgctcgaggttgttaggaaaaacgaggaagcgatgaaatatctcacagaaaacgatctagaaggcctaaaacctgaaaattacataggaaaagcaagagaaatcgtcgaaaacgttgttaattacgttgaagaaatggaaaggagaggtttatag

SEQ ID NO: 67287 - protein, 450 aa, Pyrococcus abyssi
MAVHPIDYRYGSEEMRRVWEEENKLQKLLDVEAALARAHAKLGNIPEESARVISERANTKWVKLERVKEIEAEIHHDIMAVVKALSEVCGEHGKYVHLGATSNDIIDTANALLIKESLAIVEKDLKELRSILKELAKKHIDTVCIGRTHGQHAVPTTYGMKFALWLDEIQRHIERLQQLKDRVLVGKMRGAVGTAASFGDKAFEIEKLVMEDLGLKPARITNQIIQRDVYAELMFFLALVASTLDKMALEIRNLQRTEILEVSEPFGEKQVGSSTMPHKRNPIRTEKVCGLARVLYSNVIPALLNNPLWHERDLTNSSVERVILPESFVLLDEMLKVMKKVLKGLEFFPENIKRNLYLTKNLIMAEPLMLKLAEKGMGRQEAHELVRQLAMKAFKEGRDLLEVVRKNEEAMKYLTENDLEGLKPENYIGKAREIVENVVNYVEEMERRGL

SEQ ID NO: 67288 - DNA, 1449 bp, Schizosaccharomyces pombe
  CDS (1)..(1449)
atggaggattatggttcatatagtacaccattgacagcaagatatgcttctgctgaaatgtctcatctcttttcaagagaaatgcgtattaatacttggagacaattgtggttgaatctcgccattgctgaaaagcaactcggtttaactcaaattactgatgaagctattgagcaacttaaagcgcatgtcaaaattacagctccagaatttgaaatcgctgctaaggaagagaagcgtcagagacacgatgttatggctcacatctatacatatggtcttgctgctcctgctgcttctggtattattcatttgggtgctactagctgttttgtaaccgataatgctgacttgattttcttacgcagcgccatggatcttttgatccctaagttagtcaacgttatcaatcgtcttagccagtggtctttgcgatacaaagacattcctactcttgggtttacacattatcaaccagctcaattaactaccgttggtaagcgtgccactctttggattcaagagcttttatgggatttgagaaattttgtaagagctagaaatgacattggtttccgtggtgtcaagggtaccaccggcactcaggcttccttcttagccctttttgagggcgatcatgccaaggttgaggaattggataaattggttgccaagctttccggttttgataacgtttatcctgtaaccggccaaacctatgatcgtaagatcgatattgacgttttgcaaccattagcttctttcggtgctactgctcataagattgcaactgatatccgtctccttgctaatttgaaagaagtagaagagccatttgaggctggtcaaattggcagttctgctatggcttacaagcgtaatccaatgcgttgtgaacgtatttgttctcaagctcgttatattatgaacttgattcctaatgctcttaatactgcttctgttcaatggtttgagcgtactttggatgatagctctaaccgtcgttctctgttacctgaagccttcttgtttacagatagcgttcttaagattctattgaacgttatttctggtatggtcatttatcctaaggttattcaaaaacacattcgtgctgaattgcccttcatggccactgaaaacattatcatggctatgactaagcacggtgctagtcgtcatgagtgtcacgagcagattcgtgtcttgtctcatcaagctggccgagtagtcaaggaagagggaggggataacgacttaattgagcgtattaagaatactccttattttgctcctatttatgatgagctagattctttgttggatgcatccacttttgttggacgtgctcccgagcagactgaatcctttgtaaataaggacgtctctcaagcgcttgcgcctttcaagagcatgatcactgaggaaaaggttgatcttgccgtttaa

SEQ ID NO: 67289 - protein, 482 aa, Schizosaccharomyces pombe
MEDYGSYSTPLTARYASAEMSHLFSREMRINTWRQLWLNLAIAEKQLGLTQITDEAIEQLKAHVKITAPEFEIAAKEEKRQRHDVMAHIYTYGLAAPAASGIIHLGATSCFVTDNADLIFLRSAMDLLIPKLVNVINRLSQWSLRYKDIPTLGFTHYQPAQLTTVGKRATLWIQELLWDLRNFVRARNDIGFRGVKGTTGTQASFLALFEGDHAKVEELDKLVAKLSGFDNVYPVTGQTYDRKIDIDVLQPLASFGATAHKIATDIRLLANLKEVEEPFEAGQIGSSAMAYKRNPMRCERICSQARYIMNLIPNALNTASVQWFERTLDDSSNRRSLLPEAFLFTDSVLKILLNVISGMVIYPKVIQKHIRAELPFMATENIIMAMTKHGASRHECHEQIRVLSHQAGRVVKEEGGDNDLIERIKNTPYFAPIYDELDSLLDASTFVGRAPEQTESFVNKDVSQALAPFKSMITEEKVDLAV

SEQ ID NO: 67290 - DNA, 25 bp, Artificial sequence
  primer
atgcctgactatgacaattacacta

SEQ ID NO: 67291 - DNA, 27 bp, Artificial sequence
  primer
ctaaacatttaacttgacttgttcatc

SEQ ID NO: 67292 - protein, 503 aa, Artificial sequence
  consensus sequence
  Variant (2)..(3): Xaa in position 2 to 3 is any amino acid
  Variant (6)..(6): Xaa in position 6 is any amino acid
  Variant (8)..(8): Xaa in position 8 is any amino acid
  Variant (11)..(14): Xaa in position 11 to 14 is any amino acid
  Variant (16)..(23): Xaa in position 16 to 23 is any amino acid
  Variant (25)..(25): Xaa in position 25 is any amino acid
  Variant (28)..(36): Xaa in position 28 to 36 is any amino acid
  Variant (39)..(63): Xaa in position 39 to 63 is any amino acid
  Variant (64)..(73): Xaa in position 64 to 73 is any or no amino acid
  Variant (75)..(77): Xaa in position 75 to 77 is any amino acid
  Variant (82)..(82): Xaa in position 82 is any amino acid
  Variant (84)..(97): Xaa in position 84 to 97 is any amino acid
  Variant (98)..(100): Xaa in position 98 to 100 is any or no amino acid
  Variant (102)..(102): Xaa in position 102 is any amino acid
  Variant (104)..(104): Xaa in position 104 is any amino acid
  Variant (107)..(111): Xaa in position 107 to 111 is any amino acid
  Variant (113)..(135): Xaa in position 113 to 135 is any amino acid
  Variant (136)..(136): Xaa in position 136 is any or no amino acid
  Variant (138)..(140): Xaa in position 138 to 140 is any amino acid
  Variant (142)..(150): Xaa in position 142 to 150 is any amino acid
  Variant (152)..(153): Xaa in position 152 to 153 is any amino acid
  Variant (155)..(157): Xaa in position 155 to 157 is any amino acid
  Variant (160)..(160): Xaa in position 160 is any amino acid
  Variant (163)..(163): Xaa in position 163 is any amino acid
  Variant (167)..(190): Xaa in position 167 to 190 is any amino acid
  Variant (193)..(193): Xaa in position 193 is any amino acid
  Variant (196)..(197): Xaa in position 196 to 197 is any amino acid
  Variant (200)..(204): Xaa in position 200 to 204 is any amino acid
  Variant (205)..(205): Xaa in position 205 is any or no amino acid
  Variant (207)..(208): Xaa in position 207 to 208 is any amino acid
  Variant (210)..(210): Xaa in position 210 is any amino acid
  Variant (211)..(212): Xaa in position 211 to 212 is any or no amino acid
  Variant (214)..(216): Xaa in position 214 to 216 is any amino acid
  Variant (218)..(225): Xaa in position 218 to 225 is any amino acid
  Variant (228)..(234): Xaa in position 228 to 234 is any amino acid
  Variant (235)..(235): Xaa in position 235 is any or no amino acid
  Variant (237)..(237): Xaa in position 237 is any amino acid
  Variant (239)..(239): Xaa in position 239 is any amino acid
  Variant (241)..(242): Xaa in position 241 to 242 is any amino acid
  Variant (244)..(249): Xaa in position 244 to 249 is any amino acid
  Variant (251)..(264): Xaa in position 251 to 264 is any amino acid
  Variant (266)..(274): Xaa in position 266 to 274 is any amino acid
  Variant (275)..(276): Xaa in position 275 to 276 is any or no amino acid
  Variant (278)..(278): Xaa in position 278 is any amino acid
  Variant (280)..(282): Xaa in position 280 to 282 is any amino acid
  Variant (283)..(283): Xaa in position 283 is any or no amino acid
  Variant (285)..(285): Xaa in position 285 is any amino acid
  Variant (291)..(292): Xaa in position 291 to 292 is any amino acid
  Variant (294)..(294): Xaa in position 294 is any amino acid
  Variant (296)..(299): Xaa in position 296 to 299 is any amino acid
  Variant (302)..(304): Xaa in position 302 to 304 is any amino acid
  Variant (306)..(321): Xaa in position 306 to 321 is any amino acid
  Variant (322)..(322): Xaa in position 322 is any or no amino acid
  Variant (325)..(325): Xaa in position 325 is any amino acid
  Variant (327)..(331): Xaa in position 327 to 331 is any amino acid
  Variant (332)..(347): Xaa in position 332 to 347 is any or no amino acid
  Variant (349)..(351): Xaa in position 349 to 351 is any amino acid
  Variant (353)..(355): Xaa in position 353 to 355 is any amino acid
  Variant (357)..(358): Xaa in position 357 to 358 is any amino acid
  Variant (360)..(362): Xaa in position 360 to 362 is any amino acid
  Variant (364)..(382): Xaa in position 364 to 382 is any amino acid
  Variant (384)..(390): Xaa in position 384 to 390 is any amino acid
  Variant (394)..(395): Xaa in position 394 to 395 is any amino acid
  Variant (397)..(400): Xaa in position 397 to 400 is any amino acid
  Variant (402)..(403): Xaa in position 402 to 403 is any amino acid
  Variant (405)..(406): Xaa in position 405 to 406 is any amino acid
  Variant (408)..(409): Xaa in position 408 to 409 is any amino acid
  Variant (411)..(413): Xaa in position 411 to 413 is any amino acid
  Variant (416)..(416): Xaa in position 416 is any amino acid
  Variant (418)..(429): Xaa in position 418 to 429 is any amino acid
  Variant (430)..(431): Xaa in position 430 to 431 is any or no amino acid
  Variant (433)..(435): Xaa in position 433 to 435 is any amino acid
  Variant (436)..(436): Xaa in position 436 is any or no amino acid
  Variant (439)..(440): Xaa in position 439 to 440 is any amino acid
  Variant (442)..(463): Xaa in position 442 to 463 is any amino acid
  Variant (464)..(467): Xaa in position 464 to 467 is any or no amino acid
  Variant (469)..(469): Xaa in position 469 is any amino acid
  Variant (471)..(472): Xaa in position 471 to 472 is any amino acid
  Variant (474)..(495): Xaa in position 474 to 495 is any amino acid
  Variant (496)..(502): Xaa in position 496 to 502 is any or no amino acid
LXXRYXSXEMXXXXSXXXXXXXXRXLWXXXXXXXXXLGXXXXXXXXXXXXXXXXXXXXXXXXXXXXXXXXXXXEXXXRHDVXAXXXXXXXXXXXXXXXXXHXGXTSXXXXXNXXXXXXXXXXXXXXXXXXXXXXXXLXXXAXXXXXXXXXGXXHXXXAQXTTXGKRXXXXXXXXXXXXXXXXXXXXXXXXRGXKGXXGTXXXXXXLXXGXXXKXXXLXXXXXXXXGFXXXXXXXXQXYXRXXDXXXXXXLXXXXXXXXXXXXXXRXXXXXXXXXXXEXFXXXXQXGSSAMXXKXNXXXXERXXXLXXXXXXXXXXXXXXXXXQWXEXXXXXXXXXXXXXXXXXXXXXSXXXRXXXPXXFXXXDXXXXXXXXXXXXXXXXXXXIXXXXXXXLPFXXTXXXXMXXVXXGXXRXXXHEXIXXXXXXXXXXXXXXGXXXXDLXXRXXXXXXXXXXXXXXXXXXXXXXXXXXGXAXXQXXXXXXXXXXXXXXXXXXXXXXXXXXXXXL

SEQ ID NO: 67293 - protein, 25 aa, Artificial sequence
  protein pattern
  Variant (6)..(6): Xaa in position 6 is Ala or Pro
  Variant (7)..(7): Xaa in position 7 is His or Tyr
  Variant (9)..(9): Xaa in position 9 is any amino acid
  Variant (11)..(11): Xaa in position 11 is any amino acid
  Variant (12)..(12): Xaa in position 12 is any or no amino acid
  Variant (14)..(14): Xaa in position 14 is any amino acid
  Variant (15)..(15): Xaa in position 15 is any or no amino acid
  Variant (18)..(19): Xaa in position 18 to 19 is any amino acid
  Variant (20)..(20): Xaa in position 20 is Ala, Gly or Ser
  Variant (22)..(24): Xaa in position 22 to 24 is any amino acid
  Variant (25)..(25): Xaa in position 25 is Ile, Leu, Met or Val
GSSAMXXKXNXXRXXERXXXLXXXX

SEQ ID NO: 67294 - protein, 27 aa, Artificial sequence
  protein pattern
  Variant (2)..(2): Xaa in position 2 is any amino acid
  Variant (3)..(3): Xaa in position 3 is Ser or Thr
  Variant (5)..(6): Xaa in position 5 to 6 is any amino acid
  Variant (7)..(7): Xaa in position 7 is Ala or Pro
  Variant (10)..(10): Xaa in position 10 is Ala, Leu, Pro or Val
  Variant (11)..(11): Xaa in position 11 is any amino acid
  Variant (13)..(13): Xaa in position 13 is Leu or Val
  Variant (17)..(17): Xaa in position 17 is any amino acid
  Variant (18)..(18): Xaa in position 18 is Ala, Cys, Ser or Thr
  Variant (19)..(22): Xaa in position 19 to 22 is any amino acid
  Variant (23)..(23): Xaa in position 23 is Asp, Glu or Ser
  Variant (24)..(26): Xaa in position 24 to 26 is any amino acid
  Variant (27)..(27): Xaa in position 27 is Ala or Asp
GXXHXXXAQXXTXGKRXXXXXXXXXXX

SEQ ID NO: 67295 - protein, 19 aa, Artificial sequence
  protein pattern
  Variant (2)..(2): Xaa in position 2 is Ala, Cys, Gly, Asn, Ser, Thr or Val
  Variant (3)..(3): Xaa in position 3 is any amino acid
  Variant (6)..(6): Xaa in position 6 is Ala, Cys, Ser or Thr
  Variant (8)..(8): Xaa in position 8 is any amino acid
  Variant (10)..(10): Xaa in position 10 is Leu or Met
  Variant (11)..(13): Xaa in position 11 to 13 is any amino acid
  Variant (14)..(14): Xaa in position 14 is Phe or Trp
  Variant (16)..(18): Xaa in position 16 to 18 is any amino acid
  Variant (19)..(19): Xaa in position 19 is Lys or Arg
LXXRYXSXEXXXXXSXXXX

SEQ ID NO: 67296 - protein, 13 aa, Artificial sequence
  protein pattern
  Variant (2)..(2): Xaa in position 2 is any amino acid
  Variant (5)..(6): Xaa in position 5 to 6 is any amino acid
  Variant (9)..(9): Xaa in position 9 is any or no amino acid
  Variant (11)..(11): Xaa in position 11 is Ala or Asp
  Variant (12)..(12): Xaa in position 12 is any amino acid
  Variant (13)..(13): Xaa in position 13 is Phe or Leu
GXKGXXGTXQXXX

SEQ ID NO: 67297 - protein, 32 aa, Artificial sequence
  protein pattern
  Variant (2)..(2): Xaa in position 2 is Thr or Val
  Variant (4)..(4): Xaa in position 4 is Asp, Pro, Ser or Thr
  Variant (6)..(6): Xaa in position 6 is any amino acid
  Variant (7)..(7): Xaa in position 7 is Ile, Leu or Val
  Variant (9)..(14): Xaa in position 9 to 14 is any amino acid
  Variant (15)..(15): Xaa in position 15 is Ile, Leu or Val
  Variant (16)..(16): Xaa in position 16 is Ala, Gly, Ser, Thr or Val
  Variant (17)..(17): Xaa in position 17 is any amino acid
  Variant (18)..(18): Xaa in position 18 is Phe, Ile, Leu or Val
  Variant (19)..(19): Xaa in position 19 is Ala, Gly or Val
  Variant (20)..(20): Xaa in position 20 is any amino acid
  Variant (21)..(21): Xaa in position 21 is Ala, Gly, Ser or Thr
  Variant (22)..(24): Xaa in position 22 to 24 is any amino acid
  Variant (25)..(25): Xaa in position 25 is Phe, Ile, Leu or Met
  Variant (26)..(26): Xaa in position 26 is Ala, Cys, Gly, Ser or Thr
  Variant (27)..(27): Xaa in position 27 is any amino acid
  Variant (28)..(28): Xaa in position 28 is Asp or Thr
  Variant (29)..(29): Xaa in position 29 is Ile, Leu or Val
  Variant (31)..(31): Xaa in position 31 is any or no amino acid
QXYXRXXDXXXXXXXXXXXXXXXXXXXXXRXL

SEQ ID NO: 67298 - protein, 25 aa, Artificial sequence
  protein pattern
  Variant (2)..(3): Xaa in position 2 to 3 is any amino acid
  Variant (4)..(4): Xaa in position 4 is any or no amino acid
  Variant (6)..(8): Xaa in position 6 to 8 is any amino acid
  Variant (9)..(9): Xaa in position 9 is any or no amino acid
  Variant (14)..(14): Xaa in position 14 is any amino acid
  Variant (15)..(15): Xaa in position 15 is Ala or Ser
  Variant (16)..(16): Xaa in position 16 is His or Arg
  Variant (17)..(17): Xaa in position 17 is Ile or Val
  Variant (18)..(19): Xaa in position 18 to 19 is any amino acid
  Variant (20)..(20): Xaa in position 20 is Phe or Tyr
  Variant (21)..(21): Xaa in position 21 is Ala, Gly or Asn
  Variant (22)..(23): Xaa in position 22 to 23 is any amino acid
  Variant (24)..(24): Xaa in position 24 is Ala or Cys
  Variant (25)..(25): Xaa in position 25 is Gly or Pro
AXXXEXXXXRHDVXXXXXXXXXXXX

SEQ ID NO: 67299 - DNA, 1500 bp, Saccharomyces cerevisiae
  CDS (1)..(1500)
atgtcttacaattttacaggtacgcctacaggcgaaggaacgggtggtaactcgttgacaacagatttgaatacacaatttgacttggccaacatgggatggatcggtgtggcttcagcaggtgtgtggattatggtcccaggtatcggtttattatattctggtttatccaggaaaaagcatgctttatccttgctttgggcctcgatgatggcttccgccgtgtgtattttccaatggtttttctggggatactcattagctttctcacacaacactagaggtaacggttttattggtaccttggaattctttgggtttcgtaacgttttaggagccccatctagtgtcagttctcttcccgatatactgtttgccgtttaccaaggtatgtttgccgcagtcaccggtgccctaatgctaggtggtgcctgcgagagggcaaggttgtttcctatgatggtgttcttgtttttatggatgactattgtttattgtcctattgcatgctgggtctggaatgccgagggttggttggtcaaattgggtagcttggactatgcaggtggtttatgtgtccatttaacatctggacatggtggtctagtttacgctttgatactgggtaagcgtaatgaccctgttacacgtaaagggatgcccaagtacaaaccacattccgtcacctcggtggttttaggcacagtgttcttatggtttggttggatgttctttaacggaggctctgcgggtaatgcaactatacgagcatggtactctattatgtccacaaacttagctgctgcttgcggtggcttgacatggatggttatcgattatttcagatgcggaagaaagtggactacagttggtttgtgttcaggtatcatcgctggcctagtgggtatcaccccagccgccgggttcgtgccaatctggtcagccgttgtcattggtgtggttactggtgcaggatgtaaccttgctgttgacttaaagagtctattgcgcatcgatgatggtctagattgttactctatccatggtgtgggtggttgtattggttctgtattaactggtatctttgctgcagactatgtaaatgccactgcaggctcttacattagtccaattgatggtggctggatcaatcatcactataaacaagttggttatcaattagcaggtatatgcgctgcactagcctggactgttactgtcacatctatcttgcttctaactatgaatgccattccatttttaaaactaagattaagtgctgatgaggaagaattaggtaccgacgctgctcaaattggtgaatttacatacgaggaatccactgcttacatcccagaaccaatcagatctaaaacatcggcacaaatgccacctcctcatgaaaacattgatgataagattgtgggtaacacagacgcagaaaagaattctacgccttccgacgcttcttctactaagaacactgaccatatagtataa

SEQ ID NO: 67300 - protein, 499 aa, Saccharomyces cerevisiae
MSYNFTGTPTGEGTGGNSLTTDLNTQFDLANMGWIGVASAGVWIMVPGIGLLYSGLSRKKHALSLLWASMMASAVCIFQWFFWGYSLAFSHNTRGNGFIGTLEFFGFRNVLGAPSSVSSLPDILFAVYQGMFAAVTGALMLGGACERARLFPMMVFLFLWMTIVYCPIACWVWNAEGWLVKLGSLDYAGGLCVHLTSGHGGLVYALILGKRNDPVTRKGMPKYKPHSVTSVVLGTVFLWFGWMFFNGGSAGNATIRAWYSIMSTNLAAACGGLTWMVIDYFRCGRKWTTVGLCSGIIAGLVGITPAAGFVPIWSAVVIGVVTGAGCNLAVDLKSLLRIDDGLDCYSIHGVGGCIGSVLTGIFAADYVNATAGSYISPIDGGWINHHYKQVGYQLAGICAALAWTVTVTSILLLTMNAIPFLKLRLSADEEELGTDAAQIGEFTYEESTAYIPEPIRSKTSAQMPPPHENIDDKIVGNTDAEKNSTPSDASSTKNTDHIV

SEQ ID NO: 67301 - DNA, 1176 bp, Archaeoglobus fulgidus DSM 4304
  CDS (1)..(1176): transl_table=11
atgagtgacggaaatgtcgcatggatactcgcatccacggcccttgtaatgctgatggtgccgggagtggggttcttttacgcaggaatggtaaggagaaagaatgcagttaacatgattgcgctgagcttcatatcactcataatcacggttttgctgtggatattctacggctactcggtgagcttcggaaatgacatctctggaatcattggagggctgaattatgcactgctaagcggagttaagggggaggatttgctgttcatgatgtaccagatgatgttcgccgctgtcacaattgcaatcctcacctccgcaattgctgagagagcaaaagtttcatcgttcattctcctcagcgctctgtggcttacgttcgtttacgcccccttcgcacactggctttggggtggggggtggctggcaaagctcggcgccctcgactttgctggaggtatggttgttcacataagctcgggatttgctgcacttgcagtcgcgatgacgataggtaagagggcgggattcgaggagtactcgatagagccacacagcattccgctgacgctcattggcgctgccctgctttggtttgggtggttcggattcaacggcggaagtgcattggctgcaaacgatgtggccatcaacgccgtggtggtcacaaacacctcagcagcagtagcagggtttgtctggatggtaattggatggattaagggaaagccggggagtcttgggatagtgagcggtgcaattgctgggcttgccgccataacccccgcagcaggctttgtggatgtaaagggagcgattgtcataggtcttgtggctggaatagtatgctaccttgctatggacttcagaataaagaagaagatagacgagagccttgatgcttgggcgattcacggaataggcggtttatggggaagtgttgcagttggcattcttgcaaatccggaggttaacggatatgcaggcctactgttcggaaatccgcaactgctagtttcacaactgattgcggttgcatccacaacagcctacgccttcctcgtgacgctgatactggcaaaggctgttgatgccgctgtggggctgagggttagctcgcaggaggagtacgtcggtctcgacctgtcgcagcatgaggaggttgcctacacgtga

SEQ ID NO: 67302 - protein, 391 aa, Archaeoglobus fulgidus DSM 4304
MSDGNVAWILASTALVMLMVPGVGFFYAGMVRRKNAVNMIALSFISLIITVLLWIFYGYSVSFGNDISGIIGGLNYALLSGVKGEDLLFMMYQMMFAAVTIAILTSAIAERAKVSSFILLSALWLTFVYAPFAHWLWGGGWLAKLGALDFAGGMVVHISSGFAALAVAMTIGKRAGFEEYSIEPHSIPLTLIGAALLWFGWFGFNGGSALAANDVAINAVVVTNTSAAVAGFVWMVIGWIKGKPGSLGIVSGAIAGLAAITPAAGFVDVKGAIVIGLVAGIVCYLAMDFRIKKKIDESLDAWAIHGIGGLWGSVAVGILANPEVNGYAGLLFGNPQLLVSQLIAVASTTAYAFLVTLILAKAVDAAVGLRVSSQEEYVGLDLSQHEEVAYT

SEQ ID NO: 67303 - DNA, 1167 bp, Archaeoglobus fulgidus DSM 4304
  CDS (1)..(1167): transl_table=11
atgcagagtggagatatatcttggttgctgatttcgacggccctggtcgttctgatgactccagcgctgggattgttttacggtggtatggtgcgagctaagaatgtcctttccacgataacgatgtgctttgtcgcactggcgattgtgagcgtacagtggatactccttggctacactattgcatttggtgacgatgtcagtggtttaactggcaacttagtgttcatcggactcaggaacgttagcatgtccgattacggatttgttgcttttcagatggcgtttgcagcgattacactggccataattgtatcagcacttgcagaaagggtaaagctgtcggcattcctgctgttcggcattctgtggacaaccttcgtttacgacccgatagctcactgggtgtggggaggcggctggctcgctggaataggggcgctggactttgcaggcggaacggtggtgcacataagctcgggtttcagtgctttagctctagcacttcttgtaggcaggagaaccggctacggggaatacaacattgaaccgcacaacattcctatgaccttgctcggtacagcactgctgtggttcggatggttcggtttcaacgctggtagtgcactggaagcgaacgatgtggctttgaacgcattcctagttacgaacacttcggcagcgatgggtgccttaagctggatgtttgcctcctggctaaagggaaaacccggaagtttgggagtggcaagcggtgctatagccgggcttgtggcaattactcctgcagctggctacgttgacccgctttctgcacttgtaataggaggtgttgcaggagtggtgtgctatgcagcgatgctcctcagagtcagagcaggagtagatgagagtcttgatgcctgggctgttcatggcgtcggaggcctgtggggagccattgccaccggcatcttcgcctctgttggtgctaccggcctggtggcagggaatgcacagcaactgctccttcagataattgcggccctagtcgcaacagcctacgccttcctcgtgacgctgatactggcaaaggctgttgatgccgctgtggggctgagggttagctcccaggaggagtacgtcggtctcgacctgtcgcagcatgaggaggttgcctacacgtga

SEQ ID NO: 67304 - protein, 388 aa, Archaeoglobus fulgidus DSM 4304
MQSGDISWLLISTALVVLMTPALGLFYGGMVRAKNVLSTITMCFVALAIVSVQWILLGYTIAFGDDVSGLTGNLVFIGLRNVSMSDYGFVAFQMAFAAITLAIIVSALAERVKLSAFLLFGILWTTFVYDPIAHWVWGGGWLAGIGALDFAGGTVVHISSGFSALALALLVGRRTGYGEYNIEPHNIPMTLLGTALLWFGWFGFNAGSALEANDVALNAFLVTNTSAAMGALSWMFASWLKGKPGSLGVASGAIAGLVAITPAAGYVDPLSALVIGGVAGVVCYAAMLLRVRAGVDESLDAWAVHGVGGLWGAIATGIFASVGATGLVAGNAQQLLLQIIAALVATAYAFLVTLILAKAVDAAVGLRVSSQEEYVGLDLSQHEEVAYT

SEQ ID NO: 67305 - DNA, 1533 bp, Ureaplasma parvum serovar 3 str. ATCC 700970
  CDS (1)..(1533): transl_table=4
gtgagaattgtgtcaacaattataactacatcttgaggagtagatccaaatatttacttttcaaagcatgagttaacatgagtgccagcaacagctgatgctaatacattagcattaactaattttaatccgactagcactttattagttgcattagcaattgcctttgtcttattgatgactccaggtttagcattattttatggtgggctaacacgtcgaaaatctacattaacgattattaatcaatgtgtagcttcacttggaatcacaacactgatttgaatttttggagggttctcacttgcttttggaccttctgttggtaaaggaataattggtgatatttcaacttattttgcatttagaaatctattatttgctgatggttgaagtggagatgtaggaattgtttttgcaaactttactaatggtgtaccattaattttattctttgcttatcaattagcttttgcaattattacaccaccattaatggttggtgcatttgcagatcgaatgaaatttaaaaattatctagtattcttagtactatgacaatatttaatttacattccttttgcacattgaatttgaggtcaaggattcttagctgctgctggagtaattgactttgctggtggtattgtaattcatacaactgctggttttggagcattagctgcttcattagtattaggtaaacgtgttttacttaagaatgataaaagtcgtccacacaatattccaatgactattattggagcaacattgttattctttggttgatttggatttaatgttggtggatcaggatttgtagctggtgggaatgctgctacttgatcagctgctacaagtgcttggattaatacaattattgctttagctattggaatggttggttgagcagttcttgaaacaatctttaataaaaatcataaagccacaggtgttggtttagtaacaggtgcaattgctggattagcaacaattactcctgcagcaggttatgttccaatttgagcatctgttcctattggtgtagctgctgtgctagtttgttatactagtgctaaaactttacatcatttccacaaaattgatgatactctagaagtatgaggcgtacatggaatgggtggtgttactggttcattattaattggtgcgtttgcatctaaatctgtaaacccatcaattatgtatgaagcaattggtccaacaacaactggtgttttatttggtgtccaattaggagcggttttattagctgcggtttatggatttgtatttactattttattagtatatattactcgtccaagattatcagcacgccaacaattaggtcatatagactatattaatcatggcgaagatgcatattcattcgatattgaaattccatctgaaaaagaaatggagcaatatgaattagcagatagtacatgacactcaagcacaggtgttaagtattcattgcttaataataaaaaccagcaaaatcataaagtagcaaacgaccattaa

SEQ ID NO: 67306 - protein, 510 aa, Ureaplasma parvum serovar 3 str. ATCC 700970
MRIVSTIITTSWGVDPNIYFSKHELTWVPATADANTLALTNFNPTSTLLVALAIAFVLLMTPGLALFYGGLTRRKSTLTIINQCVASLGITTLIWIFGGFSLAFGPSVGKGIIGDISTYFAFRNLLFADGWSGDVGIVFANFTNGVPLILFFAYQLAFAIITPPLMVGAFADRMKFKNYLVFLVLWQYLIYIPFAHWIWGQGFLAAAGVIDFAGGIVIHTTAGFGALAASLVLGKRVLLKNDKSRPHNIPMTIIGATLLFFGWFGFNVGGSGFVAGGNAATWSAATSAWINTIIALAIGMVGWAVLETIFNKNHKATGVGLVTGAIAGLATITPAAGYVPIWASVPIGVAAVLVCYTSAKTLHHFHKIDDTLEVWGVHGMGGVTGSLLIGAFASKSVNPSIMYEAIGPTTTGVLFGVQLGAVLLAAVYGFVFTILLVYITRPRLSARQQLGHIDYINHGEDAYSFDIEIPSEKEMEQYELADSTWHSSTGVKYSLLNNKNQQNHKVANDH

SEQ ID NO: 67307 - DNA, 1566 bp, Ureaplasma parvum serovar 3 str. ATCC 700970
  CDS (1)..(1566): transl_table=4
gtgaaaattgtgtcaacttgaggcctaaataaagatatttatttctcaactcatgaattaacatgagtgcccgcagatgcaagtcaatcaacacttaatgcaataggttttaatcctactaatacactactagtagctttagcaattgcttttgttttactaatgacaccagggttagcattattttatggtggtttagtaagacgtaaatcagctttaacaattattaatcaatgtgtagcttcacttggaattacaacattgatttgaatttttggaggtttctcacttgcttttggaccttctgttggtaaaggaataattggtgatatttcaacttattttgcatttagaaatctactatttgctgatggttgaagtggaggagcagttttagtttttgctaattttactaacggcgtaccattaattttattctttgcttatcaattagcttttgcaattattacaccaccattaatggttggtgcatttgcagaccgaatgaaatttaaaaattatctagtattcttagtactatgacaatatttaatttatattccttttgcacattgaatttgaggtcaaggattcttagctgctgctggagtaattgactttgctggtggtattgtaattcatacaactgctggttttggagctttggctgcttcatttatgttaggaaaacgtacaacattaattacagataaaaagcgagctaataatttaccaatggttgtattaggtgcagcattactattttttggttgatttggatttaatgttggtggtgcaggttttgttaaagaaaatacaaatcacatttcacaagctatatcatcatgattaaatacaattattgccttagcaataggtatgataggttgagttacacttgaaactattgttaacaaaaaccacaaaccaacaacagtaggtttagtgactggtgcagtcgctggattagcaacaattactcccgcagcaggttttgttccagtttgagcctctgttcctattgccattatgggtgttttagtatgttattcagtttctagattattagattacttccgttttgatgattctttagaagttctaccagttcatggaatgggtggtgttataggttctttattaattggagcatttgctactaacacggttgcacatggaattaaatatgacgccgtcggattagataataatggaaatccaatttatggtattttatttggactacaattaggtgctgtattattagcagcaacatgggcatttgcctttacatgtttaatagtttatattactaaacctcgtttatcagtgcgtcaacaattaggccatatagactacatcaatcatggtgaagatgcatacaagtttgattttattattccttcagaaagtgaaatgtttgaatatgaaagttttgatcaaacttgagaatgtaaagctagtggttgtaaaaaaagcaacttagctgccaagaaaaaccctgtttttatagagaatgagaatgattgtacatgacaatctaaatctcgtgagtgtacaaaatag

SEQ ID NO: 67308 - protein, 521 aa, Ureaplasma parvum serovar 3 str. ATCC 700970
MKIVSTWGLNKDIYFSTHELTWVPADASQSTLNAIGFNPTNTLLVALAIAFVLLMTPGLALFYGGLVRRKSALTIINQCVASLGITTLIWIFGGFSLAFGPSVGKGIIGDISTYFAFRNLLFADGWSGGAVLVFANFTNGVPLILFFAYQLAFAIITPPLMVGAFADRMKFKNYLVFLVLWQYLIYIPFAHWIWGQGFLAAAGVIDFAGGIVIHTTAGFGALAASFMLGKRTTLITDKKRANNLPMVVLGAALLFFGWFGFNVGGAGFVKENTNHISQAISSWLNTIIALAIGMIGWVTLETIVNKNHKPTTVGLVTGAVAGLATITPAAGFVPVWASVPIAIMGVLVCYSVSRLLDYFRFDDSLEVLPVHGMGGVIGSLLIGAFATNTVAHGIKYDAVGLDNNGNPIYGILFGLQLGAVLLAATWAFAFTCLIVYITKPRLSVRQQLGHIDYINHGEDAYKFDFIIPSESEMFEYESFDQTWECKASGCKKSNLAAKKNPVFIENENDCTWQSKSRECTK

SEQ ID NO: 67309 - DNA, 1356 bp, Mesorhizobium loti MAFF303099
  CDS (1)..(1356): transl_table=11
atgaatatttcttccaccttgaagacaacgggacgggcggccctgctgggctcgcttgctctggcagcattgggcagcgtcgccgcctttgcgcaggaagccgctccggccgctgccgcagccgccccggctgccgctcccaccccggtgctcgacaccggcaacaccgcctggatgctgacctcgacggccctggtgctgatgatgaccattccgggcctggcgctgttctacggcggcatggtgcgcaagaagaacgtgctcgccaccatcatgcagagcttcgccatcacctgcctggtgacggtgctgtggttcatgttcggctattcgctggccttctccgacggcggcggcatgaatgcctatctcggcggcttctcgaaattcttccatcacggcatcacggtctcgacgctctggctgccgggggtctcgaacattcctgaattcgtcttctcgatgttccagatgaccttcgccatcatcacacctgccctcatcgccggcgccttcgccgagcgcatgaagttctcggcgctgctgctgttcatggcgctgtggttgatcgtggtctattgcccgatcgcacattgggtctggggtggcggcttcctcggcacggctggcgtgctcgacttcgccggcggtacggtcgtccacatcaacgccggtgtcgcgggcctggtctgcgcgctggttcttggcaagcgcgaaggctacggcaccaccaacatggcgccgcacaacctggtctattcggtgatcggcgcttcgctgctgtgggtcggctggttcggcttcaacgccggttcggaactggcggcggacggtcttgccggcgctgcgatgatgaacacgcaggtcgccaccgctgccgccgcgctcgcctggatgttcgctgaatggatcgtcgccaagaagccctcggtgctcggcatcatctcgggtgccgtcgccggcctcgtcgcggtgacgccggcttccggcttcgtcaacccgaccggcgctttcatcatcggcatcgttgccggcgtgctctgctacatctcggcggtcaaggtgaagcacatgttcggctatgacgactcgctcgatgccttcggcgtgcacggcgtcggcggcatcatcggtgcgctgctcaccggcgcgctggccgatccggcgatcaacgcgctcggcaagggcggctctgtggtcacccagctctacggcatcgtcttcaccatcctgtggacggcgatcgccaccttcgtgatcctctacatcgtcaaggcgctggtcggcctgcgtccgacgacccaggaagaggtcgaaggcctcgacatctcccagcatggcgaagtggtgccgtaa

SEQ ID NO: 67310 - protein, 451 aa, Mesorhizobium loti MAFF303099
MNISSTLKTTGRAALLGSLALAALGSVAAFAQEAAPAAAAAAPAAAPTPVLDTGNTAWMLTSTALVLMMTIPGLALFYGGMVRKKNVLATIMQSFAITCLVTVLWFMFGYSLAFSDGGGMNAYLGGFSKFFHHGITVSTLWLPGVSNIPEFVFSMFQMTFAIITPALIAGAFAERMKFSALLLFMALWLIVVYCPIAHWVWGGGFLGTAGVLDFAGGTVVHINAGVAGLVCALVLGKREGYGTTNMAPHNLVYSVIGASLLWVGWFGFNAGSELAADGLAGAAMMNTQVATAAAALAWMFAEWIVAKKPSVLGIISGAVAGLVAVTPASGFVNPTGAFIIGIVAGVLCYISAVKVKHMFGYDDSLDAFGVHGVGGIIGALLTGALADPAINALGKGGSVVTQLYGIVFTILWTAIATFVILYIVKALVGLRPTTQEEVEGLDISQHGEVVP

SEQ ID NO: 67311 - DNA, 1557 bp, Sulfolobus tokodaii str. 7
  CDS (1)..(1557): transl_table=11
atggaaattcaaaaaacctttccccaaaataatcttataaagttattaataatactaattagtttttcaatcattctattatcattacactcatttggacagacatcatcaaatactacagcagaaatacagagtttaaatcaaagtattttggctttagaaaatcatacagcagattacccatctgcagcagttcctagctggttagatacgggtagtaatgcatggatgcttacggctgcaacgtttgtaggacttcaaagtgtacctggtgtagcactatattatgctggattatccaaaaagaaatatgctgtaaattccgcattaatggtattttatgcttttgctgcagttttagttgtttggatgatagctggttataatgctggttttggtcatcctgcattacttagtattaacggttatggaattttaggttatccattaccagcatggttaggtcactatgaagctagtcaaaccgtatttggtccaactggaacaccggtagatattccaacatctacttacatattcttccaatttgtctttgccgcaataactccagtattattagctggaggagtattagagagaatgaatttcaaagcatggatgatatttgtacccttctggagtttattagtatatagcccagtagcttattggttatttgctggtggatggttaaatcaactaggagctgtagactttagcggaggatatgttatccatgtagatgccggagtcggtgcgttagctgctgcattagcaataggtcctagattagcatctgaaagaaaattagaagctcatagcttaccattagttcttgcaggagctggtttaatttggttaggatgggatggatttaacggtggtgatcccggtggtgcaacaatcgatgctgcaatagcagtattaaatacaaatattgcaacagctgttagtgcaataacttggatgttaatggatatggcattctttaagaaaccaacattagtgggtgcaacaagtggtgcaataactggacttgtagctattacgccagctgcaggatatgtaaatggttgggaagcaatgcttattggaattgcatctggaagtataccatggttatctctgtataaatttgagcctagactgaaagttgatgatacattaggagtattctctactcacggtattgcaggaatagtgggaggattgttaactggtgtgttcgcagatccaaatgtgacacaatatgtggatccaacgttaaaaggtgctttatatggtaacttatatcaactaggaatacaagctgccgctgcagcagtagtatttgtttatgattttgcaataacttttggtctgttaaagttaataggactattcataccattgcaagcaccacctgatacattagctatcggtgattatgcaatgcatggagaagtagcatattctgaactactagctactttaccagaatcgcagataaagaaagaagaaattagagaagaggcacaagaagagaaagaagatccagatgagaaaaaatctaaataa

SEQ ID NO: 67312 - protein, 518 aa, Sulfolobus tokodaii str. 7
MEIQKTFPQNNLIKLLIILISFSIILLSLHSFGQTSSNTTAEIQSLNQSILALENHTADYPSAAVPSWLDTGSNAWMLTAATFVGLQSVPGVALYYAGLSKKKYAVNSALMVFYAFAAVLVVWMIAGYNAGFGHPALLSINGYGILGYPLPAWLGHYEASQTVFGPTGTPVDIPTSTYIFFQFVFAAITPVLLAGGVLERMNFKAWMIFVPFWSLLVYSPVAYWLFAGGWLNQLGAVDFSGGYVIHVDAGVGALAAALAIGPRLASERKLEAHSLPLVLAGAGLIWLGWDGFNGGDPGGATIDAAIAVLNTNIATAVSAITWMLMDMAFFKKPTLVGATSGAITGLVAITPAAGYVNGWEAMLIGIASGSIPWLSLYKFEPRLKVDDTLGVFSTHGIAGIVGGLLTGVFADPNVTQYVDPTLKGALYGNLYQLGIQAAAAAVVFVYDFAITFGLLKLIGLFIPLQAPPDTLAIGDYAMHGEVAYSELLATLPESQIKKEEIREEAQEEKEDPDEKKSK

SEQ ID NO: 67313 - DNA, 1287 bp, Salmonella typhimurium LT2
  CDS (1)..(1287): transl_table=11
atgaagatagcgatgataaaaaccacactggcttcactggcgctgctgcctgggctaacgatagccgcgccggcggttgccgataaagcggatagtgcttttatgatgatttgcaccgcgctggtgctgttcatgacgataccgggtatcgcgctgttttacggcggattaattcgcgccaagaacgtgctgtcaatgttaacgcaagtgaccgtcacctttgcgctggtctgtattttatgggtggtgtacggctattcgctggcttttggcgaagggaatcattttttcggtaatgccgatggggcgatgttgaagaatatcgcgttgacggcggtaacgggtacgatttatcagtatattcatgtcgcgtttcagggatctttcgcctgtattaccgtcgggctgattgtcggcgcgctggcggagcgtattcgtttttcggcggtactgatttttgtcgtggtgtggttcacgctctcttatatcccgattgcgcacatggtgtggggcggcggcctgctggctgctcacggcgcgctggattttgctggtggtacagtggtgcatattaacgccgctatcgctgggctggtgggggcttatttaattggcaaacgcgtcggctttgggaaggaagcatttaaaccccataacctgccgatggtctttaccggtactgcgattctgtatatcggctggtttggatttaacgcgggttctgccggtagcgcaaacgagatagcagcgctggcctttgtgaacaccgtggtggcgaccgccgccgcgattctggggtggattatcggcgagtggacgctacgcggtaagccttccctgctgggagcgtgttccggcgcgattgccggtctggtcggcgtgacgccagcctgtggctatgttggcgttggcggcgcgctggttatcggcgttattgcgggtctggcgggattgtggggagtcaccatgcttaaacgtctgctacgggtagatgatccgtgcgacgtatttggcgttcacggcgtttgcggaatagtcggctgtatcctgaccggcgtttttgccgccagttcgctgggcggcgttggctttgtcgacggcgttacgatgggacatcaggtgatggtacagctggaaagtattgctattacggtcgtctggtccggcgttgtcgcgtttgttggttacaaactggcggatatccttgttggactgcgtgtaccggaagagcaggagcgcgaggggctggatgtgaacagtcacggcgagaatgcgtataacgcgtga

SEQ ID NO: 67314 - protein, 428 aa, Salmonella typhimurium LT2
MKIAMIKTTLASLALLPGLTIAAPAVADKADSAFMMICTALVLFMTIPGIALFYGGLIRAKNVLSMLTQVTVTFALVCILWVVYGYSLAFGEGNHFFGNADGAMLKNIALTAVTGTIYQYIHVAFQGSFACITVGLIVGALAERIRFSAVLIFVVVWFTLSYIPIAHMVWGGGLLAAHGALDFAGGTVVHINAAIAGLVGAYLIGKRVGFGKEAFKPHNLPMVFTGTAILYIGWFGFNAGSAGSANEIAALAFVNTVVATAAAILGWIIGEWTLRGKPSLLGACSGAIAGLVGVTPACGYVGVGGALVIGVIAGLAGLWGVTMLKRLLRVDDPCDVFGVHGVCGIVGCILTGVFAASSLGGVGFVDGVTMGHQVMVQLESIAITVVWSGVVAFVGYKLADILVGLRVPEEQEREGLDVNSHGENAYNA

SEQ ID NO: 67315 - DNA, 1206 bp, Listeria innocua Clip11262
  CDS (1)..(1206): transl_table=11
atggaatcagtatttatgttcttttgtactttattggtttggttgatgacaccagggattgcattattttatggtggtatggttcgccgcaaaaacgtgttaagtacagcaatgtatagttttagctctatggcaattatttctattctttgggtgattgttggctactcgttagcttttgcacctggaaatggctttatcggcagtttcgactggactttccttcataatgtcggttttgcggcaaatgacacttactcagatgcaattccacacattctgtttatgatgttccaaatgactttcgctattttaacagtagctatcatttctggggcatttgctgaacggatgaacttctctgcttacttgatttttattattttatggtcgttactagtatattcccctgttgcacactgggtttggggcgacggtggttggttacgcgagctaggagcacttgatttcgctggtggaaatgttgttcatatcagttcaggtgtaacgggtcttgtcttagctataatgattggccgcagaaaagaagctgattctgcttcacctcataacctcccgcttgctcttattggtgggattctagtctggtttggttggtatgggtttaatgtcggtagcgccctcacgattgataatgtagcgatgactgcatttgttaatacgaatacagcggctgcagctggaattattggctggggattggttgaatggttaatcaataaaaaaccgactatgcttggaacaatttctggcgctatcgctggtttagtgtccattacacctgctgccggtttcgttacagtacctagctctttgattatcggctttcttggcggagcactttgcttctgggcagtattctggttgaaaggaaaagtgaaatatgatgatgcgcttgacgcgtttggcttacacggaattggcggaatttggggcggcatcgctactggactttttgccacaacgaaggtaaatgaagctggagcagatggtctcttttacggtaatgcttccttagttgtaaaacaattaatcgcaattggctctactgtcgcatatgttgcagtagtcacagctctaattgtcgtagtaatcaaactatttttaccaattcgcgtaaacgaagaacaagaatacaaaggacttgatttgacgctacacggcgaaaaagcatatcaagaataa

SEQ ID NO: 67316 - protein, 401 aa, Listeria innocua Clip11262
MESVFMFFCTLLVWLMTPGIALFYGGMVRRKNVLSTAMYSFSSMAIISILWVIVGYSLAFAPGNGFIGSFDWTFLHNVGFAANDTYSDAIPHILFMMFQMTFAILTVAIISGAFAERMNFSAYLIFIILWSLLVYSPVAHWVWGDGGWLRELGALDFAGGNVVHISSGVTGLVLAIMIGRRKEADSASPHNLPLALIGGILVWFGWYGFNVGSALTIDNVAMTAFVNTNTAAAAGIIGWGLVEWLINKKPTMLGTISGAIAGLVSITPAAGFVTVPSSLIIGFLGGALCFWAVFWLKGKVKYDDALDAFGLHGIGGIWGGIATGLFATTKVNEAGADGLFYGNASLVVKQLIAIGSTVAYVAVVTALIVVVIKLFLPIRVNEEQEYKGLDLTLHGEKAYQE

SEQ ID NO: 67317 - DNA, 1413 bp, Nostoc sp. PCC 7120
  CDS (1)..(1413): transl_table=11
gtgtttcagaaaattttgataattggggtgagtaccctactactgctgacaagtcccatcatgggtaatgcttgggcgcaagtcccagggacgactccacctgctgatacgggagatacggcatttatgctgatttcagcagccctagtcttgctgatgacaccaggattagcatttttttatggtggtttcgtccgatcgcgcaatattctcaatacattgatgatgagctttgtattgatggcgattgtgggcgttacctgggttttatggggttatagtctgtcgtttgccccagggctgccatttattggtggtttacagtggtttgggttaaacggtgtggggctagaaaccacaggttatctgcaaggttccgagcctgcgaatgtggtttcctatgccgggacgattccccatcaggcatacatgatatatcaagccatgtttgccattatcaccccagctttaatttctggtgcgatcgccgaacgaatgagtttccgtgcctattgcctatttgtgctactgtggtcaacctttatttacacgcctctagcccacatggtttgggcaaaaggtggattcttaggtttgtatggcggcttaggtgcgctcgacttcgccggcggtacagtagttcatattagctctggggtttctgccctcgtcgccgcaatagtcctggggccaaggaaaacccatcccgatcgcctcagccctccccacaacgtaacatttattttgttgggtgctggcttgctatggtttggctggttcggttttaacgctgggagtgccttatcagttgctagcagcacttctggcagtttcatcactaatccagctacaactgcctttgttgccaccaacacctcagccgcagccggagctttaatgtggctaattctagaaggagtattacgcggtaaacccaccgccgtaggtgcagctacaggcgcagttgccggtttagtaggtataaccccagccgccggctttgtcacccctctagcgtcaattttgataggttttatcacagcttttgtttgcttttatgccgtaagtttcaaacacaagctaaatgttgatgatgccttagatacctacccggtgcatggtgttggtggaacagttggcgcaattctcacagctttctttgccaccgccgaagttaactcaggtggtaaaaacggcgtactcaagggtaattttggtgaactaggtgtggaactagccgccattgtcatcgcctatgtaattgcagcagttggtacttggataatcttgaagattattgatgctaccgttggcttacgggtgaaagaagaagcagaataccaaggtttggatatcagcgaacacggagaagaagcatataactccgagtttagcgatcgcatcgtaccgtaa

SEQ ID NO: 67318 - protein, 470 aa, Nostoc sp. PCC 7120
MFQKILIIGVSTLLLLTSPIMGNAWAQVPGTTPPADTGDTAFMLISAALVLLMTPGLAFFYGGFVRSRNILNTLMMSFVLMAIVGVTWVLWGYSLSFAPGLPFIGGLQWFGLNGVGLETTGYLQGSEPANVVSYAGTIPHQAYMIYQAMFAIITPALISGAIAERMSFRAYCLFVLLWSTFIYTPLAHMVWAKGGFLGLYGGLGALDFAGGTVVHISSGVSALVAAIVLGPRKTHPDRLSPPHNVTFILLGAGLLWFGWFGFNAGSALSVASSTSGSFITNPATTAFVATNTSAAAGALMWLILEGVLRGKPTAVGAATGAVAGLVGITPAAGFVTPLASILIGFITAFVCFYAVSFKHKLNVDDALDTYPVHGVGGTVGAILTAFFATAEVNSGGKNGVLKGNFGELGVELAAIVIAYVIAAVGTWIILKIIDATVGLRVKEEAEYQGLDISEHGEEAYNSEFSDRIVP

SEQ ID NO: 67319 - DNA, 1311 bp, Ralstonia solanacearum GMI1000
  CDS (1)..(1311): transl_table=11
gtgcccaacaagggcgacacggcgtggctgctggtttcgaccgccttcgtgatcctgatgacgctgccgggcctggcgctgttctacggcggcctggtgcgcaagaagaacatgctgtcggtcctgatgcaatgtaccggcatcttctcgctcatcatgatcctgtgggccatctacggctacagcatcgccttcaccgagggcaatgccttcttcggcgggctcgaccggctgttcctgaagggtctgacgccggattcggttgccgctacgttcagcaagggcgtggtagtgccggagtatgcgtacttcgccttccagggcgcatttgccgcgatcacctgcgcgctgatcatcggtgccttcgccgagcgcgccaagttctcggccgtgctggtcttcgtggtgctgtggttcacctttgcctacctgccgatcgcccacatggtctggttctggccggggccggacggcttcaccgacgccaaggcggccgaagtgatgacggccaagggcggctggctgttccagaagggcgcgctggacttcgccggcggcaccgtggtgcacatcaacgccgccgtggcgggcctggtgggtgccttcctgttcggcaagcggatcggcttcggccgcgaagcgctcaagccgcatagcctgacgctgaccatggtcggtgcctcgctgctgtggttcggctggttcggcttcaacgccggttcggccctggaagccaacggcagcgccgcgctggccttcgtcaacacgctgctcgccaccgccgccgccgtgttgtcgtggagcttcggcgagtggatcggcaagagcaagccgtcaatgctgggtgccgcgtcgggcgccgtcgccggcctggtggcgatcaccccggcagccggcttcgtcggcccgatgggcgccatcgcgatgggcatcctcgccggcgtgctgtgcctgtggggcgtcaacggcctcaagcgcatgctgggcatggacgacacgctggacgtgttcggcgtgcacggcgtgggcggcatcatgggcgcgctgctgaccggcgtgttcgcctcgccgagcctgggcggcaccggcatctacgactatgtcgccaacaaggtggccgatggctactcgatcggcggtcagctgtggattcagctgcagggcgtgctgaccaccatcgtgtggtctgccgtggtggctttcgttgcctacaagatcgtggacgcgatcatcggtctgcgcgtgccggaagaagaggagcgcgaaggtctggacatcacgtctcacggcgaaaccgcttacgaagactga

SEQ ID NO: 67320 - protein, 436 aa, Ralstonia solanacearum GMI1000
MPNKGDTAWLLVSTAFVILMTLPGLALFYGGLVRKKNMLSVLMQCTGIFSLIMILWAIYGYSIAFTEGNAFFGGLDRLFLKGLTPDSVAATFSKGVVVPEYAYFAFQGAFAAITCALIIGAFAERAKFSAVLVFVVLWFTFAYLPIAHMVWFWPGPDGFTDAKAAEVMTAKGGWLFQKGALDFAGGTVVHINAAVAGLVGAFLFGKRIGFGREALKPHSLTLTMVGASLLWFGWFGFNAGSALEANGSAALAFVNTLLATAAAVLSWSFGEWIGKSKPSMLGAASGAVAGLVAITPAAGFVGPMGAIAMGILAGVLCLWGVNGLKRMLGMDDTLDVFGVHGVGGIMGALLTGVFASPSLGGTGIYDYVANKVADGYSIGGQLWIQLQGVLTTIVWSAVVAFVAYKIVDAIIGLRVPEEEEREGLDITSHGETAYED

SEQ ID NO: 67321 - DNA, 1350 bp, Agrobacterium tumefaciens str. C58
  CDS (1)..(1350): transl_table=11
atgcaactcaacaagtttttgacgctcggcaagctgggcgccgcagcaacggccctgatggccccggccatcgcctttgcccaggatgcagcgccagcagtagcggcagcggctcctgttccggaaaaagccgataccgccttcatgtatatcgcaacgatcctcgtgctgttcatgatcattcctggtctggcgctgttttacggcggtctggtccgcaccaagaacatgctctccgttctcatgcagtgcacggtcatcggcgcagtcatgatgctggtgtgggtcatctacggttactccttcgccttcggcggcggcaccggtccttatttcggcggcttcggcaagctgttcctgtcgggcgtttcgcttgacagcacgtctgccaccttctcgcagggtgtcgtgatctacgaatacaccttcatcgccttccagatgacttttgcggccatcacgccggcgctgatcatcggtgcttttgcagaacgcgtgaagttctccgccgttatccttttcaccatcctctgggccaccttcgtttatttcccgatcgcgcacatggtctgggacgcgaacggcctgatcttcggcatgggcgctctcgacttcgccggcggcaccgtcgttcacatcaatgccggtatcgctggcctgatcggcgctatcatggttggcaaacgcaccggcttcggcaaggacatgatggctccccactccatgacgctgacgctggttggcgccgccatgctgtggttcggctggttcggctttaacgccggctccaacctcgaggcatcgggcggtgcggttctcgcaaccatgaacaccttcctcgccactgctgcggccatcgtttcctggtcgctggttgagagcttcacccgcggcaaggcttccatgctgggtgctgcttcgggcatgatcgccggcctcgttgccgtcacgcctgctgccggctccgtcggcccgatgggtgcgatcgttctcggtctcatcgtttcgccgatctgctacttcttcgtctccgtggtgaagaacaagttcggttatgacgatactgccgacgtcttcggcgtccacggcatcggtggcatcattggcgccctcggcaccggcatcttcacctcgccgctgcttggcggcaccggcaaggccgatttctccatctcctcgcagctctggacccagttcgttgccgtcgccatcaccatcgtctggtgcgcggtcgtttcggctatcctctacaagatcgtcgacgtgatcgttggtcttcgggttccggtcgaagccgaacgcgaaggtctcgacctcgcgacccacggcgaagccgcttaccactcctga

SEQ ID NO: 67322 - protein, 449 aa, Agrobacterium tumefaciens str. C58
MQLNKFLTLGKLGAAATALMAPAIAFAQDAAPAVAAAAPVPEKADTAFMYIATILVLFMIIPGLALFYGGLVRTKNMLSVLMQCTVIGAVMMLVWVIYGYSFAFGGGTGPYFGGFGKLFLSGVSLDSTSATFSQGVVIYEYTFIAFQMTFAAITPALIIGAFAERVKFSAVILFTILWATFVYFPIAHMVWDANGLIFGMGALDFAGGTVVHINAGIAGLIGAIMVGKRTGFGKDMMAPHSMTLTLVGAAMLWFGWFGFNAGSNLEASGGAVLATMNTFLATAAAIVSWSLVESFTRGKASMLGAASGMIAGLVAVTPAAGSVGPMGAIVLGLIVSPICYFFVSVVKNKFGYDDTADVFGVHGIGGIIGALGTGIFTSPLLGGTGKADFSISSQLWTQFVAVAITIVWCAVVSAILYKIVDVIVGLRVPVEAEREGLDLATHGEAAYHS

SEQ ID NO: 67323 - DNA, 1317 bp, Corynebacterium glutamicum ATCC 13032
  CDS (1)..(1317): transl_table=11
atgggtgcagatcaaattgcagcagtctccggcaattcagcttggatgctgatgtccgcgtcgctcgtgctgctaatgacaccagcactggcacttttctatggcggcatgtctcgtcaaaagtccgtgctcaacatgatgatgatgtcctttggagcattgggcgtcgttactgttatttacctcttgtggggatggtcgatgtcttatggaacccaatcaatcgcgggaatctttgctaacccttttgagttcttcggtcttaaagattccatcgttgatgcagacggcaactacattgagggcgcagctggctacccaaacattattgatatcggattccagcttaccttcgccgttatctccactgcactgatctccggtgcgttggcagagcgtgtgaagttttccacctggcttattttcagcggcgcgtgggtgactttggtgtacttcccactggcacacatggtgtggggtggcggattgttgggccataatgtcactggttttgcttcgtggttgtttggttctaccgatggtgaagccaatatcgctccgatcgactttgctggtggtaccgttgttcacatttcggcgggcacagcggcccttgtgctggcttttatcgtcggcaagcgaaagacgtttggcaaggcaattgccaggccgcacaacctgcccatggtcatgctcggcgctgcgctgttgtggtttggttggttcgggttcaacggtggctcggcgttcgcagccgacggccttgcgggcctggcctgggtgaacaccacggcggcaaccgcagctgcgatgcttggctggttggctactgaaaaattccgcgatggacacgcaacctccttgggtgctgcttctggtgtcgtcgccggtctggtcgcaattactccagcagctggcgcactgaccccagtgacctccctgatcctcggtgcaatcggcggcatcttggcgtgcttgggcgtggggctgaagtaccgcttcggtttcgatgactccctcgacgtagttggtgtgcacctggtcgctggcctgtggggcaccgtgggtgtaggacttcttgccactgacatcggatggtttagtggtggtggcatggatggacttaaactctttattgtccagatcgtcatcgcgctagtcgctgtagttttcgcaggtgtgattactgcgctcatcgcattcgccctgaaggccacagtaggatggcgcgttgatgatgatgtggagcagcaaggcattgatactcacgaacacgcagaatccgcttatgacaccacgggtccggaaattcgttaa

SEQ ID NO: 67324 - protein, 438 aa, Corynebacterium glutamicum ATCC 13032
MGADQIAAVSGNSAWMLMSASLVLLMTPALALFYGGMSRQKSVLNMMMMSFGALGVVTVIYLLWGWSMSYGTQSIAGIFANPFEFFGLKDSIVDADGNYIEGAAGYPNIIDIGFQLTFAVISTALISGALAERVKFSTWLIFSGAWVTLVYFPLAHMVWGGGLLGHNVTGFASWLFGSTDGEANIAPIDFAGGTVVHISAGTAALVLAFIVGKRKTFGKAIARPHNLPMVMLGAALLWFGWFGFNGGSAFAADGLAGLAWVNTTAATAAAMLGWLATEKFRDGHATSLGAASGVVAGLVAITPAAGALTPVTSLILGAIGGILACLGVGLKYRFGFDDSLDVVGVHLVAGLWGTVGVGLLATDIGWFSGGGMDGLKLFIVQIVIALVAVVFAGVITALIAFALKATVGWRVDDDVEQQGIDTHEHAESAYDTTGPEIR

SEQ ID NO: 67325 - DNA, 1209 bp, Methanosarcina acetivorans C2A
  CDS (1)..(1209): transl_table=11
ttgaggtggatagaaatggcaatcgtagcagcagataccgtatgggtattgatttcctctgcccttgtattattaatgcttccagggctcgcactgttttatggcggattggttcagcgtaagaatgtactgagcagcatgatgcattcatttgttgcaatgggtgtcatggctctcgaatgggtaataattggttactcgcttgcgtttgggagcggaaacggtttcataggcagcctggaacacgtattcctgaaaggaattgacccttactcggtaacagggacaattcccacatatgcatttattgcctttcagggaatgtttgcaataattacccctgcccttatctcaggggccattgtcggacgtgtcaagttcaaatcatacatcgcattcatcgccctctggggactcattgtctatgcaccggtctgccactgggtatggggcggtgggttcctcacaggagaagcccttgactttgcaggtggaacggtagtccatataacatcaggcatatcctcactggcaattctgaccttccttggaaagaggagagggtacggcatagattcgataaaaccgcacaatgtcaccctgactcttctggggaccgggctcctctggttcggatggttcgggttcaatgccggctcctctcttgctgcaaatgaaattgcagccctcgcattcattacaaccctcgtagcccccgcagctgcagggtttgtctggatgaccctggaatggatccacctggggcgccctactgccctcggatttgcaacaggcgtcctggcagggcttgttgccataaccccggctgcagggtttgttacccccatggcagcaattccgataggtgtggttacaagctttatctgctaccaggctgtaatgctcaagggaagattaggttatgatgattctcttgatgctttcggagtccacggagtaggcggaattagcggggcaattctgacaggcgtatttgcaagcatagggtcttcaggactccttctcggcaactccgagcaactgatgctccaggtagaaggcgttattgccacgcttgtttacgcaagtgtttgcacccttatcatcgggtttgtactccacaagacgatcgggctcaaggtaagcgagagcgaagaaaatatcgggcttgaccggacacaacacggagaagcagcatataacatttga

SEQ ID NO: 67326 - protein, 402 aa, Methanosarcina acetivorans C2A
MRWIEMAIVAADTVWVLISSALVLLMLPGLALFYGGLVQRKNVLSSMMHSFVAMGVMALEWVIIGYSLAFGSGNGFIGSLEHVFLKGIDPYSVTGTIPTYAFIAFQGMFAIITPALISGAIVGRVKFKSYIAFIALWGLIVYAPVCHWVWGGGFLTGEALDFAGGTVVHITSGISSLAILTFLGKRRGYGIDSIKPHNVTLTLLGTGLLWFGWFGFNAGSSLAANEIAALAFITTLVAPAAAGFVWMTLEWIHLGRPTALGFATGVLAGLVAITPAAGFVTPMAAIPIGVVTSFICYQAVMLKGRLGYDDSLDAFGVHGVGGISGAILTGVFASIGSSGLLLGNSEQLMLQVEGVIATLVYASVCTLIIGFVLHKTIGLKVSESEENIGLDRTQHGEAAYNI

SEQ ID NO: 67327 - DNA, 1347 bp, Streptomyces coelicolor A3(2)
  CDS (1)..(1347): transl_table=11
atggctccagccatcacgctcgccgcagagacggagctctctgccgccaacacgggcttcatgctcatctgctccgccctggtgatgctcatgaccccggccctggccttcttctacggaggcatggtccgcgtcaagagcaccctgaacatgctgatgatgagcttcatcagcctcggcatcgtcaccgtcctgtgggtgctctacggcttttccatggcgttcggcaccgactccggcagcgtcgtcggctggaactccgactgggtgggcctgagcgacatcggcctgaccgagctgtgggacggctacaccatccccgtcttcgtcttcctggtcttccagctgatgttcgccgtcctcacccccgccctgatcagcggggccctcgcggaccgggtgaagttcacggcctgggcgctgttcatcgccctgtgggccacgatcgtctacttcccggtggcccactgggtctggggcgccggcggctgggccttcgagctgggcgtcatcgacttcgccggcggcacggccgtgcacatcaacgccggtgccgccgcgctcggcgtgatcctcgtcatcggcaagcgggtcggcttcaagaaggacccgatgcgcccgcacagcctcccgctggtcatgctcggcgccggcctgctctggttcggctggttcggcttcaacgccgggtcgtggctcggcaacgacgacggcgtcggcgcgctgatgttcgtcaacacccaggtcgccaccggcgccgccgtcctcggctggctcgcctacgagaagatccgccacggcgccttcaccaccctgggcgcggcctccggcgccgtctccgggctggtcgccatcaccccggcaggcggcgccgtctccccgctcggcgcgatcgccgtcggcctcgtcgccggcgtggtgtgcgccatggccgtcggcctgaagtacaggttcggctacgacgactccctcgacgtggtcggcgtccacctcgtcggcggcatcctcggctcgctgctcatcggcttcttcgccagcggcaagggccagtccgacgtcgagggcctcttctacggcggcggcctcgaccagttctggaagcagtgcgcgggcgtcttcggcgtcctcgcctactccctggtcgtctccgcggtcctcgccttcctgctggacaagacgatcggcatgcgggtgtcggaggacgtcgaggtggccggcatcgaccaggccgagcacgccgagaccgcatacgacttcagcggcgccggcggcggtgccgcccggacgaccgccacgccggccgcctccacggccgggtcggccccgagcaagaaggtggacgcatga

SEQ ID NO: 67328 - protein, 448 aa, Streptomyces coelicolor A3(2)
MAPAITLAAETELSAANTGFMLICSALVMLMTPALAFFYGGMVRVKSTLNMLMMSFISLGIVTVLWVLYGFSMAFGTDSGSVVGWNSDWVGLSDIGLTELWDGYTIPVFVFLVFQLMFAVLTPALISGALADRVKFTAWALFIALWATIVYFPVAHWVWGAGGWAFELGVIDFAGGTAVHINAGAAALGVILVIGKRVGFKKDPMRPHSLPLVMLGAGLLWFGWFGFNAGSWLGNDDGVGALMFVNTQVATGAAVLGWLAYEKIRHGAFTTLGAASGAVSGLVAITPAGGAVSPLGAIAVGLVAGVVCAMAVGLKYRFGYDDSLDVVGVHLVGGILGSLLIGFFASGKGQSDVEGLFYGGGLDQFWKQCAGVFGVLAYSLVVSAVLAFLLDKTIGMRVSEDVEVAGIDQAEHAETAYDFSGAGGGAARTTATPAASTAGSAPSKKVDA

SEQ ID NO: 67329 - DNA, 1200 bp, Methanosarcina mazei Go1
  CDS (1)..(1200): transl_table=11
ttgaaaatggctataaacggagcagacactgtatgggtattgctttcatcggcattggtattattaatggttcctgcgctggcactgttctacggagggcttgtccagcgtaaaaacgtcctgagcagcatgatgcattcattcgttgcaatgggcgtcctggctcttgaatggataataataggttactcccttgcgttttcagaaggcaactggtttattggcggccttgagaatgtgtttctgagcgggattgatccttactccgtaacaggtacgattcccacctatgcatttgttgcattccagggaatgttcgcaataattactcctgcacttatatccggtgccatagtagggcgtgtcaagttcaagtcttacatcgcgttcatcctgctctggggccttattgtctatgccccggtatgtcactgggtttggggcggcggattccttaccggagaagcccttgactttgcaggcggtacggttgtccacataactgcaggtatgtcttcacttgcaatactggcatacctcggcaagagaaggggatatggtgttgattccctgaagccgcacaacgttaccctgaccctcctcggagccggacttctctggttcgggtggttcgggttcaacgcaggctcggctcttgctgcaaacgaaatagcagcccttgcattcatgaccacgctcgttgctcccgctgcagcaggttttgtctggatggcgcttgaatgggcgcaccttggacgccccaccgcactcgggtttgcaaccggcatcctggcagggcttgtagggataactcctgctgccggatttgtcactccagtagccgcgattgccataggtgcgattgcaagcttcatatgttaccaggctgtgatgttcaaaaacaggctaggatacgacgattcacttgatgcatttggagttcacggagtcggcggaatagtcggtgcgatattaacaggcgtatatgcaagtgtaggcggagaaggcctacttctcgggaactctgcccagttgatgattcagcttcagggcgtggttatcacaattgtatacgcaatggcctgcaccctgctgataggatttgtactccataaaacgatagggctcaaagtcagtgaaagcgaagaaatcatagggcttgacaaaacccagcatggtgaagcagcatacaacatttga

SEQ ID NO: 67330 - protein, 399 aa, Methanosarcina mazei Go1
MKMAINGADTVWVLLSSALVLLMVPALALFYGGLVQRKNVLSSMMHSFVAMGVLALEWIIIGYSLAFSEGNWFIGGLENVFLSGIDPYSVTGTIPTYAFVAFQGMFAIITPALISGAIVGRVKFKSYIAFILLWGLIVYAPVCHWVWGGGFLTGEALDFAGGTVVHITAGMSSLAILAYLGKRRGYGVDSLKPHNVTLTLLGAGLLWFGWFGFNAGSALAANEIAALAFMTTLVAPAAAGFVWMALEWAHLGRPTALGFATGILAGLVGITPAAGFVTPVAAIAIGAIASFICYQAVMFKNRLGYDDSLDAFGVHGVGGIVGAILTGVYASVGGEGLLLGNSAQLMIQLQGVVITIVYAMACTLLIGFVLHKTIGLKVSESEEIIGLDKTQHGEAAYNI

SEQ ID NO: 67331 - DNA, 1476 bp, Xanthomonas campestris pv. campestris str. ATCC 33913
  CDS (1)..(1476): transl_table=11
atgcgctctgaccccacccaccccggagtccctatgaagacaggtcttgttgccgggtggaaagcccggttctacagcgtctgcatgctgatgctgttcagtgcgctggtggttggcggcttgggcaacgcgcaggctcagtccggcgcgcaggtcaccccattgccgaccgagccggtcaccaccgaaccgctccccaccgcacagccggccgccgcgccggttgcggcggccgaggcggcgccagtggtggagaagggtgacgtcgcctggatgctgacctccacgttgctggtgctgctgatggtggtgccgggcctggcgctgttctacggcggcatggtgcgcgccaagaacgtgttgtcggtgctgatccaggtggcggtggtgttctcgctgctggtggtgctgtgggtgttctacggctacagcctggcgttctccggcgaaggcccgtggatcggcaatctggacaaggccttgctcaagggcgtgaccatcgaaacgttgtcggccaccttcaccaagggcgtcagcctgccggaatacgtgttcgtggcgttccaggccaccttcgccggcatcaccggtgcgctgatcgtcggtgcgtttgccgaacgcgccaagttcgctgcggtgctgctgttctcggtgatctggttcaccttcggctatctgccgctggcgcacatggtctgggccaccggcggctatctgttcggcttgggtgcgctggatttcgccggtggcacggtggtgcacatcaatgccggtgtcgccggtctggtgggcgcctacttcgtgggcaagcgggccgggctcgggcgtgaggcgatcaagccgcacaacgtgaccctgaccttcgtcggtgcttcgctgctgtgggtgggctggttcggcttcaacgccggttccaacctggaagccaatgccggtgcggcgctggccttcctcaacaccttgctggccaccgcagccgcggtcctgggctggtcgctcaccgagaagatcatcaagggcaagtcctccgccctgggcgtggcctcgggcatggtcgccggcctggtcggcatcaccccggcctgcggcacggtgggcccgttcggcgcgatcatcattggcctggcggccggcgtgctgtgcgtgtggggcgtcactggcctcaagcgcctgcttggtgccgacgacagcctggacgtgttcggcgtgcatggcctgggcggcatcatcggcgcgatcctcaccggcgtgttctcggcggcctcgctcggcggccagaagggcggcgactacgacatgctgcatcaagtcggtatccaggcgctgggcgtgggcatcacggtgggctggatcggcgtggtgtcggtggtgggctttgtggtcgccaagctggtgttcggcctgcgcgtcaccgaagaagccgagcgtgaggggttggacatcacctcgcacggcgaagctgcttacgagtcctga

SEQ ID NO: 67332 - protein, 491 aa, Xanthomonas campestris pv. campestris str. ATCC 33913
MRSDPTHPGVPMKTGLVAGWKARFYSVCMLMLFSALVVGGLGNAQAQSGAQVTPLPTEPVTTEPLPTAQPAAAPVAAAEAAPVVEKGDVAWMLTSTLLVLLMVVPGLALFYGGMVRAKNVLSVLIQVAVVFSLLVVLWVFYGYSLAFSGEGPWIGNLDKALLKGVTIETLSATFTKGVSLPEYVFVAFQATFAGITGALIVGAFAERAKFAAVLLFSVIWFTFGYLPLAHMVWATGGYLFGLGALDFAGGTVVHINAGVAGLVGAYFVGKRAGLGREAIKPHNVTLTFVGASLLWVGWFGFNAGSNLEANAGAALAFLNTLLATAAAVLGWSLTEKIIKGKSSALGVASGMVAGLVGITPACGTVGPFGAIIIGLAAGVLCVWGVTGLKRLLGADDSLDVFGVHGLGGIIGAILTGVFSAASLGGQKGGDYDMLHQVGIQALGVGITVGWIGVVSVVGFVVAKLVFGLRVTEEAEREGLDITSHGEAAYES

SEQ ID NO: 67333 - DNA, 1476 bp, Xanthomonas axonopodis pv. citri str. 306
  CDS (1)..(1476): transl_table=11
atgcgctctgaccccaccagccccggagttcgtatgaagacagctctttttgccgggtggaaagcccggttctacagcgtgtgcatgctgatgctgttcagcgcgctgatggtgggcggcatgggcagtgcgcatgcgcagtccacgccgcaggtcaccccgctgccgaccgagccggtcaccaccgaaccgctgccgtcggcgcagccggccgccccgccggccgccgccgccgaagccgcaccggtcgtggagaagggcgatgtcgcctggatgctgacctccaccttgctggtgttgctgatggtggtgccgggccttgcgctgttctacggcggcatggtgcgcgccaagaacgtgttgtcggtgctgatccaggtggcggtggtgttctcgctgctgaccgtgctgtgggtgttctacggctacagcctggcgttctccggcgaaggcgcgtggatcggcaatctggacaaggcgttgctcaagggcgtcaccatcgaaaccctggcggcgaccttcaccaagggcgtgagcctgccggaatacgtgttcgtggcgttccaggcgaccttcgccggcatcaccggcgcgctgatcgtgggcgcctttgccgaacgcgccaagttcgcggcggtgctgctgttctcggcgatctggttcaccttcggctacctgccgctggcgcacatggtctgggccaccggtgggtatctgttcgggttgggcgcgttggatttcgccggcggcaccgtggtgcatatcaacgccggcgttgccggcctggtcggcgcctacttcgtcggcaagcgtgccggactgggacgtgaggcgatcaagccgcacaacgtgaccctgaccttcgtcggtgcctcgctgctgtgggtgggctggttcggcttcaacgccggttccaacctggaagccaatgccggtgcggcgctggccttcctcaacaccttgctggccactgccgctgccatcctgggctggtcgctgaccgagaagatcatcaagggcaagtcgtccgccctgggcgtggcctcgggcatggtggccggcctggtcggcatcaccccggcctgcggcacggtcggcccgttcggcgcgatcgtcattggtctggcggccggcgtactgtgcgtgtggggcgtcaccggcctgaagcgcctgttgggcgcggacgacagcctggacgtgttcggcgtgcatggcctgggcggcatcatcggcgccatcctgaccggtgtgttctcggcggcctcgctgggcggccagaagggcggcgattacgacatcgtccaccaggtcggcatccaggcgctgggcgtcgggatcacggtcggctggatcggcgtggtgtcggtggtggggttcgtggttgccaagctggtgttcggcctgcgcgtgagcgaagaagccgagcgcgagggcctggacatcacctcgcacggcgaagccgcgtacgagtcgtga

SEQ ID NO: 67334 - protein, 491 aa, Xanthomonas axonopodis pv. citri str. 306
MRSDPTSPGVRMKTALFAGWKARFYSVCMLMLFSALMVGGMGSAHAQSTPQVTPLPTEPVTTEPLPSAQPAAPPAAAAEAAPVVEKGDVAWMLTSTLLVLLMVVPGLALFYGGMVRAKNVLSVLIQVAVVFSLLTVLWVFYGYSLAFSGEGAWIGNLDKALLKGVTIETLAATFTKGVSLPEYVFVAFQATFAGITGALIVGAFAERAKFAAVLLFSAIWFTFGYLPLAHMVWATGGYLFGLGALDFAGGTVVHINAGVAGLVGAYFVGKRAGLGREAIKPHNVTLTFVGASLLWVGWFGFNAGSNLEANAGAALAFLNTLLATAAAILGWSLTEKIIKGKSSALGVASGMVAGLVGITPACGTVGPFGAIVIGLAAGVLCVWGVTGLKRLLGADDSLDVFGVHGLGGIIGAILTGVFSAASLGGQKGGDYDIVHQVGIQALGVGITVGWIGVVSVVGFVVAKLVFGLRVSEEAEREGLDITSHGEAAYES

SEQ ID NO: 67335 - DNA, 1302 bp, Brucella suis 1330
  CDS (1)..(1302): transl_table=11
atgctcataacaggaagaaacaagcaaacggccctcgtggccagcctgcccgcacttttcgccctggcggggacggcaatggcgcaggacaccgcaccggcaccaaccctcgatacgggcgatacggcctggatgctgacttcaaccgcgcttgtgttgatgatgaccatacccggtctggcgctgttttatggcggcatggtgcgcaagaagaacgtgctgtccacggtgatgcaaagctttgccatcacctgcctcatgtccatcctgtggatgatcgcaggctattcgctggcctttaccgatggcggctcgctccattcctatattggcggcttctcgaaggttttcttctccggagtgacgatggaatcgctcaccggaaccatccctgaatatctcttcatcaccttccagatgacgtttgcgatcatcacgcccgcgctgattaccggctcgtttgcagagcgcatgaagttttcctccatgctggttttcctgacgctgtggctgttcatcgtttatgttccggttgcccattgggtctggggcgggggcttcatggcttccgatggcgtgcttgattttgccggtggcacggtcgttcatatcaatgccggtgttgccggtctggtggcagccctcgttatcggcaagcgcgatggttatggccacaccaacatggcgccgcacaatctcgtgctctcggtcatcggtgctgcccttctgtgggtgggctggttcggcttcaatgccggttctgccgccggtgccaatgcgcttgccggtgtcgccatgctcaacacgcaggtcgcaaccgccggtgctgctcttgcgtggatgtttgtggaatgggctatttccggcaagccaagtgtgctcggcattatttccggcgctgttgcgggccttgtcgcggtcacgcccgctgccggttttgtcaatccgaccggcgcgcttatcatcggcatcgttgccggtgcggtctgctatgtggcggctgtgaagatcaagcatgtgctgggctatgacgattcgctcgatgcgttcggcgtccatggcgtcggtggttttgtcggcgcggtgctgaccggcttttttgccgatgctacgatcaatccggccagcgaaggggcaaccatcggcaagcagttcttcggcgccgccatcacgatcatttatacggcgattgccaccgtgatcatcctttacgtggtcaaggccatcatgggcttgcggcccggcaagcaggccgagatcgaggggctggatatcgccttgcatggggaggcggtgcagtga

SEQ ID NO: 67336 - protein, 433 aa, Brucella suis 1330
MLITGRNKQTALVASLPALFALAGTAMAQDTAPAPTLDTGDTAWMLTSTALVLMMTIPGLALFYGGMVRKKNVLSTVMQSFAITCLMSILWMIAGYSLAFTDGGSLHSYIGGFSKVFFSGVTMESLTGTIPEYLFITFQMTFAIITPALITGSFAERMKFSSMLVFLTLWLFIVYVPVAHWVWGGGFMASDGVLDFAGGTVVHINAGVAGLVAALVIGKRDGYGHTNMAPHNLVLSVIGAALLWVGWFGFNAGSAAGANALAGVAMLNTQVATAGAALAWMFVEWAISGKPSVLGIISGAVAGLVAVTPAAGFVNPTGALIIGIVAGAVCYVAAVKIKHVLGYDDSLDAFGVHGVGGFVGAVLTGFFADATINPASEGATIGKQFFGAAITIIYTAIATVIILYVVKAIMGLRPGKQAEIEGLDIALHGEAVQ

SEQ ID NO: 67337 - DNA, 1332 bp, Pseudomonas putida KT2440
  CDS (1)..(1332): transl_table=11
atgactctgcgtaagatcgcagggctaggagccctattgtccctcgtaatgcccgggcttgccctggcagaggaagctgccccagcgcttaattccggcgacaccgcctggatgctgaccgcaacggcgctggtgctgttcatgactattccgggcttggccctgttctatggcggcatggtgcgatccaagaacgtgctgtcggtgatgatgcagtgctttgcaatcaccggcctgatgagcattctctgggtcgtctacggctacagcatggccttcgataccgccggtatggaaaagggcgtgctcaacttcaactccttcgttggcggcttctccaaggccttcctcagcggtgtcacgcccgacagcctgacctcggccaccgcgctgttccctgaagcggtgttcatcaccttccagatgacgttcgccatcatcaccccggcgttgatcgtcggtgcctttgccgagcgcatgaagttctcggcgatgctcgtattcatgggtatctggttcaccctggtgtatgcgccgatcgcacacatggtgtggagcggtgacggtgccctgatgtgggactggggcgtactggacttcgctggcggcaccgtggtgcacatcaacgccggtatcgcaggcctggtctgctgcctggtactgggcaagcgcaagggctacccgaccacgccgatggccccgcacaacctcggctataccctgatgggcgcagcgatgctgtggatcggctggttcggtttcaacgcaggctctgctgctgccgccaacggtactgccggcatggccatgctggtcactcagatcgctaccgccgccgccgccctgggctggatgttcgccgagtgggtcggtcacggtaagccaagtgctctgggcatcgcttcgggcgtggttgctggcctggtcgccatcaccccggctgcgggcaccgtcgggccgattggcgcgctgatcatcggcctggtttcgggtgtgctctgctacttctgcgccaccacgctcaagcgcaaactcggctatgacgattcgctggatgccttcggcgtgcacggtgttggcggcatcatcggtgccatcctcacgggtgtattcgcggctccggcgctgggcggcttcggtaccgtcaccgacatcggcatgcaagtctggatccaggccaaaggtgtgattttcaccgtggtctacaccgccatcgtcacctacgtgattctcaaggtgctggatgtggtgatgggcctgcgggtcaacgaagaagaagagtcggtcggcctcgacctggctcagcacaacgagcgcggctacaacctgtaa

SEQ ID NO: 67338 - protein, 443 aa, Pseudomonas putida KT2440
MTLRKIAGLGALLSLVMPGLALAEEAAPALNSGDTAWMLTATALVLFMTIPGLALFYGGMVRSKNVLSVMMQCFAITGLMSILWVVYGYSMAFDTAGMEKGVLNFNSFVGGFSKAFLSGVTPDSLTSATALFPEAVFITFQMTFAIITPALIVGAFAERMKFSAMLVFMGIWFTLVYAPIAHMVWSGDGALMWDWGVLDFAGGTVVHINAGIAGLVCCLVLGKRKGYPTTPMAPHNLGYTLMGAAMLWIGWFGFNAGSAAAANGTAGMAMLVTQIATAAAALGWMFAEWVGHGKPSALGIASGVVAGLVAITPAAGTVGPIGALIIGLVSGVLCYFCATTLKRKLGYDDSLDAFGVHGVGGIIGAILTGVFAAPALGGFGTVTDIGMQVWIQAKGVIFTVVYTAIVTYVILKVLDVVMGLRVNEEEESVGLDLAQHNERGYNL

SEQ ID NO: 67339 - DNA, 1311 bp, Streptomyces avermitilis MA-4680
  CDS (1)..(1311): transl_table=11
gtgaccctggccgccgcccggatcgacaccggcgacaccgcatggctgctcgccgccaccgcgctcgttctcctgatgacccccggcctggccctgttctacggcggcatggtccgcacgaagagcgtcctcaacatgctgatgatgagcttcgtgtcgatcgccctggtcacggtcgtgtggctggccgccggctactcgctcgcgttcggcgacgacctcgcgggcggactcatcggcggcctggaccacgccggcctggcggacctcggtcccgccgacgtccacggcacggtccccaccctcctcttcgccaccttccagctcaccttcgcgatcatcaccgccgccctcatcagcggcgccatcgcggaccgggcgaaattcgcggcctggctggtcttcgtccccctctgggcgctgctcgtatacgttcccgtcgcccactgggtgtggggccccggcggctggatcctcgaccgcctcggcgccctcgatttcgcgggcggactccccgtcgagatcacgtcgggcgcctcgggcctggccctgtgcctggtcctcgggccgcgcctcggcttcaagaaggacgccatgcgcccgcacaacctgccgatggtgatgctgggcgccggtctgctgtggttcggctggttcggcttcaacgcgggttcggcgctcggcgccaacggactggccgccgcggccttcctcaacacgctcgccgccggctgcaccggcctgctcggctggctcttcgtggagcagaagcgcgacggccacccgaccacgctgggcgccgcctccggcgcggtcgcgggcctggtcgccatcaccccgtcctgcggcgcggtctccctgctcggcgcgctggtcgtggggctcgccgccggtgtcgtctgctcgtacgccgtgggctggaagttcaagctgaactacgacgactcgctggacgtcgtcggcgtccacctggtcggcgggatcatcggcaccctgctgatcggggtcttcgcggccaaggagatgacgggcggcaccgagggcctgctctacggcggcgggctcggacagctcggcaagcagctggtggcggtcgtggccgtgggggcgtacgccttcgccgtcacctacggcctcgggaagctgatcgacaaggtcatgggcctgcgggcggccgaggacgacgagcaccagggcctggaccttacggtgcacgccgagaccgcttacgatcacgggattctggggcacggcgccccaagctccgcgtccgtcgtccccaccgcgcagaaggtcaagagccaggcatga

SEQ ID NO: 67340 - protein, 436 aa, Streptomyces avermitilis MA-4680
MTLAAARIDTGDTAWLLAATALVLLMTPGLALFYGGMVRTKSVLNMLMMSFVSIALVTVVWLAAGYSLAFGDDLAGGLIGGLDHAGLADLGPADVHGTVPTLLFATFQLTFAIITAALISGAIADRAKFAAWLVFVPLWALLVYVPVAHWVWGPGGWILDRLGALDFAGGLPVEITSGASGLALCLVLGPRLGFKKDAMRPHNLPMVMLGAGLLWFGWFGFNAGSALGANGLAAAAFLNTLAAGCTGLLGWLFVEQKRDGHPTTLGAASGAVAGLVAITPSCGAVSLLGALVVGLAAGVVCSYAVGWKFKLNYDDSLDVVGVHLVGGIIGTLLIGVFAAKEMTGGTEGLLYGGGLGQLGKQLVAVVAVGAYAFAVTYGLGKLIDKVMGLRAAEDDEHQGLDLTVHAETAYDHGILGHGAPSSASVVPTAQKVKSQA

SEQ ID NO: 67341 - DNA, 1233 bp, Bacillus cereus ATCC 14579
  CDS (1)..(1233): transl_table=11
atgaatatgggagatacagtttttatgtttgtgacgacagtaatggtcatgttgatgacaccaggattggcacttttttatggaggtatggttcgcagcaaaaatgtactcagtacaacgatgcatagttatagtgcaatggctatcgtttcgattcaatggattgttatcggctattctttatcattcggaccagattggcacgggcttattggtacacttgattggttcggtctaaacggagttacctacgcaccaaatccagactactcatctactattcctcacaatttattcatgatgtttcaactcatgttcgccattttaactccagctttaatttcaggtgcatttgctgaaagaatgcgattttctgcctttcttatttttatccttttatggacaacgattgtttacaatcctgtcgctcattgggtatggggcgtcggcgggtggctaagggaatttggtgcactagacttcgctggcggaaacgtcgttcacatcacttccggagttgctggtcttgtattagctattttcctcggaaaacgaaaaaacataaatggttcttctcctcaccatttgccatttacaatgttaggcgcaggcttattatggtttggctggttcggttttaacgtcggcagcgcattatccttaaacgacgtagctttaactgcatttattaatacaaatatagccgctgctgcctcagcattaacttggatgctttcagagtggttcttccaatcaaaaccgactgcgatgggagctgcttgtggcgccgtttccggtctagtcgctattacaccagcttgcgggttcgttacacctttctcagctcttcttatcggagcaattggcggcgtattatgcttcggagcggtctttttcttaaaaacaaaattcggatacgacgatacactcgatgcattcggatgtcacggcatcggtggaacttggggcggtattgcgacaggattatttgcaactactgccgtaaacggcgatggcgctaacggattattttacggaaacgcctcgctgctgttgaaacaacttgtagcgatcggcgcaacatatgcgttcacaattataatgacgtatgccattattaaagcaatcaacttcttcctccctgtccgggtagatgagcacgaggaacatatgggacttgatatttcgatgcacggggagaaagcttatgagtatactgagcgagtgaactaa

SEQ ID NO: 67342 - protein, 410 aa, Bacillus cereus ATCC 14579
MNMGDTVFMFVTTVMVMLMTPGLALFYGGMVRSKNVLSTTMHSYSAMAIVSIQWIVIGYSLSFGPDWHGLIGTLDWFGLNGVTYAPNPDYSSTIPHNLFMMFQLMFAILTPALISGAFAERMRFSAFLIFILLWTTIVYNPVAHWVWGVGGWLREFGALDFAGGNVVHITSGVAGLVLAIFLGKRKNINGSSPHHLPFTMLGAGLLWFGWFGFNVGSALSLNDVALTAFINTNIAAAASALTWMLSEWFFQSKPTAMGAACGAVSGLVAITPACGFVTPFSALLIGAIGGVLCFGAVFFLKTKFGYDDTLDAFGCHGIGGTWGGIATGLFATTAVNGDGANGLFYGNASLLLKQLVAIGATYAFTIIMTYAIIKAINFFLPVRVDEHEEHMGLDISMHGEKAYEYTERVN

SEQ ID NO: 67343 - DNA, 1239 bp, Bordetella bronchiseptica RB50
  CDS (1)..(1239): transl_table=11
atggataaagccgatatctcctggctgctggtttcgacactgctggtactgatgatggcggtgcccggcctggccctgttctacggcggcctggtgcgcagcaaaaacgtactgtcggtgctgctgcaagtgctgtgcaccttcgctctcgggctgctgctgtggttcgcctacggctactcgctggccttcaccgaaggcaacgccttcttcggcggcctgtcgcgcacgttcttctccggcatgttcacgccggccgatggcacgtacacgctgtcgggcacgctcaccgagctcttgttcgcctcgttccaggcgaccttcgcgggcatcacctgcgccctgatcgtgggcagcttcgccgagcgcgcgcgtttttcggccgtgctggtgttcacggtgatctggttcacctttgcctatatcccgatcgcgcacatggtctggttcgcctccgaaaccgcgccgggcctgctcaatgcccgcggcgcgctggatttcgccggcggcaccgtggtgcacatcaatgcgggagtggccggactggtcggcgcgtacgtggtaggccgacgcatcggctatggtcgcgaagcgatgcagccgcacaacctgccgatgaccttcatcggcgcggcgctgctgtgggtcggctggttcggcttcaacgccggctcgtcgctggcggccagcgacggcgccaccctggcgttcttcaacaccatgatcgccaccgcgggcgcagtgctgggctggctgttcacggaatgggccgtcaagggcaaaccctcgatgctgggtgcggcctcgggcgccgtggcgggcctggtcggcatcacgcccgccgccggcctggtcggcccggtcggcgccctggtcatcggcgtgaccgccggcgtggtctgcgtctggggagtaaacggcctgaagcgtctgctgcgcgccgatgacgccctcgatgtgttcggcgtccatggcgtgggcggcatcgtcggcgccctgctgaccggggtgttcaatgccaaggtgctgggcggccccggcctggacagcgctggcgcaatcgccggccaagtgtgggtgcagctcgaaggcgtgctgctgacgatcgtgtggtccgccgtggtggcctggatcgcctacaagatcgccgacaaactgtgcggactgcgcgtaccggaagaccaggaacgcgaaggactggacgtgaccagccacggcgaatcggcctaccacagctga

SEQ ID NO: 67344 - protein, 412 aa, Bordetella bronchiseptica RB50
MDKADISWLLVSTLLVLMMAVPGLALFYGGLVRSKNVLSVLLQVLCTFALGLLLWFAYGYSLAFTEGNAFFGGLSRTFFSGMFTPADGTYTLSGTLTELLFASFQATFAGITCALIVGSFAERARFSAVLVFTVIWFTFAYIPIAHMVWFASETAPGLLNARGALDFAGGTVVHINAGVAGLVGAYVVGRRIGYGREAMQPHNLPMTFIGAALLWVGWFGFNAGSSLAASDGATLAFFNTMIATAGAVLGWLFTEWAVKGKPSMLGAASGAVAGLVGITPAAGLVGPVGALVIGVTAGVVCVWGVNGLKRLLRADDALDVFGVHGVGGIVGALLTGVFNAKVLGGPGLDSAGAIAGQVWVQLEGVLLTIVWSAVVAWIAYKIADKLCGLRVPEDQEREGLDVTSHGESAYHS

SEQ ID NO: 67345 - DNA, 1311 bp, Chromobacterium violaceum ATCC 12472
  CDS (1)..(1311): transl_table=11
atgaaaaagatactcgctgcaatggcttccgggctcgccgccctctccctgcccgcgctggccgatgcgccggccggcccggcggtggccgccgccaaggtgatcaactccggcgacaccgcctggatgctgacctccaccgccctggtgctgttcatgaccattcccggcctggcgctgttctatggcggcatggtccgcaagaagaacgtgctggccacgctgatgcagagcttcgccatcaccgcgctggtgaccgtgctgtgggccgtcgtcggctacagcctggccttcaccgtcggcaccccctatatcggcgacctgtcccgcgtgctgctggacggcatggtgtacatgaaggacgccggcaagctggcggtgcatccgctggccggcaccatcccggaatcggtgttcatgaccttccagatgaccttcgccatcatcaccccggcgctgatcaccggcgccttcgccgagcggatgaagttctctgcgatgctggtcttcatggcgctgtggtctctgctggtctatgtgccggtcgcccactgggtatgggcgccgggcggctggatgggcgacaagggcgtgctggacttcgccggcggcaccgtggtgcacatcaatgccggcgtggccggcctggtgaccgcgctggtgctgggcaagcgcgtcggcttcggccgcgaggcgatgccgccccacaacctggtgctgaccctggtgggcgcgtcgatgctgtgggtgggctggttcggcttcaacgccggctcggcgggcgccgccgacggccgcgccggcatggcgatggtcaccacccaggtcgccaccgcgatggccgcgctggcctggatgttcgccgaatggatcgccaagaaaaagccttcggtactgggcatcgcctccggcgcggtggccggcctggtggccatcaccccggccgccggcttcgtcgacgtcaagggcgcgctggccatcggcctggccgccggcgtgatctgcttctggggcgccaccggcctgaaacacatgatgggctacgacgactcgctggacgctttcggcgtgcacggcgtgggcggcatcctgggcgcgctgctgaccggcgtgttcgcggtcaaggacatcggcggcgccgacggcagcctggccacccaggcgctgggcgtgggcgtgaccatcgtctactgcggcgtggtcaccttcatcctgctgaagctggtggacatcgtgctcggcctgcgcgtcgcggaggacgaggaacgcgaaggcctggatctggtgctgcacggcgagcgggtggaataa

SEQ ID NO: 67346 - protein, 436 aa, Chromobacterium violaceum ATCC 12472
MKKILAAMASGLAALSLPALADAPAGPAVAAAKVINSGDTAWMLTSTALVLFMTIPGLALFYGGMVRKKNVLATLMQSFAITALVTVLWAVVGYSLAFTVGTPYIGDLSRVLLDGMVYMKDAGKLAVHPLAGTIPESVFMTFQMTFAIITPALITGAFAERMKFSAMLVFMALWSLLVYVPVAHWVWAPGGWMGDKGVLDFAGGTVVHINAGVAGLVTALVLGKRVGFGREAMPPHNLVLTLVGASMLWVGWFGFNAGSAGAADGRAGMAMVTTQVATAMAALAWMFAEWIAKKKPSVLGIASGAVAGLVAITPAAGFVDVKGALAIGLAAGVICFWGATGLKHMMGYDDSLDAFGVHGVGGILGALLTGVFAVKDIGGADGSLATQALGVGVTIVYCGVVTFILLKLVDIVLGLRVAEDEEREGLDLVLHGERVE

SEQ ID NO: 67347 - DNA, 1314 bp, Wolinella succinogenes DSM 1740
  CDS (1)..(1314): transl_table=11
atgaaaatcgttaaacttttgatcttggccctgctaccggttctgcttttcggagacgaagccgcagcggaggcagcagagaccgctttggaattggacgccgcgaacacggcttggatgttagtggccacagcctttgtcatgctcatgacacccgctggcttggctctcttttatggaggcatgacgcgctctaagaatatgctcaacaccatcggcatgagcgtggtgggctacattctcgcctctcttgtttgggtgggctggggttatggcctagcctttggtgaagacattggcggatttgtgggcgctttggatggattcttcctcagcaatgttaaggtgactgatatttgggaaggcggaaatattcccgtgctcctattcgctgctttccaaatgacttttgcgggtattaccgtagccttggcaagtggatcagtcattgagcgactcaaattctccacatggattctctttgtggtgctttgggtcaccgtggtttacgctcctgtagcacactgggtgtggggcggaggcttcttggctaatgagggtgttcttgattttgccggaggaaccgttgttcatatcaacgctggggttgcaggtctagtcatggcctatatgcttggcaaacgaagcgacaaagataaggcaatcttcccttcatctgtgactttgaccatgctaggggctattcttctatggtttggatggtttggtttcaacgccggaagcgagcttgctgctgatggaatcgccgctagtgctttcatggtgaccaacactgccgcagcggcagcggctttggcttggatgctcattgaatacgccgtctacaagaagttcaccctcatcggtatcgcctcagggattgtggcgggtctcgtggccatcactcctgcagcgggctttgtagacactcctgcctcagtgatcattggtcttgtagcgggtcttgtggccttctttggtatccatgggctcaaaaaagccttgggggcagacgactctctagatgcctttggaatccatggagttgcgggtatctggggagctttggcgacaggactctttgccaaccccgaagtcaacgagctaggcacgggtcttttctatggaaatgcaggtcaattcctcatccagcttgagggcgtagtggtcactatggtctttaccgccatcgccactgccatcgtcttcaagatcgtctgcttgattactggaggaggaagagtggatgcccaagaagagaccatgggtctggatgagtccacccacggcgaaaaaagctttcacttaaagtaa

SEQ ID NO: 67348 - protein, 437 aa, Wolinella succinogenes DSM 1740
MKIVKLLILALLPVLLFGDEAAAEAAETALELDAANTAWMLVATAFVMLMTPAGLALFYGGMTRSKNMLNTIGMSVVGYILASLVWVGWGYGLAFGEDIGGFVGALDGFFLSNVKVTDIWEGGNIPVLLFAAFQMTFAGITVALASGSVIERLKFSTWILFVVLWVTVVYAPVAHWVWGGGFLANEGVLDFAGGTVVHINAGVAGLVMAYMLGKRSDKDKAIFPSSVTLTMLGAILLWFGWFGFNAGSELAADGIAASAFMVTNTAAAAAALAWMLIEYAVYKKFTLIGIASGIVAGLVAITPAAGFVDTPASVIIGLVAGLVAFFGIHGLKKALGADDSLDAFGIHGVAGIWGALATGLFANPEVNELGTGLFYGNAGQFLIQLEGVVVTMVFTAIATAIVFKIVCLITGGGRVDAQEETMGLDESTHGEKSFHLK

SEQ ID NO: 67349 - DNA, 1437 bp, Gloeobacter violaceus PCC 7421
  CDS (1)..(1437): transl_table=11
atgttaatgaaatgtaaatggaaatggggattgggcacgctggcagcggctctcgccactgccgccccggcgtttgcccaggacgcgccgaagatcgacaccggcgacaccgcctgggtgctggtttcggccgcgctggtgctgctgatgacccccggcctggcctttttctacggcgggctggtgcgaggcaagaacgcactgaacactttgatgatgagttttgttgccctcggggtgatcgcgctcgtttggacgctggtgggctactcgatcgcttttggacccggtaacggttactttggcagcttcgcctggctcggcctcaacggggtcgggcaggatccaaacaccgcccaggctgccaccgtgccgcacctggcgttcatgatttttcagatgatgtttgcggtgattaccccggcgctgatttccggtgccatcgtcgatcgcatgaagttcaagacctacgtcgtgttcatcatgatctggtcggtcgtggtctactcgccggtggcccactgggtctggtcgctgggtaaccccgacccgaccgatgcggccaagatgctgcctggctggctcggggctatcggggcgctcgactttgccggcggtacggtggtgcacctgacggccggtatctcggctttggtggcggcgatcattcttggtccgcgcaaaggctttcccaaccagccgatgactccccacaacgtgccttttgtgctgttgggagcggggctgttgtggttcggctggttcggcttcaacgccggttcggcgctcgccgccaatggcctcgcttcgctggcttttgtgacgacgaatgtcgccacggcggcggctctatccacctggcttttgcttgacacgtttatcggcggcaaaccgacggcggtgggtgcagccaccggtgcggtcgtcggtctggtggcaatcaccccggcggcgggttttgtcagcccgctttcgtcgattgcgatcggcggtatcgccgcgatcatctccttcgccgccattcaactgaagaaaaagctcaactacgacgattcgctcgacgtgtttgcctgccacggcatgggcggtctgaccggcgccattctcactggggtgtttgccgacaaatcgctcaattccctgggtgataacggcttgctcctgggcaacggggcgcagcttattgagcaattgattggtgtcggtgccgttgccgtctacgcagcggtctgcacgacggtcattttgctggcgctcaagttcaccctgggactgcgcccgagcgaggaagccgagcaggagggcctcgacaccgccgagcacggcgaggaagcctacaccggcagcatcggcggccttggcgccatggaagaagcgatgtcctccacttcccagggccagggttttacccgaccggcgacccagcagcaagaatag

SEQ ID NO: 67350 - protein, 478 aa, Gloeobacter violaceus PCC 7421
MLMKCKWKWGLGTLAAALATAAPAFAQDAPKIDTGDTAWVLVSAALVLLMTPGLAFFYGGLVRGKNALNTLMMSFVALGVIALVWTLVGYSIAFGPGNGYFGSFAWLGLNGVGQDPNTAQAATVPHLAFMIFQMMFAVITPALISGAIVDRMKFKTYVVFIMIWSVVVYSPVAHWVWSLGNPDPTDAAKMLPGWLGAIGALDFAGGTVVHLTAGISALVAAIILGPRKGFPNQPMTPHNVPFVLLGAGLLWFGWFGFNAGSALAANGLASLAFVTTNVATAAALSTWLLLDTFIGGKPTAVGAATGAVVGLVAITPAAGFVSPLSSIAIGGIAAIISFAAIQLKKKLNYDDSLDVFACHGMGGLTGAILTGVFADKSLNSLGDNGLLLGNGAQLIEQLIGVGAVAVYAAVCTTVILLALKFTLGLRPSEEAEQEGLDTAEHGEEAYTGSIGGLGAMEEAMSSTSQGQGFTRPATQQQE

SEQ ID NO: 67351 - DNA, 1332 bp, Rhodopseudomonas palustris CGA009
  CDS (1)..(1332): transl_table=11
atgaccttgttgctacgccgcgcggcgtcggccgcgacgggctacatacttgcaacattcggccttgcggcagtcggcgtcacgccggcgctggcgcaggggatggccacggcggcgccgggcatcagcccggccgacaccgcctggatgacggtcgccaccgccttcgtgctgatgatgacgatccccggcctggcgctgttctactccggcatggtgcgcaagaagaacgtgctggccacgatggcgcagagcctcgcggctgtggcgctgatctcgatcctgtgggtggcattcggctactcgctggccttcaccggcagcggcagcctgatcggctcgttcgaccggatcttcctggccggcatgaccatggacagcgtcaatccggcggccaagaccatcccggaagcgctgttcatgctctatcagatgactttcgcggtcatcacggtggccctggtggccggctcggtcgccgaccggatgcggttttccgcctatctgttgttctcgatcggctggttcatcttcgtctatgtgccgctggcgcattggatctggggcggcggctttttgggcgcaatgggcgtgctggacttcgccggcggcctggtggtgcacctgtcggccggcaccgggggcttggtggcggcgatcgtgatcggccgccgccatggctacggcatggaaaacctgtcgccgttcgacctgtcgctggcggtgatcggcactggcctgttgtgggtcggctggttcggattcaatggcggctccgccctggcggcggattcccgtgcggtgttcgccatcacggcgacgcatctggcggcgtgctcgggcgcgctgacctggggcgcaatcgaatggatggcgcggcgcaagccgtcggtgctgggcatgatttccggtgccgtcgccggcctcggcaccatcacaccggcatcgggctatgtcgaaccctggcacggcgtggtgatcggcatcgtcgccggcctgatctgttactgggcctgcacttggctgaagcaccggctgcgctacgacgactcgctcgacgtgttcggcgtccacggcatcggcggcctgaccggcacgttcctggccggcattttcgccacagcctcgatcggtggcgtctcgggcgccctcgagggttcgtggatgcagccgctgacgcagctcgccggtattctagtcaccttcgtgtggtccgccgtggccacctatgtgttgctgaaggccgtcagcctgttcgtggcgctgcgcgtctcccgtgagcacgagatcgaaggcctggacatttcgcagcatggcgaggcgctgcagtaa

SEQ ID NO: 67352 - protein, 443 aa, Rhodopseudomonas palustris CGA009
MTLLLRRAASAATGYILATFGLAAVGVTPALAQGMATAAPGISPADTAWMTVATAFVLMMTIPGLALFYSGMVRKKNVLATMAQSLAAVALISILWVAFGYSLAFTGSGSLIGSFDRIFLAGMTMDSVNPAAKTIPEALFMLYQMTFAVITVALVAGSVADRMRFSAYLLFSIGWFIFVYVPLAHWIWGGGFLGAMGVLDFAGGLVVHLSAGTGGLVAAIVIGRRHGYGMENLSPFDLSLAVIGTGLLWVGWFGFNGGSALAADSRAVFAITATHLAACSGALTWGAIEWMARRKPSVLGMISGAVAGLGTITPASGYVEPWHGVVIGIVAGLICYWACTWLKHRLRYDDSLDVFGVHGIGGLTGTFLAGIFATASIGGVSGALEGSWMQPLTQLAGILVTFVWSAVATYVLLKAVSLFVALRVSREHEIEGLDISQHGEALQ

SEQ ID NO: 67353 - DNA, 1470 bp, Geobacter sulfurreducens PCA
  CDS (1)..(1470): transl_table=11
atgaagtggaaacgttcgatcatcacacttgccctggccgccgcagccttcatggctccggccgcagtcctcgccgaagaggccaaggcccccgccgtggcggcaacccaggcagccgtcacctccgcccaggctgctccggcggccgttgccccggctgaggccgcaccggcggctgccgaagcccccaaggtggccgaaccggtcctcaataccggcaataccgcctggatgctcgtctgcgcggccctggtccttctgatgcttcccggccttgccctcttttacggcggcatggtccggagcaaaaacgtcctctcaaccctgatgcattcctttgttgccatggggatcgtgggggtccagtgggccgtcatcggttactcgctggccttcggtcccgacatgggcggcatggggcttgtgggagacttcagccgggcgctgctcaacggaatgatcagcttcaaggacggcgcgccggtctacaccctctggcagaacgtgaccagtgaacccaacgccatccccgagtacgtctttgccatgttccagggaatgttcgccatgatcaccgtagccctcatctccggcgccatggccgagcgggttaagttctccgcctactgcgtctttgtgctcctttggaccaccctggtctacgatcccctggcccactgggtctggatggtggacggctggctcttcaagaagggtgccctggactttgccggcggcaccgttgttcacctctcctccggtatttccgccctggcgttcctcgtcttcctcggcaaacgtcacgggttcccccatgagcgtatggctccccataacctctccatgaccatgctcggcgtggggctcctctggttcggctggttcgggttcaacgcgggttcggcggtagtcggcgtgaacaacgttgatgcggccggcgggcttgcgggcctcgccttcgccaccaccaccatcgccccggcagccggcggcctggcctggatgatcgccgaatggatccacgcgggcaggccctcggcactcggcttcggttcaggcgtggtcgcaggactggtcggcattacgcccgcggccggctttgtccagccgggcgctgccatcatcatcggcctcggcgccggcgtgatctgctacctgggtgtgctcatgaaggcgaagctcaagtatgacgactccctggatgccttcggcgtgcacggcgtgggcggcacctttggcgccctcgtcaccggcgtcttcgccacggtgggggccacggggctcctctccggcaacgtgtcccagttcatcacccaggtgatcggggtggtgtcggccggtgcctatgccttcatcgtgaccctggtcatcgccttcatcctcgacaagaccatcggtctccgggtggagaaggaagacgagatcatgggcctcgaccagacccagcactccgagtcggcgtacaactag

SEQ ID NO: 67354 - protein, 489 aa, Geobacter sulfurreducens PCA
MKWKRSIITLALAAAAFMAPAAVLAEEAKAPAVAATQAAVTSAQAAPAAVAPAEAAPAAAEAPKVAEPVLNTGNTAWMLVCAALVLLMLPGLALFYGGMVRSKNVLSTLMHSFVAMGIVGVQWAVIGYSLAFGPDMGGMGLVGDFSRALLNGMISFKDGAPVYTLWQNVTSEPNAIPEYVFAMFQGMFAMITVALISGAMAERVKFSAYCVFVLLWTTLVYDPLAHWVWMVDGWLFKKGALDFAGGTVVHLSSGISALAFLVFLGKRHGFPHERMAPHNLSMTMLGVGLLWFGWFGFNAGSAVVGVNNVDAAGGLAGLAFATTTIAPAAGGLAWMIAEWIHAGRPSALGFGSGVVAGLVGITPAAGFVQPGAAIIIGLGAGVICYLGVLMKAKLKYDDSLDAFGVHGVGGTFGALVTGVFATVGATGLLSGNVSQFITQVIGVVSAGAYAFIVTLVIAFILDKTIGLRVEKEDEIMGLDQTQHSESAYN

SEQ ID NO: 67355 - DNA, 1440 bp, Mycobacterium avium subsp. paratuberculosis K-10
  CDS (1)..(1440): transl_table=11
ttgcgagtgacatacccgatactgggccagcccaataccggcgataccgcctggatgctggccagttccgcgctggtgctgttgatgacgccgggtctggcgtttttctacggcgggatggtgcgcgccagaagcgtgctgaacatgctcatgatgagcatcagcgcgatgggcgtggtcaccgtgctgtgggtgctttacggctattcggtcgccttcggcgacgacgtcggcaacttcatgggcaagccgacgtcctactggggcctcaagggtctcatcggcgtcaacgcggtggccgccgacccgagcaaaggcactgcggcaacggacattccgctggccggcacgctgccggccaccgtgttcgtggccttccagctgatgttcgcgatcatcaccgtcgccctgatctccggcgcggtgtccgaccggctgaagttcgccgcctggctggtgttcgccggcctgtgggcgacgttcgtctatttcccggtggcgcactgggtgttcgcgttcgacggcttcgcctccgagcacggcggctggatcgccaacaagctgcacgcgatcgacttcgccggcgggacggcggtgcacatcaattccggtgtggcgggcctgatgctggcgatcgtgctgggcaagcgccgcggctggcccaccacgttgttccggccgcacaacctgccgttcgtgatgctgggcgccgggctgctgtggttcggctggtacgggttcaacgccggatcggccaccagctccaacggcgcggcggggtcgacgttcatgacgacgacgatcgcgaccgccaccgcgatgctggcctggatgctcaccgaacgcatccgcgacggcaaggccaccacgttgggcgcggcgtccgggatcgtcgccgggctggtcgccatcaccccgtcctgctcgtcggtcaacgtgctgggcgcgctggtggtgggcctggtggccggcgtggtgtgcgcgctggcggtcggcctgaaattcaagctgggctttgacgactcgctcgacgtggtcggggtgcacctggtcggcgggttggccggcaccctgctggtgggcctgctggccgccccggagagcccggccatcagcggcgttaccggcgtgtccaagggactgttctacggcggcggctgggcgcagctggaacggcaggcggtcggcgcgttcagcgtcctcatctactctggggtggttacgctgatcctggcgttgatcctgaagtacacgatggggcttcgtctcaacccggaggccgaagcctcgggtatcgacgaggctgagcacgccgagagtggttacgatttcgccgtggctaccggctcggttctcccgccccgggtcgctgtggcggatacccgcaacggcctggaggagcagcgagtgggcgacaaagtggaggcagagcagtcatga

SEQ ID NO: 67356 - protein, 479 aa, Mycobacterium avium subsp. paratuberculosis K-10
MRVTYPILGQPNTGDTAWMLASSALVLLMTPGLAFFYGGMVRARSVLNMLMMSISAMGVVTVLWVLYGYSVAFGDDVGNFMGKPTSYWGLKGLIGVNAVAADPSKGTAATDIPLAGTLPATVFVAFQLMFAIITVALISGAVSDRLKFAAWLVFAGLWATFVYFPVAHWVFAFDGFASEHGGWIANKLHAIDFAGGTAVHINSGVAGLMLAIVLGKRRGWPTTLFRPHNLPFVMLGAGLLWFGWYGFNAGSATSSNGAAGSTFMTTTIATATAMLAWMLTERIRDGKATTLGAASGIVAGLVAITPSCSSVNVLGALVVGLVAGVVCALAVGLKFKLGFDDSLDVVGVHLVGGLAGTLLVGLLAAPESPAISGVTGVSKGLFYGGGWAQLERQAVGAFSVLIYSGVVTLILALILKYTMGLRLNPEAEASGIDEAEHAESGYDFAVATGSVLPPRVAVADTRNGLEEQRVGDKVEAEQS

SEQ ID NO: 67357 - DNA, 1236 bp, Bacillus cereus ATCC 10987
  CDS (1)..(1236): transl_table=11
atgaatacaggagatacggtttttatgtttgtagcgacagtaatggtcatgttaatgacaccaggattagcacttttttatggaggtatggttcgcagtaaaaacgtactcagtacgacaatgcatagttatagcgcaatggctatcgtttcgattcaatggattgtaattggttattctttatcattcggacccgattggcacggacttatcggcacattcaattggttcggtttaaacggagttacctacgcaccaaatccagactactcatctactattcctcacaatttatttatgatgtttcaactcatgtttgctattctaacccccgctctaatttcaggagcatttgccgaaagaatgcgattttcagctttccttattttcatccttctatggacaacaatcgtttacaatcctgtcgctcattgggtatggggcgttggcggatggctaagagaacttggcgcattagacttcgctggcggtaatgtcgttcatattacatctggcgtggctggcctcgtattagctattttccttggaaaacgaaaaaacataaacggttcgtctcctcatcatttaccatttacgatgttaggcgctgggctgctatggttcggctggttcggttttaacgtcggaagcgcattatctttaaatgatgtagctttaactgcatttattaatacaaatatagctgccgctgcctccgcattaacttggatgctttcagagtggttcttccaatcaaaaccgaccgcgatgggagctgcttgtggcgccgtttccggtctagtcgctattacaccagcttgcgggttcgttacacctttctcagctcttcttatcggagcaattggcggcgtattatgcttcggagcggtctttttcttaaaaacaaaattcggatacgacgatacactcgatgcatttggatgtcacggcatcggcggaacttggggcggcattgcgacaggactatttgcaactactaccgtaaacagcgatggcgctaacggattattttacggaaacgccgcgttgctgtttaaacaacttgtagcaatcggcgcaacatatgcgttcacaattataatgacgtacgcgattattaaagcaattaacttcttcctccctgtccgggtagatgagcacgaggaacatatgggacttgatatttcaatgcatggggagaaagcttatgagtatgtagaaaaatcggctaattaa

SEQ ID NO: 67358 - protein, 411 aa, Bacillus cereus ATCC 10987
MNTGDTVFMFVATVMVMLMTPGLALFYGGMVRSKNVLSTTMHSYSAMAIVSIQWIVIGYSLSFGPDWHGLIGTFNWFGLNGVTYAPNPDYSSTIPHNLFMMFQLMFAILTPALISGAFAERMRFSAFLIFILLWTTIVYNPVAHWVWGVGGWLRELGALDFAGGNVVHITSGVAGLVLAIFLGKRKNINGSSPHHLPFTMLGAGLLWFGWFGFNVGSALSLNDVALTAFINTNIAAAASALTWMLSEWFFQSKPTAMGAACGAVSGLVAITPACGFVTPFSALLIGAIGGVLCFGAVFFLKTKFGYDDTLDAFGCHGIGGTWGGIATGLFATTTVNSDGANGLFYGNAALLFKQLVAIGATYAFTIIMTYAIIKAINFFLPVRVDEHEEHMGLDISMHGEKAYEYVEKSAN

SEQ ID NO: 67359 - DNA, 1491 bp, Strongylocentrotus purpuratus
  CDS (1)..(1491)
atggcgtcgaatgaaagtgatcttgtcgtgatgcagcttcaggctgaattcgactatctcaaggaaaacacggaccactttttcctcgtcgtgatgtcctgcattatcttcttgatgcagttggggttcgccttcttggaagcgggatcggtacggtccaaaaacaccaccaacatccttttgaagaatatgcttgatgtctgcataggggcggtggcctactggggtgttggatatgccttcgctttcggaaaatcatccaatcctttcattggctataggaatttctttttcgaagacatggttccatccgactattcgcatttcttcttccatttcgtgttcgccgctacggctgccactatcgtctccggcgcgatggcggagcgaaccgagttcgcagcctacttcatgtattcgtcactaataacaggattcatctatccggtggtgactcactgggcgtggtcatccgatggttggcttggcaacagtggaatagagatcgccgatggaacttatttggcttttaaggatttcgcaggtagcggtgtcgttcactgtgtcggaggcacagctgctttggtcggagcgaccatcttgggtcctcgtatcgggcgctacgacgcgaatgggaaactggtcgttattgccgggcatactgtaccgatggtttcacttggcggttttatcctattctttggcttcttcgcgttcaacggcggctctcaaggaaggatatctggcgaaggagacggggaggtggttgcccttgccatcgtcaataccatcatttctggcgcttttgccgccctcacggctatgatttgccgccgcgttggtttcagcgggagctactggtcgttgttaacaaccatcaacggtggtcttactggaatggtggccatatgtgcaggatgtaatgtggtttatgcttggggagcagcggtcataggaacgatagctggtgttacttatattctctggagttcagcagtcatccggatgcgaatagatgatccactggacgcagtagccgttcacctaggaggtggtttctggggagttttagcggtccctatctttgacatgaatgatggaatcctcttcaacatcaaaagcagggtgccatggatgcattttgcttggaatctcctcggagtcgtggcgatattcgtgtggaccgctcttctctccttcttcatgtttggaatctttagatgtctgaaaattctccgagttgaccccgagatagagaagaaaggtttggatattccgaagcatggcgagccggcctatcctctggcaagctacggtaacggctgggaggatgaatcggtcatcgacgcttctccagtacgaccaccacctagctacaagatgaacggtaatagccatgataacaaggcttatagcctcggtgaaacgcagaactctgttgatcatgaacacatccaaatcgacgatactccaagggtccagtttgattag

SEQ ID NO: 67360 - protein, 496 aa, Strongylocentrotus purpuratus
MASNESDLVVMQLQAEFDYLKENTDHFFLVVMSCIIFLMQLGFAFLEAGSVRSKNTTNILLKNMLDVCIGAVAYWGVGYAFAFGKSSNPFIGYRNFFFEDMVPSDYSHFFFHFVFAATAATIVSGAMAERTEFAAYFMYSSLITGFIYPVVTHWAWSSDGWLGNSGIEIADGTYLAFKDFAGSGVVHCVGGTAALVGATILGPRIGRYDANGKLVVIAGHTVPMVSLGGFILFFGFFAFNGGSQGRISGEGDGEVVALAIVNTIISGAFAALTAMICRRVGFSGSYWSLLTTINGGLTGMVAICAGCNVVYAWGAAVIGTIAGVTYILWSSAVIRMRIDDPLDAVAVHLGGGFWGVLAVPIFDMNDGILFNIKSRVPWMHFAWNLLGVVAIFVWTALLSFFMFGIFRCLKILRVDPEIEKKGLDIPKHGEPAYPLASYGNGWEDESVIDASPVRPPPSYKMNGNSHDNKAYSLGETQNSVDHEHIQIDDTPRVQFD

SEQ ID NO: 67361 - DNA, 1458 bp, Magnaporthe grisea 70-15
  CDS (1)..(1458)
atgtcttcctctccggtcgaatacaacggcaccctgccgacgggtggtgactcgttgactgaggatctcaacatttactactcgagcggcgactttgcttggataatgacctcgtccgccctcgtcctgctcatgatcccaggtgtcggcttcttctactctgggctggcccgcagaaagtcagcccttgccttgatatggctgtcgctcatgtcgataggagtggcgagcttccagtggttcttctggggctactctctcgccttttcgcacacgggggagagcgggttcatcggcgacttggccaacattggtctgaaggacgtgctcgggcagccttcagtcggtagcagcaagctcccggatctgctgttttgcctctaccagggcatgtttgccgccatcactcctgccctcgccatcggagctgcagctgatcgtggccgaatgctaccggccatggtcttcgtctttgtctgggccaccatcgtttacgacccgatcgcatactggacctggaacccgaacggttggtccttcaagctcggcggcctcgacttcgccggaggaacgcccgtgcacatttcttcgggcgcggcggcgctcgcgtactcgctgatgctgggcaagcgcgccggctacgattcgaacgccggcatgccgttcaggccacacaacgtcacccacgtcgtgctcggcaccgtcatgctctacgttggttggttcggcttcaacggcggctcggcactggccgccaacctccgagccgtcatggctctgctggtgaccaacatctcggccgccgtcggtggactgacttggtgcttcctcgactaccgcctggagaagaagtggagcaccatcggcttctgctccggcgtcatcgcgggactggtggctatcacgcccgctgctggctacgtacctgcgtggtcggccgtcatctttggcgttgttggaggtgccgcttgcaactttgcgaccaagatcaagttcctgctgggcattgacgaggcgctcgacatctttgccgagcactgcgttggtggaatcgtgggcaaccttttgacgggtatctttgctgccgactacattgcacacctcgacggtgcgaccgagatccccggcggctggctcaaccaaaactacatccagctcgcgtaccagcttgccgactgcgtggccggcttctcctactcgttcgtcatgacgtgcatcatcctcttcctcatgaacctgatccccggcctgtcgctccgtgtgtcggccgccgaggagaacatgggcttggacgacgcccagattggagaatttgcctacgactacgtggagctgacccggcactttgaggatgcggcggtgacgacgccggccgtgggaagcagccagggcagcatcaaggagccgaggaccaaggagacccaggaggtcagcaagaccgagacgactgttgtataa

SEQ ID NO: 67362 - protein, 485 aa, Magnaporthe grisea 70-15
MSSSPVEYNGTLPTGGDSLTEDLNIYYSSGDFAWIMTSSALVLLMIPGVGFFYSGLARRKSALALIWLSLMSIGVASFQWFFWGYSLAFSHTGESGFIGDLANIGLKDVLGQPSVGSSKLPDLLFCLYQGMFAAITPALAIGAAADRGRMLPAMVFVFVWATIVYDPIAYWTWNPNGWSFKLGGLDFAGGTPVHISSGAAALAYSLMLGKRAGYDSNAGMPFRPHNVTHVVLGTVMLYVGWFGFNGGSALAANLRAVMALLVTNISAAVGGLTWCFLDYRLEKKWSTIGFCSGVIAGLVAITPAAGYVPAWSAVIFGVVGGAACNFATKIKFLLGIDEALDIFAEHCVGGIVGNLLTGIFAADYIAHLDGATEIPGGWLNQNYIQLAYQLADCVAGFSYSFVMTCIILFLMNLIPGLSLRVSAAEENMGLDDAQIGEFAYDYVELTRHFEDAAVTTPAVGSSQGSIKEPRTKETQEVSKTETTVV

SEQ ID NO: 67363 - DNA, 1482 bp, Magnaporthe grisea 70-15
  CDS (1)..(1482)
atggtcaagatacatgagatcgagctcgatgatttctacgccatcaagcggccgtacaatggctcggccgagactgggggagatgctctggtgcaggacttgaacgtgtgtttgttctactcaggcctcgcacgacgcaagtcggccctctcgctgatgttcctctccatcctggcgctggccgtgacgacggtgcagtggttcgtgtggggctactcgctgtccttctcgcggacggccaacgccttcatcggcgacctgagcaacgccggtttccaaagcgtcctggcgcgtccctccatcgggggcgacagcatcccggacctcctcttcgccgtgtacgagggcatgctgtcggcgctgacggtaacgctggccgtcggcgccgcggcagagaggggaagggtgctgccggccatcgccttcatgttcgtctgggcgacgctcgtctacgaccccatcgcctgctggacgtggaaccccgccggttggtcgttccggatgggcgggctcgactacgccggcggaacgcccgtgcacatcgcctcgggcgcggcggcgttggcgtactcgatgatgctaggtccgaggcggggccatggcacgcacgagctgaatttcaggccacataatgtcgctcacatcgtcatcgggacggtgtttttgtggttcgggtggtttgggttcaatgccgggtcgacgctcgcggcgaacctccgcgccgttctggctgttgtcgtgacgcacctggcggcgtgcgtcggggggcttacctggtgtcttatggactatcgggtggagcggaagtggtctgccgtaggattctgctccggggtggtcgcggggttggtggccatcactcctgggtcgggagcatcaagcgccaacctcgccacccggctcaagttcaccctcggcatcgacgacgcgctcgacatattcgccgtgcacggagtggccgggttcatgggcaacatctgcacggcgctcttcgccctcaaccaggtggtcgcgctagacgggccctcggccggcagctcccgtgacggcatcgcgggcggctggctcaacggccactggatccagatcgcataccagctggcgggctcctttgcgggtctggcctactccttcatcgtgagctgcgccatcctggccgccctggaccgcatcccgggctgccgcctgcgcgcgactgacgaggccgaggtcgccggcatggacgcggccgagatgggcgagtttgcctacaactatgtggcgctgacccgcgagctgttgcgggtgccgggcgaggagaatggtggaagcgacgggacagccgtctgtgatcctttctcacggccgtcggccatggcagcgagacatagccagtggttctcgggccggcgggagctgcttcaggccgacgatggcgggtaccatgtgaagccggcgagggcaaggcttggttccgagggcaccatcattagtcggtgttga

SEQ ID NO: 67364 - protein, 493 aa, Magnaporthe grisea 70-15
MVKIHEIELDDFYAIKRPYNGSAETGGDALVQDLNVCLFYSGLARRKSALSLMFLSILALAVTTVQWFVWGYSLSFSRTANAFIGDLSNAGFQSVLARPSIGGDSIPDLLFAVYEGMLSALTVTLAVGAAAERGRVLPAIAFMFVWATLVYDPIACWTWNPAGWSFRMGGLDYAGGTPVHIASGAAALAYSMMLGPRRGHGTHELNFRPHNVAHIVIGTVFLWFGWFGFNAGSTLAANLRAVLAVVVTHLAACVGGLTWCLMDYRVERKWSAVGFCSGVVAGLVAITPGSGASSANLATRLKFTLGIDDALDIFAVHGVAGFMGNICTALFALNQVVALDGPSAGSSRDGIAGGWLNGHWIQIAYQLAGSFAGLAYSFIVSCAILAALDRIPGCRLRATDEAEVAGMDAAEMGEFAYNYVALTRELLRVPGEENGGSDGTAVCDPFSRPSAMAARHSQWFSGRRELLQADDGGYHVKPARARLGSEGTIISRC

SEQ ID NO: 67365 - DNA, 1563 bp, Magnaporthe grisea 70-15
  CDS (1)..(1563)
atgtcgtactcgtggataggggccccggccgaatttaacggcaccaatgccgagacaggtggtaactccgccaccgaaaatctgaaccaatggtaccaatccggagaccaggccttcatcctggtctcctcgtgtttggtcctcatcatgatacccgggatcgccttcctctactcgggtttggccaggaggaagtctgctctgtctttgatatgggtggtcatgatgtcctttagcgtggtcattttccagtggtacttttggggttattccctggccttcagcacctcgacgacaaacggtttcatcggcgacctcagcaaattcggcctcatgaacaccctcggaaagccctcgcaagggtcgccgcttatccccgagctactctactcgttctaccagatgcagttctgcggtgtcaccgcagccctggtgatcggagccacggctgagcgcggtcgtgtcgtccccgccatggtcttcactttcttttgggccaccattgtctactgccctctggcccattgggtttggaatgccaatggctgggccttcaagtacggcgtgctcgactacgccggtggtggccccgtcgagatcggttccggaatgtctgcgctggcctactcgtgggtcctcggacgccgcaatgagaagatgatgctgaacttccgcccgcacaacatctcgctcatcactctcggaactatcctcctttggttcggctggttgggattcaacggcggctccgcatttggagctaaccttcgcgccgctatggcctgctggaacacttgtttgaccgccatgtttgcagccatgacctggacccttctcgacttccgtctggccaagaaatggtcacttgtcggttggtgttcgggaaccatttcgggactcgttgcagcgacaccagcttccggcttcattcctccgtgggctagtattgtgctgggtgttgtgactggtgtctgctgcaactttggcacaaaggtcaaattcctcctccgcatcgacgactccctcgacgtgttcgccgagcattacatcggtggcgttgtcggcctcttcttcaacggcttcttcgcggccgactacatcattggtctcgacggtgtcaacaccggcctcgtcacgggtggtttcctgaaccagaactacaagcagctctacatccagattgcattcatcgtcgccgcctcggcctactcgtttgtcgtctctgcgatcctggccaagatcatcgacatgattcctggtctcaagctccgtgccgacgagaaggccgaactgctcggcatggatgacgatcagcacggagagttcgcctacgactacgtcgaggtccgccgggactaccttgcctggactcctgcggagagggaccccaaggaggatggacatgccgtcgtgccacaactggggatcgaggggcaccagaccattcacgacaacatcatcaatggtgttgggagtgtgaggcacacaccggcagttcccaacgatgctcatgcacagcacgactcggaaaagcccaagtcagttgaccgttcctctgaataa

SEQ ID NO: 67366 - protein, 520 aa, Magnaporthe grisea 70-15
MSYSWIGAPAEFNGTNAETGGNSATENLNQWYQSGDQAFILVSSCLVLIMIPGIAFLYSGLARRKSALSLIWVVMMSFSVVIFQWYFWGYSLAFSTSTTNGFIGDLSKFGLMNTLGKPSQGSPLIPELLYSFYQMQFCGVTAALVIGATAERGRVVPAMVFTFFWATIVYCPLAHWVWNANGWAFKYGVLDYAGGGPVEIGSGMSALAYSWVLGRRNEKMMLNFRPHNISLITLGTILLWFGWLGFNGGSAFGANLRAAMACWNTCLTAMFAAMTWTLLDFRLAKKWSLVGWCSGTISGLVAATPASGFIPPWASIVLGVVTGVCCNFGTKVKFLLRIDDSLDVFAEHYIGGVVGLFFNGFFAADYIIGLDGVNTGLVTGGFLNQNYKQLYIQIAFIVAASAYSFVVSAILAKIIDMIPGLKLRADEKAELLGMDDDQHGEFAYDYVEVRRDYLAWTPAERDPKEDGHAVVPQLGIEGHQTIHDNIINGVGSVRHTPAVPNDAHAQHDSEKPKSVDRSSE

SEQ ID NO: 67367 - DNA, 1542 bp, Gibberella zeae PH-1
  CDS (1)..(1542)
atgtcttacgttgtccccggacccccaacgcctttcaatggcaccaacgaggagctcggtggtgattccaccaccgaaaacctcaaccaatggtaccaatctggtgaccaggccttcatcctcgtctcggcctgtctcgtccttctcatggttcccggtatcgcctttctctactccggtcttgctcgaagaaagtctgctctctccatgctctgggtcgtcatgatgtccttttccgttatcgtcttccagtggtatttctggggtttctcactcgccttttccacaacttccaacaaccctttcatcggcgatcttaagcacttcggtctcaggcacgtttggggtgccccctcggtcggatcagctctcatcccagctcttctatactctttctaccagatgatgttctgcgccgtcactgctgctcttaccatcggtgctgttgctgagcgaggccgtgttattcctagcatggttttcatcttcttctgggccactctcgtttactgccctctcgcctactgggtctggaaccccagtggttggggtttcgtcaacggcgttctcgactatgccggtggtgttcccgtcgagattggctctggtatgtccgctctcgcctactcttgggttctcggccgccgtaacgagaagatgatgatgaacttccgccctcacaacatttcgctcatcaccctcggtaccatcttcctctggtttggctggcttggcttcaacggtggttctgccttcggcgccaacctccgtgctgttatggcttgctggaactcttgcctcactgccatgttcgctgccatgacctggtgtattctcgatttccgtctggcccgcaagtggtccatggtcggttggtgctctggtactatctctggtcttgttgctgccactcctgcttctggttttatcgacccctgggccagtattattctcggtgttgttgctggtgtcgcctgtaactttgccaccaaggtcaagttcctcatccgaattgatgactctctcgatgtcttcgctgagcacggtgttggcggtatcgttggtctcattttcaacgctttcttcgctcgcggttctatcatcggactcgacggcgtcaacactggtgccacaggtggattcatggacggcaactacgttatcattggctggcaaatcgctgccattgttggtgcttcttcttacgcctttgttatgtccgccatcattgccaagatcattgacctcatccctggtcttaagcttcgtgcttctgaggaggccgaactccttggtatggacgatgaccagcatggcgagttctcctacgattacgtcgaggttcgccgagacttccttgcctggagccctcagcgtggcgagcctgctgaggatggtgatgtccttgagcccactcatggtattcatgagcatcagtccatgatgaaccccagcgagtcagacgacgcccgcaagactccttctctcaacacacctgatgttatcgcgccagacgccgtcatcaacgagaagcatgcttaa

SEQ ID NO: 67368 - protein, 513 aa, Gibberella zeae PH-1
MSYVVPGPPTPFNGTNEELGGDSTTENLNQWYQSGDQAFILVSACLVLLMVPGIAFLYSGLARRKSALSMLWVVMMSFSVIVFQWYFWGFSLAFSTTSNNPFIGDLKHFGLRHVWGAPSVGSALIPALLYSFYQMMFCAVTAALTIGAVAERGRVIPSMVFIFFWATLVYCPLAYWVWNPSGWGFVNGVLDYAGGVPVEIGSGMSALAYSWVLGRRNEKMMMNFRPHNISLITLGTIFLWFGWLGFNGGSAFGANLRAVMACWNSCLTAMFAAMTWCILDFRLARKWSMVGWCSGTISGLVAATPASGFIDPWASIILGVVAGVACNFATKVKFLIRIDDSLDVFAEHGVGGIVGLIFNAFFARGSIIGLDGVNTGATGGFMDGNYVIIGWQIAAIVGASSYAFVMSAIIAKIIDLIPGLKLRASEEAELLGMDDDQHGEFSYDYVEVRRDFLAWSPQRGEPAEDGDVLEPTHGIHEHQSMMNPSESDDARKTPSLNTPDVIAPDAVINEKHA

SEQ ID NO: 67369 - DNA, 1392 bp, Gibberella zeae PH-1
  CDS (1)..(1392)
atgaatgtcaatgactggtacgagtttttctctctcatcacgagagagcgactcttcttctattcaggcctcgcccgtcgcaaatcggctctatcgctgatatggctctctgtaatgagcgctgcagtaacaacctttcaatggttcttctggggcttctcgcttacattttcacatacggcaggtcccttcatcggtgacctggccaactttggcttccgcgatgtcttggctcgtccttcggtgggctcggcgcatctcccggacatgatgtttgccgtgtatcagggcatgttctctgccctgaccgtagctctcgctaccggagccgtcgccgagcgtggccggatgctcccctgcatcatcttcatcttcgtgtgggccactatcgtctacgaccccatcgcatgttggacttggaaccctaatggctggtccaacaagatgggtggcctggactttgccggaggtaccccggtgcacattgcttcgggaagtgctgctctggcctactccatgatgctgggcaagcgcagtggtcacggaacccatgagctcaactaccgcccacacaatgctactcatatcgtgactggaaccgtcttcctctgggtcgggtggtttggcttcaatgctggctctgccctctcagctaaccttcggggtgtcatggcagctgtagtaactaacctagctgcctgtgtcggtggaattacctggtgtcttttggactaccgcctcgagaggaagttctccactgttgggttctgttccggtgtcgttgctggtcttgtctgcatcacccctggttccggctatgtccctccttgggcagctgttatctttggtgttcttggcgctgccggttcgaactacgctaccaaggtcaaattccttctcggaatcgacgatgccctcgatattttcgccgtccacggtgttggcggtctcatcggcaatatttgcaccgccttcttcgccagtccgactatcgctgctctcgacggttattctcgcatcaagggtggatgggttgagcatcactgggcacagatgggttatcagcttgctgactctatctgcggaggcttgtactctttcaccgtcacatgccttatccttttcctcatgaaccttattcccggactgcgcctgcgtgtcgacggggaggctgagcttcaaggtatcgacgacgccgagattggagagttcgcatacgactatgttgagctcacccgagaagttgtcagcgatatggataatgaatctggaagccgatactcagctgatcctacggcatttcaacactacgagaagaaccatattcccatgatcgatgctcgcatgtttggtggccagcccgcccatgctcctgtagcattccctcagtga

SEQ ID NO: 67370 - protein, 463 aa, Gibberella zeae PH-1
MNVNDWYEFFSLITRERLFFYSGLARRKSALSLIWLSVMSAAVTTFQWFFWGFSLTFSHTAGPFIGDLANFGFRDVLARPSVGSAHLPDMMFAVYQGMFSALTVALATGAVAERGRMLPCIIFIFVWATIVYDPIACWTWNPNGWSNKMGGLDFAGGTPVHIASGSAALAYSMMLGKRSGHGTHELNYRPHNATHIVTGTVFLWVGWFGFNAGSALSANLRGVMAAVVTNLAACVGGITWCLLDYRLERKFSTVGFCSGVVAGLVCITPGSGYVPPWAAVIFGVLGAAGSNYATKVKFLLGIDDALDIFAVHGVGGLIGNICTAFFASPTIAALDGYSRIKGGWVEHHWAQMGYQLADSICGGLYSFTVTCLILFLMNLIPGLRLRVDGEAELQGIDDAEIGEFAYDYVELTREVVSDMDNESGSRYSADPTAFQHYEKNHIPMIDARMFGGQPAHAPVAFPQ

SEQ ID NO: 67371 - DNA, 1401 bp, Gibberella zeae PH-1
  CDS (1)..(1401)
atggcgactccttacaatggcaccagcgaccatgccgacgatggctactcgtctggcgtctccgacctcaacatcttctatgagacgggccacttggtcttcctggtcaccagcgccgtgctcgttcttctcatgattcccggcgtgggtttcttctacagtggtctcgctcgtcgcaagtcggccctgactttgatcctcttgtcaatggtctctgtcgctgtcattagtttccagtggttcttctggggttattccttgaccttttcacgaactggaaatgccttctttggcgatctcacccagttcggtctcatggagacacttgcccagcccaacggctcctctgctcttcctgatattctcttctgtctttaccagggcatgtttgctgctattacacctgctcttgccattggtgccgtggcagacagaggtcgcatcctcccagccatcgtcttcatgttcctctggtccaccattgtctacgaccctatcgcatactggacctggaacgctaacggctggctcttcaaccttcccagctacgactttgctggaggcggtcccgttcacgtcgcttcaggaacatgcgcccttgcttactccctcatgctcggcaagcgcaccggctacaaccgcaacaatggccttccctaccgtcctcacaacgtcacccatgtcgttctcggcacggttttcctctgggtcggttggtttggattcaacggcggttcagctcttgctatgaacatccgcgccatcatggcatgctacgtgaccaacctggctgcctcatgcggtgctatcgcctggattctacttgattatcgccttgaaaagaagtggagcacaattggtttctgctccggtgccatctctggtcttgtcgctattactcccgctgctggcttcgtcaagccttgggctgccgttattatcggaatttgcggtggtgttgtatgcaactttgccaccaagctcaagttcgtcatgaacattgacgacagtcttgatatctttgctatccatggagttggcggtatggctggcaacatcctcactggtatctttggaactaaatccatcgctgctcttgacggtggagagtacgaccccatcggctgggttgatagccactgggtccagttaggctaccagattgctggtactctagcttgcttcgcttggtcatttgtactgacctgccttctgctcttcattctcaacctcatccctggtctgtccctgcgtgtagctcccgaggaggaagagcttggtacagatgatggacagttgggcgaatttgcgtatgactatgttgagatgacccgccacatggctgatagcacacatcccaactctgatgcaagtgcgcgaaccagtcacgagaaggtctag

SEQ ID NO: 67372 - protein, 466 aa, Gibberella zeae PH-1
MATPYNGTSDHADDGYSSGVSDLNIFYETGHLVFLVTSAVLVLLMIPGVGFFYSGLARRKSALTLILLSMVSVAVISFQWFFWGYSLTFSRTGNAFFGDLTQFGLMETLAQPNGSSALPDILFCLYQGMFAAITPALAIGAVADRGRILPAIVFMFLWSTIVYDPIAYWTWNANGWLFNLPSYDFAGGGPVHVASGTCALAYSLMLGKRTGYNRNNGLPYRPHNVTHVVLGTVFLWVGWFGFNGGSALAMNIRAIMACYVTNLAASCGAIAWILLDYRLEKKWSTIGFCSGAISGLVAITPAAGFVKPWAAVIIGICGGVVCNFATKLKFVMNIDDSLDIFAIHGVGGMAGNILTGIFGTKSIAALDGGEYDPIGWVDSHWVQLGYQIAGTLACFAWSFVLTCLLLFILNLIPGLSLRVAPEEEELGTDDGQLGEFAYDYVEMTRHMADSTHPNSDASARTSHEKV

SEQ ID NO: 67373 - DNA, 1449 bp, Gibberella zeae PH-1
  CDS (1)..(1449)
atggctagttctaagatcacaccggtcactgagtggccagactattctgtcgacccgaccggtggtgatcctttcaccaaggatttgaatgcaccatatgataaggcaatatgcacgatcctttgttggcagattacacccgccatcggcttcctgtatgcgggtatgcatcgccgaaaggctgccttgacaatggtcctgcagtctctcttctgcgcctgcgcggtcggtatccagtattggatctacggttattctctttaccaaagtcgtactacaaacccgatcctcggtgatctttcactggcggctttccgcaacgtccttgctcagccgtcgctcgcgaatggcgatatccctgagcttctctatgccgtctttggtgttactttcgtgacagcaactgccatgatcttggctggagctatgttggagagaggcagactttggcctagcatggtcttccttctctgctggacgacatttgtatactacatcctagcatactgggaatggaacccaagcggatggctctacaaactcggcctctacgatttcgccggctcaggacccgttcatatcgcgagtggctttggagcccttgcttggtcaatgatgctaggtcctcgaatccccgatgccactgttaccgaccgaaagaaagccgtgcattacaaacctcacaacccgttgcttatgtgcttcggcactgtgcttatctggtttggctggttcgcctttaacggcggtagcacagccaacctcagtcttcgatcgatctatgttgttgtcaatacgaacatgtcagcatgtgctggtggtttcggctgggttctcctaggatacctgcacacacgcaagtttagtcttgttggattctgctctggaatcatcgcgggacttgttgatatcacgccttgcgcaggttacacacccatctacgtggcaccagttattggtctggttactactgtcggctgcttctacactgtcaagtacaagtacctcctttcgatcgatgatggtctggatatctttgccatccatggaattggagggttcatcggcgatatcttgacaggtctcttcgcagccaagtttgtccccgccctggacggagtatctggagattcatatgctggaggatggtgggatggcaactacaagcagatgggactgcaattggctggtgctactacttgtgcggcctggtcctttgtcatctcctgcttgcttctcttcgtcattaacaagatccctgggctgcatcttagagccagtgaggagcatgagatccgaggtctcgatttcaagtacctcagcgatgttgaatgggaggaccactacatgaatggcggcattaccccctttatggaaggtacaccagtcagggctgtaacacctcaggaagtcgttgaaccgaagaatgaagagaggaagatggattag

SEQ ID NO: 67374 - protein, 482 aa, Gibberella zeae PH-1
MASSKITPVTEWPDYSVDPTGGDPFTKDLNAPYDKAICTILCWQITPAIGFLYAGMHRRKAALTMVLQSLFCACAVGIQYWIYGYSLYQSRTTNPILGDLSLAAFRNVLAQPSLANGDIPELLYAVFGVTFVTATAMILAGAMLERGRLWPSMVFLLCWTTFVYYILAYWEWNPSGWLYKLGLYDFAGSGPVHIASGFGALAWSMMLGPRIPDATVTDRKKAVHYKPHNPLLMCFGTVLIWFGWFAFNGGSTANLSLRSIYVVVNTNMSACAGGFGWVLLGYLHTRKFSLVGFCSGIIAGLVDITPCAGYTPIYVAPVIGLVTTVGCFYTVKYKYLLSIDDGLDIFAIHGIGGFIGDILTGLFAAKFVPALDGVSGDSYAGGWWDGNYKQMGLQLAGATTCAAWSFVISCLLLFVINKIPGLHLRASEEHEIRGLDFKYLSDVEWEDHYMNGGITPFMEGTPVRAVTPQEVVEPKNEERKMD

SEQ ID NO: 67375 - DNA, 1359 bp, Candida glabrata CBS 138
  CDS (1)..(1359)
atgctagctcgccgaggagtgcaatatgtgtgggattcaggaatagccgtctcatcgacggcgttcctggtggttgcaagtgcactggtgttctttatggttcctggtatagggtttctttactcaggacttgctcgtcggaaatcagcgctttcgttgctatgggtaacgcttatggcgtcattggttggtatgctgcaatggtacttttggggttactcactggcgttatccagaacagccacgaacaataaatttatagggaacttggattcctttggatttcgaaacgtatatgggttgaatgcagtgtggactgagaatttggaagttgcatatgcttcttttcagatgatgtttttatgtgtgactctttcactggtagcaggttctactgctggaagaggcagatttttcccacatatggtgtatttatttctgtttgccactctagtgtactgtcctattgtatactggatatgggctcctggtggatgggctaataaatggggtgtgttagattgggctggtggagggccagttgaaatagtgagtgccattagtggattcgtctattcttatttcctcggttgcagaaatgagaggtttctggttaactttagggctcataatgtttcgtacgttactcttgggacgactgtattatggttcggatggttgttattcaatgcagcttctgcgctttctcccaacttaagatcagtgtatgctttcctcaatacaaacattagtgctgttactggtggtatgacatggtgtattttagattacagactagaaaaaaaatggtctaccgtaggtctatgctcaggtatcatttgtggattagtcgctgccacaccaagctcagggtgtataactctttatgggtcattaattcaaggaattgtagctgggatatgttgtaattttgcaacaaagatcaaacattttttccaggttgatgatgccatggatttattagctgagcacggtgttgctggaatgattggtttactatttaatggattttttgctgcagactgggttattgggatggatggacacacaacacatggcggtggctggatcacccaaaactataaacaaatgtataagcagatagcatatattggagctgttaccggttattgcgctgctgtttcggcactactctgctttattattgacaaaataccaggtttacaattaagagtatcagccgatggtgaagagaaaggtacggatgatgatcagattggagaatttgcctacgattttgttgaaattcgaagagagtttgatatatggggcaaggaggaagatgaagatgaaaatgagcaatccactgatgaatga

SEQ ID NO: 67376 - protein, 452 aa, Candida glabrata CBS 138
MLARRGVQYVWDSGIAVSSTAFLVVASALVFFMVPGIGFLYSGLARRKSALSLLWVTLMASLVGMLQWYFWGYSLALSRTATNNKFIGNLDSFGFRNVYGLNAVWTENLEVAYASFQMMFLCVTLSLVAGSTAGRGRFFPHMVYLFLFATLVYCPIVYWIWAPGGWANKWGVLDWAGGGPVEIVSAISGFVYSYFLGCRNERFLVNFRAHNVSYVTLGTTVLWFGWLLFNAASALSPNLRSVYAFLNTNISAVTGGMTWCILDYRLEKKWSTVGLCSGIICGLVAATPSSGCITLYGSLIQGIVAGICCNFATKIKHFFQVDDAMDLLAEHGVAGMIGLLFNGFFAADWVIGMDGHTTHGGGWITQNYKQMYKQIAYIGAVTGYCAAVSALLCFIIDKIPGLQLRVSADGEEKGTDDDQIGEFAYDFVEIRREFDIWGKEEDEDENEQSTDE

SEQ ID NO: 67377 - DNA, 1437 bp, Candida glabrata CBS 138
  CDS (1)..(1437)
atggctagaggagatggatatgtatggacagagacatatgatcctgcgacagttgcttttatcatactaggtgccgcgctggtattctttatggttccaggtttaggatttttatactcaggactggcgagaagaaagtctgccttagcactgatatgggctgtactgatggcaacactggttggcatgctccaatggtatttttggggttattctcttgcattttcaaagacagctccaaacaacaaattcattggaaatttggattcttttggtttcagaaacgtctatgggaagacatcagaagattcaacgtacccggaaattgcatttgcatctttccagatgatgttcttatgtgtcacagtaagcattattgctggtgctaccgctgaaagaggtaaacttcttccacatatggtgtttctctttatttttgcaacactagtttattgtcctatcacgtactggatatgggctccaggtggatggtgttataaatggggtgttttggattgggctgggggtggcccagtcgaaattgttagtgctgttgctgggtttgtttattcatacttccttggaagacgtagagagaatttacttatcaacttcagaccacataatgtttccatggtcactttaggtacttcaattctatggtttggctggctgcttttcaatgcagcaacatctttgacacctaatttacgctctgcatacgcatttatgaatacaaacatcagtgctgttacaggtggtatgacatggtgtctactggattataggtcggagaaaaagtggtcgactgtgggtttatgttccgggatcatctgtggtctagttgctgcaacccccagttcaggttgtatcacattatatggatcattaatacaaggcattatttcaggcgtagtttgtaacttcgctactaagatcaagtactacttaaaggtcgatgatgctatggatctgttggcggagcacggtgttgctggtatagtaggcttgatatttaacgctttattcgcagcagactgggttattggaatggatggagctacaaagcatagaggtggctggatcacacacaactacagacaaatgtacaaacaaatcgcatatattggtgctgttgctggatatacagctgtagtgactgctttgatatgcatagtcatagacaatataccaggattaagacttagagcatctgaagaagctgaggctcttggtatggatgaagatcaaattggtgaatttgcatacgattatgtcgaagttagaagagattattacttatggggtgttgataacgacaacaatagtgcagataacaccgatggaaatgctgatgatcaatcagttacaggttcatcaacagcagccaccaatgaaggtcacgatatagaaaaggttccagctggaccacaatag

SEQ ID NO: 67378 - protein, 478 aa, Candida glabrata CBS 138
MARGDGYVWTETYDPATVAFIILGAALVFFMVPGLGFLYSGLARRKSALALIWAVLMATLVGMLQWYFWGYSLAFSKTAPNNKFIGNLDSFGFRNVYGKTSEDSTYPEIAFASFQMMFLCVTVSIIAGATAERGKLLPHMVFLFIFATLVYCPITYWIWAPGGWCYKWGVLDWAGGGPVEIVSAVAGFVYSYFLGRRRENLLINFRPHNVSMVTLGTSILWFGWLLFNAATSLTPNLRSAYAFMNTNISAVTGGMTWCLLDYRSEKKWSTVGLCSGIICGLVAATPSSGCITLYGSLIQGIISGVVCNFATKIKYYLKVDDAMDLLAEHGVAGIVGLIFNALFAADWVIGMDGATKHRGGWITHNYRQMYKQIAYIGAVAGYTAVVTALICIVIDNIPGLRLRASEEAEALGMDEDQIGEFAYDYVEVRRDYYLWGVDNDNNSADNTDGNADDQSVTGSSTAATNEGHDIEKVPAGPQ

SEQ ID NO: 67379 - DNA, 1515 bp, Candida glabrata CBS 138
  CDS (1)..(1515)
atgtcttacaactttacagggaccccaacgggtcatgggacaggtggtgactcacttaccaccgatttaaacacacaatttgacctagtcaatatgacgtggctaggtgtatgtacctcaggtgtctggcttatggtgcctggcataggtctgctgtactctggtctttccagaaagaaacacgccttatcacttctatgggcatcgctcatggccgcttgcttagtgatattccaatggttcttctggggttactcactatcattttcccatgaaactagaggaaacggattcttgggaactctagagttttttggttttagaaatgtccttggtgcaccatccgtcgtcacatcagtacctgatatcgtctttgccatcttccaaggaatgttcgctgctgtaactggtgctttaatgcttggtggtgcttgcgaaagagctcgtctaatgccaatgatgatcttcctatttctatggatgacaatcgtctactgccccattgcatgctggacatggaatgcggagggatggttagctaaactgggtgctctggactatgcaggctctggacctgttcacacggcctccggccatggtgctcttgtctacgcattaatcttgggtaagagaaacgatccagtcgccaagaaaggtatgccaaagtataagccacactcagtcacttctgttgtgctgggtaccgtcttcctatggtttggatggcaattctttaacccaggttctgctggtaatgcttccattagagcctggtactctgctatgaacacaaacctggctgccgcatctggtggtctaacttggttattcatcgactatttcagaactggcggaaaatggaccaccgttggtatgtgctctggtatcatttctggtttggtcggtattacacctggtgctggctttgttccaatttggtcttcatttatcatcggtgtgctttctgcagcaggctgtaacttagccgttgacttgaagaatgttctgcacatcgacgatggtcttgatgtgtatgcattgcatggtgttggtggttgtattggttccgtgctaaccggtatcttcgcagctgattatgttaacgcaacagcaggttcatacatcgccccaattgcaggaggatggttaaaccatcactggaaacaagtgggataccaattggctgctatttgtgcaacaattgcctggacagtcaccattactgcaattttgcttcttgccatggatcaaattccattcctgagactaagattaagaccagaagaagaggaacaaggtactgatgaagcggagattggcgagtttacataccaagaggaacaagaatatattcctgaaccagtccgttcaaggtctccaggtatgcaaccaaaaatgtcctccattgacgataaaattactggaccacaacaagtgattgattcaaagctttctgagtcagaatcaggatctaatgaggcaggctctaatatgggtgaaaagcaaacagtttaa

SEQ ID NO: 67380 - protein, 504 aa, Candida glabrata CBS 138
MSYNFTGTPTGHGTGGDSLTTDLNTQFDLVNMTWLGVCTSGVWLMVPGIGLLYSGLSRKKHALSLLWASLMAACLVIFQWFFWGYSLSFSHETRGNGFLGTLEFFGFRNVLGAPSVVTSVPDIVFAIFQGMFAAVTGALMLGGACERARLMPMMIFLFLWMTIVYCPIACWTWNAEGWLAKLGALDYAGSGPVHTASGHGALVYALILGKRNDPVAKKGMPKYKPHSVTSVVLGTVFLWFGWQFFNPGSAGNASIRAWYSAMNTNLAAASGGLTWLFIDYFRTGGKWTTVGMCSGIISGLVGITPGAGFVPIWSSFIIGVLSAAGCNLAVDLKNVLHIDDGLDVYALHGVGGCIGSVLTGIFAADYVNATAGSYIAPIAGGWLNHHWKQVGYQLAAICATIAWTVTITAILLLAMDQIPFLRLRLRPEEEEQGTDEAEIGEFTYQEEQEYIPEPVRSRSPGMQPKMSSIDDKITGPQQVIDSKLSESESGSNEAGSNMGEKQTV

SEQ ID NO: 67381 - DNA, 1362 bp, Kluyveromyces lactis NRRL Y-1140
  CDS (1)..(1362)
atgacttcagtgtggcatgagacttacgatggttcaacaattgcgtttatcttcatgggatgcgctttagtattcattatggtacccggtttgggtttcttatattcaggtttagcaagaaggaaatctgctctttcgttgatttgggcagttatcatggctactttggttggaatggtccaatggtatttctggggttactctttggccttttcaaagactgcgatcaatcacaaattcataggggatttgaactcgttcgggttcagaaacgtttatgggtatgcggatcccgaggatccaacgacgtacccggaattagcatgggcagctttccaaggtatgtttttatgtgtcactttgagtattattgccggtgccactgcagaaagaggtagactcttgcctcatatggttttcctattctgtttcgcaaccattgtgtactgtcccgttacattttgggtttggtgccctgatggatgggctgccagatggggagtgctagactgggccggtggtggtcctgttgagattttgagtgcggttggtgggttcgtttattctgcattcttgggtaagcgtcatgaaagccaattgatcaatttcagacctcataacgtctctatggttactttagggaccagtttattgtggtttggatggctcggtttcaatggttgtaccagtttggatccaaatatgaaatccgtgtttgcgctcttgaacacaaatctaagtgccgcatttggtggtatgacctggtgtctattggattatagactagagaagaaatggtctactgtgggtctttgctctggtatcatttgtggtctcgttgcagccacaccaagtgcaggttgtatcacactctatgcatcagttatccaggggatcacagctggtgtagtatgtaacttttccaccaagataaaatacgtgctaaaagtggacgatgcgatggatatcttggcagagcacggtatcgcaggagttgttgggctaatatttaatgcattttttgctgcagactggatcatcggttcagatggtgccactgaacatggtggtggatggctctctcacaattggaagcaaatgtacatgcaaatcgcttatatcgcggcagttaccggttacgctgctgtggttactgccatcatttgcttcgtgctaaataagattccaggcctgcaactcagagctgacgaagaggcagaagatagaggtatggatgaggaccaaatcggagaattcgcatacgattatgtcgaagtgagaagagattattattcatggggtgtacctaatgacaccgattcaggaaacgaaaaaatcactggtcctcaaacaccaatataa

SEQ ID NO: 67382 - protein, 453 aa, Kluyveromyces lactis NRRL Y-1140
MTSVWHETYDGSTIAFIFMGCALVFIMVPGLGFLYSGLARRKSALSLIWAVIMATLVGMVQWYFWGYSLAFSKTAINHKFIGDLNSFGFRNVYGYADPEDPTTYPELAWAAFQGMFLCVTLSIIAGATAERGRLLPHMVFLFCFATIVYCPVTFWVWCPDGWAARWGVLDWAGGGPVEILSAVGGFVYSAFLGKRHESQLINFRPHNVSMVTLGTSLLWFGWLGFNGCTSLDPNMKSVFALLNTNLSAAFGGMTWCLLDYRLEKKWSTVGLCSGIICGLVAATPSAGCITLYASVIQGITAGVVCNFSTKIKYVLKVDDAMDILAEHGIAGVVGLIFNAFFAADWIIGSDGATEHGGGWLSHNWKQMYMQIAYIAAVTGYAAVVTAIICFVLNKIPGLQLRADEEAEDRGMDEDQIGEFAYDYVEVRRDYYSWGVPNDTDSGNEKITGPQTPI

SEQ ID NO: 67383 - DNA, 1482 bp, Kluyveromyces lactis NRRL Y-1140
  CDS (1)..(1482)
atgtccgaatttacaggtattccaactgacaccggaaccggtggtaactctttggatacagatttgaacactccatatgacaaggctaacatggcctggattatggttgccggttcatttgtctggttaatggtcccaggtatcggtttgttgtactctggtctttcgagaaaaaagcacgctttgtctctattatgggcttccattatgactatttcggtggtcactttccaatggtattggtggggttacagtcttgtgttctcccataatacaagaggtaacggtttcatcggtactttatccgaatttggtttcaaaaacgttcttggtgctccttctgctgctggtactgttccagatatcttattcgcttggtttcaaggtatgttcgcaatggtcaccggtattttgatggtcggtggtgcctgtgaaagagctagattgttcccaatgatggtctttttgttcttgttcatcaccatcgtatactgtccaattgcttgttggacttggaacccagagggttggttggctacccttggtgctttagattacgcaggtggtggtccagtccacatttgctccggtcacggtgctttgatttacgctttgattttgggtagaagaaatgatccattgacgaagtctggtgttcctaagtacaagccacattccgttacctctgtcgtgttgggtactgtcttcacttggatcggttggattggtggtttcaacccgggttccgctggtaacgctaccattagagcttggtactctgcctattcaacaaacttggctgctgcttgcggtgctttgacctggatgttcatcgattacttcagatctggtcgtaaatggactactgttggtttgtgttctggtgccatttccggtttggtcggtattacccctgccgctggtttcgttccattatgggcttccgttatcatcggtatcgtcacagctgctggttgtaacttggctgtcgacctgaagaatttgttgaagatcgatgacggtttggacgtgtacgctttgcatggtgtcggtggctgtatcggttcagttttgactggtattttcgctgccgattacattaacgcattggccggcgttgaaagttccccaattgctggaggttggatcaaccacaactacaagcaagttggttatcaattagctgccgtgtgtgctactatcgcatggacctgtgtcgttaccgcatgtttgctattgatcttggacaggatcccattcctaagattgagattgagacctgaagaagaagaattgggtactgatgaagctgaaattggtgaattcacctacgaagaagacgctgtctacattccagaaccaatcagatccaaatccatcgctgaagctcctccagcaaacatcgatgacaagattcacacaggaaacaactcttcatcagaactacaatctgaaccaaaaactacttccgctaatgcctaa

SEQ ID NO: 67384 - protein, 493 aa, Kluyveromyces lactis NRRL Y-1140
MSEFTGIPTDTGTGGNSLDTDLNTPYDKANMAWIMVAGSFVWLMVPGIGLLYSGLSRKKHALSLLWASIMTISVVTFQWYWWGYSLVFSHNTRGNGFIGTLSEFGFKNVLGAPSAAGTVPDILFAWFQGMFAMVTGILMVGGACERARLFPMMVFLFLFITIVYCPIACWTWNPEGWLATLGALDYAGGGPVHICSGHGALIYALILGRRNDPLTKSGVPKYKPHSVTSVVLGTVFTWIGWIGGFNPGSAGNATIRAWYSAYSTNLAAACGALTWMFIDYFRSGRKWTTVGLCSGAISGLVGITPAAGFVPLWASVIIGIVTAAGCNLAVDLKNLLKIDDGLDVYALHGVGGCIGSVLTGIFAADYINALAGVESSPIAGGWINHNYKQVGYQLAAVCATIAWTCVVTACLLLILDRIPFLRLRLRPEEEELGTDEAEIGEFTYEEDAVYIPEPIRSKSIAEAPPANIDDKIHTGNNSSSELQSEPKTTSANA

SEQ ID NO: 67385 - DNA, 1470 bp, Kluyveromyces lactis NRRL Y-1140
  CDS (1)..(1470)
atgtccgaatttacaggtattccaactgacaccggtactggtggtaactctttggatacagatttgaacgctccatatgacaaggctgacatggtctggatttttattgctggttcatttgtctggttgatggtcccaggtatcggtttgttgtactctggtctttcgagaaaaaagcacgctttgtctctattgtgggcttccattatgaccattgccgtggtcactttccaatggtattggtggggttacagtcttgtgttctctaagacaagaggtaacggattcatcggtactttatctatgttcggtttcaaagatgttcttggtgctccttctgctgtcggcgttgttcctgatattgtattcgcttggttccaaggtatgttcgctattgccaccggtattttgatggtcggtggtgcctgtgaaagagctagattgttcccaatgatggtctttttgttcttgttcatcaccatcgtatactgtccaattgcttgttggacttggaacccagagggttggttggctgcccttggtgctttagattacgcaggtggtggtccagtccacatttgctccggtcatggtgctttgatgtacgctttgattttgggtaagagaaacgatccattgacaaaatctggtgttcctaagtacaagccacattccgttacctctgtcgtgctgggtactgtcttcacttggctaggttggattggtgccttcaacccaggctccgccggtaacactaccattagagcttggtactctgcttattcaactaacttggctggttcatgtggagctttgacctggatgttcatcgattactttagatgtggtcgtaaatggactactgttggtttgtgctccggtgcgattgcaggtttagttggtattactccggctgctggatttgttccattatgggcctcagttatcgttggtattgttaccgctgctggttgtaatttcgccgttgatttgaagcatatcttgagaatcgatgacggtttggacgtgtacgctttacatggtgtcggtggctgtatcggttcagttttgactggtattttcgctgccgattacattaacgcattggccggcgttgaaagttccccaattgctggaggttggatcaaccataactacaagcaagttggttaccaattagctgccatgtgtgcgagtgtcgcctggacctgtgtcgttaccgcatgtttgctattgatcttggacaggatcccattcctaagattgagattgagacctgaagaagaagaattgggtactgatgaagttgaaattggtgaattcacctacgaagaagatgctgtctacatcccagagccaatcagatccaaatccatcgctgaagctcccgcagcaatcattgacgacaaagtccaaacaggaaacagttcttcagaggaactccaatctgaaccaaaaactaatgcttaa

SEQ ID NO: 67386 - protein, 489 aa, Kluyveromyces lactis NRRL Y-1140
MSEFTGIPTDTGTGGNSLDTDLNAPYDKADMVWIFIAGSFVWLMVPGIGLLYSGLSRKKHALSLLWASIMTIAVVTFQWYWWGYSLVFSKTRGNGFIGTLSMFGFKDVLGAPSAVGVVPDIVFAWFQGMFAIATGILMVGGACERARLFPMMVFLFLFITIVYCPIACWTWNPEGWLAALGALDYAGGGPVHICSGHGALMYALILGKRNDPLTKSGVPKYKPHSVTSVVLGTVFTWLGWIGAFNPGSAGNTTIRAWYSAYSTNLAGSCGALTWMFIDYFRCGRKWTTVGLCSGAIAGLVGITPAAGFVPLWASVIVGIVTAAGCNFAVDLKHILRIDDGLDVYALHGVGGCIGSVLTGIFAADYINALAGVESSPIAGGWINHNYKQVGYQLAAMCASVAWTCVVTACLLLILDRIPFLRLRLRPEEEELGTDEVEIGEFTYEEDAVYIPEPIRSKSIAEAPAAIIDDKVQTGNSSSEELQSEPKTNA

SEQ ID NO: 67387 - DNA, 1545 bp, Debaryomyces hansenii CBS767
  CDS (1)..(1545)
atggcaaacgatggttttactgggacaggtcccggaggagatataatgaaggtggatttgaacgaacaatttgacaaagcggacatggtctgggtcggagtatcggctgcattggtgtggcttatggttccaggagtgggtttgctttattctggtttatccagaaagaagcatgcattgtcgttattatgggcctcgcttatggccacttgcttgactgcctttcagtggttcttttgggggtactcattagttttcacaaaaagtgactcggtgatcttgggtaacttggactatttctccttgaagaatgtgttcggggccccaagcgtggtctcaactgttccagacattttattttgtcttttccagggtatgtttgccgcagtgactgccattttaatggttggtgctgggtgtgagagagcaaggttaggaccaatgatggtcttcttattctgctggttaactgttgtttattgtccgatcgcatactggacttggggtggtaatggatggttattcaacttgggtgcattagattttgctggtggtggaccagttcacgaaaattctggttttgctgcgttggcttattcattggtattgggtaagagacacgatccattaacagctggtaaagttcctaaatataaaccacattcagttacttcagttgtgttaggaactgtgtttttatggttcgggtggtttggcttcaacggtggttctacagggaacgcatctatccgttcttggtatgcttgtgtcaacactaatattgctgctgcatgtggtggtttaacttggatgtttgtcgattggtttagaaccggtggaaaatggtccacagtaggtttatgtaccggtgccattgctggtttggtcggtattactccggctgccggatttgtcccagtttacacctcgatagtctttggtgtcgttccagctattgtttgtaactttgctgttgatttgaaatctatcttacagattgatgatggtatggatgtttttgctttgcatggtgttggtggtatctgtggttcaattttaaccggattttttgctgctgactacattgctgcttctgatggttctgttgcagcagatccttcagctgccatcgctggtggctggatgaatcataattataagcaattaggttaccaaattgcaggctcatgtgccgttggcctctggagtttcacgcttactggcatcttattattaataatggacagaattcctcagttgagaatcagattacatgccgatgaagaaattatgggcaccgatattgctgaaatcggtgaatttacatactacgatgatgaaatgggacaaggtaatacgttggctatgagcgataacttaccatatgttatagaaccaatcagatctaccgatcaaaagaaagcccaattacaagctgctgcttccagaaatgatccagaagttcatatgggcactacagcagacggccaagggtttgttagtcccgacgatggaagcggtacaagtcatgctaccaaagaataa

SEQ ID NO: 67388 - protein, 514 aa, Debaryomyces hansenii CBS767
MANDGFTGTGPGGDIMKVDLNEQFDKADMVWVGVSAALVWLMVPGVGLLYSGLSRKKHALSLLWASLMATCLTAFQWFFWGYSLVFTKSDSVILGNLDYFSLKNVFGAPSVVSTVPDILFCLFQGMFAAVTAILMVGAGCERARLGPMMVFLFCWLTVVYCPIAYWTWGGNGWLFNLGALDFAGGGPVHENSGFAALAYSLVLGKRHDPLTAGKVPKYKPHSVTSVVLGTVFLWFGWFGFNGGSTGNASIRSWYACVNTNIAAACGGLTWMFVDWFRTGGKWSTVGLCTGAIAGLVGITPAAGFVPVYTSIVFGVVPAIVCNFAVDLKSILQIDDGMDVFALHGVGGICGSILTGFFAADYIAASDGSVAADPSAAIAGGWMNHNYKQLGYQIAGSCAVGLWSFTLTGILLLIMDRIPQLRIRLHADEEIMGTDIAEIGEFTYYDDEMGQGNTLAMSDNLPYVIEPIRSTDQKKAQLQAAASRNDPEVHMGTTADGQGFVSPDDGSGTSHATKE

SEQ ID NO: 67389 - DNA, 1578 bp, Debaryomyces hansenii CBS767
  CDS (1)..(1578)
atgacaatttcatctgtaacaacaggcatattaaatcgaagaaagctattcacagcaaatgaagactataaggaaagtgacatattattattctcgatcgcttcgtcgctaatctggataatgataccgggtttagcatttttatattctgggttggccagacggaaaagtgcgttgtcgatgatatggatagtgttgatgagttcgttcattggaatcttccaatggtacttttggggatactcgttagccttttctgacaaatctgcaaacaattttattggggacttgcatttctttggcttcaagaatctattaggtagtgctgaaggcacgcctgactatcctgaaatcgcctatgcgttatttcaaatgcaatttttgttggtcaccttagctattttagcaggcgggtgtattggagaaagaggaagatttttaccaacggctatctttttattttgctgggcgacagtggtttactgtccggtggtttactggatttggggaggtggatgggcctcacagtggcaagggggtgctttggattatgcgggtggtggcccagtagaaatactatcgggtgtatcagcgtttgtattcagtgcattcttaggtagaagaaacgagacattgatgattaattatcgtccacacaacatttccaccatttgtatgggaacatcattactttatgtgggatggttatttttcaacgggttctcttgtggaaatgcatcaatcaaggttccatactcgatgttcaatacccatttatgtggtgcattcggggctatcacatggtgtttgcttgatttcagattggaaaataaatggtccatggttgcggtctgctcgggttgtatttcaggattagtggcggccactccttcatcaggtatgatcccattatgggcctcagtgattcttggaattgtatctggtattgtgtgtaacttttccaccaaaatcaaatatctctgcagagtcgacgattccctagatgttttagcggagcacggtatcgccggtattgtgggattgattttcaatgcattatttggaagttccactgttatcggctacgatggagtaactgtgcacgccggtggttggattgatcacaattacaaacaattgtacattcaaatcgtctatatcttggccaccgcagcttatgctggtggtgtcacggctgtgctatgcttcgtaatcaacaaaatccccggtttgcacttgagaatagattacaatgccgaagaaattggtatggacgaagaccaaatcggtgaatttgcctatgattatgtcgaagtaagaagagatttcttagattggggcaatcctaacgtcaatccaaatgctcaaatgtctcgtccatcccaggaagttatggagggaattcctccgaatccccaggttttccaggcagttggcagctcctcagtatcgactgctcatcaggatgactcgagcattcaagaaaaactcgattctcagaatcatgactcccaagtcccagaatcccaaaattataatactgctagcgatactaaggaagatgttatcgaagagtag

SEQ ID NO: 67390 - protein, 525 aa, Debaryomyces hansenii CBS767
MTISSVTTGILNRRKLFTANEDYKESDILLFSIASSLIWIMIPGLAFLYSGLARRKSALSMIWIVLMSSFIGIFQWYFWGYSLAFSDKSANNFIGDLHFFGFKNLLGSAEGTPDYPEIAYALFQMQFLLVTLAILAGGCIGERGRFLPTAIFLFCWATVVYCPVVYWIWGGGWASQWQGGALDYAGGGPVEILSGVSAFVFSAFLGRRNETLMINYRPHNISTICMGTSLLYVGWLFFNGFSCGNASIKVPYSMFNTHLCGAFGAITWCLLDFRLENKWSMVAVCSGCISGLVAATPSSGMIPLWASVILGIVSGIVCNFSTKIKYLCRVDDSLDVLAEHGIAGIVGLIFNALFGSSTVIGYDGVTVHAGGWIDHNYKQLYIQIVYILATAAYAGGVTAVLCFVINKIPGLHLRIDYNAEEIGMDEDQIGEFAYDYVEVRRDFLDWGNPNVNPNAQMSRPSQEVMEGIPPNPQVFQAVGSSSVSTAHQDDSSIQEKLDSQNHDSQVPESQNYNTASDTKEDVIEE

SEQ ID NO: 67391 - DNA, 1722 bp, Yarrowia lipolytica CLIB122
  CDS (1)..(1722)
atgtattccagatcaggtcggaaaaaagaaaccacaacaccccaacaccaacaccaacagctacagctactctacacgctcttattcacactattcatggaggcgtatcatccgggcgacctgctctcggtgatccacagcacgatggccatgatgctcatgtgtccggcgctcggcatgctctattcagggctcactccacactcttcggccctctccatggcaggcatgaatcttgcagctctatcgatggctgtattgcagtgggtggtatgggggtactcgttggctctgagtccgacggggggcaagttcatggggaatctacgacacgcaggcttccaccatgtggctctggaaccacaccccattgcttttggacggctaccaggactcgcggtggccatgtttgagggcatgtttttgtgcatcacggcggtcattatgacgggaagcatcgtggggcgaggccgtgtcgtcccctttgtggtcttcatcttttgctgggccacggtggtttactgccccattgcatgctgggtttgggggcctaatggatggagcggcaacttgggcgctcttgattttgcgggaggctcacctgttcacatcaactcgggattcacaggtttggcatacggtatcatgctcagatggagccgaggaaggaagatgggccagacccccgtggcggtccctgaaccacattatccacattcagccatgctggtaatgattggaacaggcctactgtggacggggtggctcggttttgcgtctgaaggcgcctttggggccaacctcatggctcttatggcttcgtccaatactatgattggaggagcgtttggaggactagcatgggccgtgctggactacagaatcgaacgaaagctgtcgatgattgggttctgctcaggtgccgtgtctggactcgtttctctgtccccttcgtcgggctatgtggctccttgggccgctattgtttgtgccattgtaggctccatagcctgcaacctcgccacacagctcaagtttttcatccacgtggaggaccctctggacgtgtttgctattcacggtatcggcggcatggtaggttcgctgctagtcgggctgtttgccgagaaagaagtggccaaactggacggaaacagagatatcaagggaggttgggtcaatcagcattacgcccagcttggctaccagtgcgcagaggtgttttccgtggccggatacgccttctttgtgtctcttgttctgctattcatcattgatcgaattccagggctacatctgcggatggatcctgaagcagagagccagggtcctgacaccaaccagcatggcgaggtgtgctacgagtttctggcgcagctgggtgacgaccccagccccaaccatccagacacggatccttccaacaccatcaatgggtcgtccccgcgtccttccatggacggcaaccagtttggcatctatgagttgcatgccattcagtccaaaaaggtgaacgatgcgtaccattttcccatgcacccgcccatgcaggtcaacttccctcccccggtatcccagccgcaacctccatctcaggatgcgacccctccgccccacaatgaaccacctccaacgcccatgctggactttagtcttggaccccaacagcccccaagacagccgttgaaccgcacagtgacgtctcccttgctaggggaatga

SEQ ID NO: 67392 - protein, 573 aa, Yarrowia lipolytica CLIB122
MYSRSGRKKETTTPQHQHQQLQLLYTLLFTLFMEAYHPGDLLSVIHSTMAMMLMCPALGMLYSGLTPHSSALSMAGMNLAALSMAVLQWVVWGYSLALSPTGGKFMGNLRHAGFHHVALEPHPIAFGRLPGLAVAMFEGMFLCITAVIMTGSIVGRGRVVPFVVFIFCWATVVYCPIACWVWGPNGWSGNLGALDFAGGSPVHINSGFTGLAYGIMLRWSRGRKMGQTPVAVPEPHYPHSAMLVMIGTGLLWTGWLGFASEGAFGANLMALMASSNTMIGGAFGGLAWAVLDYRIERKLSMIGFCSGAVSGLVSLSPSSGYVAPWAAIVCAIVGSIACNLATQLKFFIHVEDPLDVFAIHGIGGMVGSLLVGLFAEKEVAKLDGNRDIKGGWVNQHYAQLGYQCAEVFSVAGYAFFVSLVLLFIIDRIPGLHLRMDPEAESQGPDTNQHGEVCYEFLAQLGDDPSPNHPDTDPSNTINGSSPRPSMDGNQFGIYELHAIQSKKVNDAYHFPMHPPMQVNFPPPVSQPQPPSQDATPPPHNEPPPTPMLDFSLGPQQPPRQPLNRTVTSPLLGE

SEQ ID NO: 67393 - DNA, 1368 bp, Yarrowia lipolytica CLIB122
  CDS (1)..(1368)
atgtctgaacccacgctcgagtctcttcagtacaccatcaacaccgcatacatgctggtggcatcggctggagtgtttgttatcactccgggaattggcttattctacgcgggcatgctcaggaagaacagtgctatgcaggtgattgttcaatcgtacatcaccacgtttgttgtcacgatacaatggtggatatggggctatgccctggcattaggagatggaagctcttttctaggaaacctgaacatggctttcctcaaggactcgaaccctggtcccttggtcgaaggaggtcccgttcccagtgcagcctacttcatcttttccgtcttctttcccgtttgcactgttcagatctttttagggagcacagccgaaagaggccgtgtgattccggcgcagatcatcgggtttctgttcactacagtggtatactgtcctctggcatactggttctgggcacccaagggctggttgctggttctaggcacgctggattttgctggaggagcacctgttcatattgctggaggaaccgcatctttggcctatgccatgttcctgggaccacgaaaaatcacccccagattccatgcctataaaccacacaatgcgacaatgtctatgattggcacgactctcatctggtatggctggctgttcttcaactcggggactctccaggctgtcaacacccggacagcttacatcatgctcaacacccatttgagtgcctctgcagctggaatgacttatgtcatctacgataagatcttccacaaaaaattttctatgatgggtgcatgcgaaggagctattgcaggactggtcgctgttactccttcctgtggttacgttgcgccatgggctgccttcactggaggcatcatgactgccctggtgtgtagattgaccataaacgtgaacaagtggctacgagtcgacgatgccatctactcgttcaatctccatgccattggtggatgtatgggatccctcgttaccggcttctttgcgtcttcaacttggactgatatggatggcagtaaagacgctattgctggaggttggattgccaaccactgggtccagatcccttaccagctggctggactgggagccactattggctggacgtttgtcgtcacctatattctctgctttgtggtggacaagattccgggcctgaagctccgagtagatgaagaccaagaactcaagggtatggacgcatatgacattctggagtccgctggagagaccattgacggtgtcattgttaacacaactgaaattttggtggcccatactcctgctcatactccagatagtggctcttttgtacggggtgagaagaaggaatag

SEQ ID NO: 67394 - protein, 455 aa, Yarrowia lipolytica CLIB122
MSEPTLESLQYTINTAYMLVASAGVFVITPGIGLFYAGMLRKNSAMQVIVQSYITTFVVTIQWWIWGYALALGDGSSFLGNLNMAFLKDSNPGPLVEGGPVPSAAYFIFSVFFPVCTVQIFLGSTAERGRVIPAQIIGFLFTTVVYCPLAYWFWAPKGWLLVLGTLDFAGGAPVHIAGGTASLAYAMFLGPRKITPRFHAYKPHNATMSMIGTTLIWYGWLFFNSGTLQAVNTRTAYIMLNTHLSASAAGMTYVIYDKIFHKKFSMMGACEGAIAGLVAVTPSCGYVAPWAAFTGGIMTALVCRLTINVNKWLRVDDAIYSFNLHAIGGCMGSLVTGFFASSTWTDMDGSKDAIAGGWIANHWVQIPYQLAGLGATIGWTFVVTYILCFVVDKIPGLKLRVDEDQELKGMDAYDILESAGETIDGVIVNTTEILVAHTPAHTPDSGSFVRGEKKE

SEQ ID NO: 67395 - DNA, 1461 bp, Yarrowia lipolytica CLIB122
  CDS (1)..(1461)
atggctgacgctacctcaacgcaagctccccttccgaccactggcaatggaggagactccctcacacaaaacctgaacgtccccttcctgggtgccgatatggtctggatcatgacctcttcggcactggtctggatcatgattccaggagtcggtctgctctactctggtatgtcgcgtaagcaccacgccctgtctctcctgtgggcatccatcatgtgctgtgccctcgtctctttcgagtggtttttctggggttacactctggcattctctcacaaggccggaaagttcattggaaccatggataacttcggtcttatgaatgttctcgctgctccctctgttggctcctctgctgtccccgatatcctgtatatgttctaccagggcatgttcgcatgcatcaccggtatgctcatggttggtggagctcacgagcgagctcgactcggccccatgatggtatatctcttcatttggatgactgtcgtctactctcctattgcatgctggacatggaaccctagtggatggctcgccgtccttggaggacttgatttcgcaggtggaggacctgttcacatgtcttccggtgcgggtgcccttgcctatgctctctggtgtggtaagagacgtgaccctgctgttgagaagctgcctcactaccggccctcttccgttacttccgttgttctcggcactgttttgctttggttcggatggttcggattcaacggtggttcctctggtaacgcctccatccgaggcttctacgctgccgctaatactaaccttgctgctgcttgcggtgctctcgcttggatgtgtgtcgacttcttccgaaagggccgaaagtggtccactgttggtctctgttctggtgccatcgcaggtctcgttggcatcacccccgccgccggcttcgtccctatctggtctgctgtccctattggtatcatcaccgccgtcttcgctaacatttctggtgaccttaagaatctgctccgaattgatgatggtctcgatgtcttctctctccatggtgtgggaggattctgcggctctgttcttactgccttctttgctgctgactacattgcccatctggatggtgccacagagatcaagggtggatggctcaaccaccactgggctcagctgggttaccagctggctggtgcgtttgctaccctcggctactcctttgtggtctcttcagttattcttgtcatcatgaacagaatcccctacctcaacgtccgaatgaccgaggaggaggagatgcttggaaccgacatggcccagatcggcgagtttgccttcgactgggaggactctggagtcctggacctgcatggccagaaccccaatggtatgggcgtcacccccaacgtccagactcccaagcccagcagcatcaacgaaaacaaggaggctgctgagagtgattcggtttaa

SEQ ID NO: 67396 - protein, 486 aa, Yarrowia lipolytica CLIB122
MADATSTQAPLPTTGNGGDSLTQNLNVPFLGADMVWIMTSSALVWIMIPGVGLLYSGMSRKHHALSLLWASIMCCALVSFEWFFWGYTLAFSHKAGKFIGTMDNFGLMNVLAAPSVGSSAVPDILYMFYQGMFACITGMLMVGGAHERARLGPMMVYLFIWMTVVYSPIACWTWNPSGWLAVLGGLDFAGGGPVHMSSGAGALAYALWCGKRRDPAVEKLPHYRPSSVTSVVLGTVLLWFGWFGFNGGSSGNASIRGFYAAANTNLAAACGALAWMCVDFFRKGRKWSTVGLCSGAIAGLVGITPAAGFVPIWSAVPIGIITAVFANISGDLKNLLRIDDGLDVFSLHGVGGFCGSVLTAFFAADYIAHLDGATEIKGGWLNHHWAQLGYQLAGAFATLGYSFVVSSVILVIMNRIPYLNVRMTEEEEMLGTDMAQIGEFAFDWEDSGVLDLHGQNPNGMGVTPNVQTPKPSSINENKEAAESDSV

SEQ ID NO: 67397 - DNA, 1362 bp, Yarrowia lipolytica CLIB122
  CDS (1)..(1362)
atgtcagaatatgaactacccgacctagtatgggtgacgacaagcggagcgttagtgtggctcatggtgcctggaatcgcgtttctatactcgggattgtcgcgcaaaaaccatgccctgggtgctctttggactggaatgatgactctcggcgtctccttcttccagtggtggttgtggggctactcgttgagcttttcggccaaggataacggtcaacacttcattggaggaatggaacacgttgttgctcaacatgtatggacttctcggtcggcttcgacgcccacagttcccgatgtagtgtgttacttctaccagggcatgtttgcgtgtgtcactgcagctctcatgattggcggaggaaacgagcgagtaagactggggcctttggctgtgtttcttttcatatggcagacaattgtgtattgtccaattgcctactggacgtggaaccccaatggttgggctgctcgtttgggcagtctggactttgcagggggaggaccggttcacatgtgctctggaagtgcagccatggcgtttgccttggtggttggacgtcgaaaaagtccagcttgtgactttgtgcctgccttcaggccctcgtcggtagcctacatcatcatgggcaccatcatgctgtggtttgggtggctggggttcaacggaggctctgctgggggagccagtgtgcgaggaattgtggccatggtgaacaccaatctggcggcttcctgtggtggactcacgtggatgatggtggactacttccgacacaatggaaagtggactgccatcggtatctgttcgggagccattgtggggcttgtgggggtcactccagctgccggatttgtgcccgcgtggtcggcggtagttattggaattgtttctggagtcgcagccaatctcggaatcggaatcaagggtgttgtatacatcgacgacggtctagacgtgtttgcgctccatggaattggaggctttacaggctcagtcatgaccgccttttttgcgtccgactgggtcacaaaaacagacggagtcaccgtaatccagggcggatgggtcaacggacattacgtccagctgggctaccaattggcctcggcatgtgctaccattggctggtcctttgccatcacctacctcattctcatcaccatggacttgatcccgtttctgaccctgagaatggacgcagtggatgaacaactaggcaccgacgtgacccaactgagcaacgagtgtcctgagcagtgggaggagttgaccctctatctcagaccgtggctggagaatgtggagaaggagaaacaggaaagaatggcccaggaggccatgcaccaggtggtatga

SEQ ID NO: 67398 - protein, 453 aa, Yarrowia lipolytica CLIB122
MSEYELPDLVWVTTSGALVWLMVPGIAFLYSGLSRKNHALGALWTGMMTLGVSFFQWWLWGYSLSFSAKDNGQHFIGGMEHVVAQHVWTSRSASTPTVPDVVCYFYQGMFACVTAALMIGGGNERVRLGPLAVFLFIWQTIVYCPIAYWTWNPNGWAARLGSLDFAGGGPVHMCSGSAAMAFALVVGRRKSPACDFVPAFRPSSVAYIIMGTIMLWFGWLGFNGGSAGGASVRGIVAMVNTNLAASCGGLTWMMVDYFRHNGKWTAIGICSGAIVGLVGVTPAAGFVPAWSAVVIGIVSGVAANLGIGIKGVVYIDDGLDVFALHGIGGFTGSVMTAFFASDWVTKTDGVTVIQGGWVNGHYVQLGYQLASACATIGWSFAITYLILITMDLIPFLTLRMDAVDEQLGTDVTQLSNECPEQWEELTLYLRPWLENVEKEKQERMAQEAMHQVV

SEQ ID NO: 67399 - DNA, 1497 bp, Yarrowia lipolytica CLIB122
  CDS (1)..(1497)
atggagatgctggagaagcgaggaggtgatgtgtggcaatacacttacgatactggagatgtggcctacatcaccgtgtccatgtgcatgattctggtcatgattccaggcctgggttttctgtactcgggtctggcccgaagaaagtcggcgctgtctatgatctgggtgtgtttcatgggcgccattgttgcccagattcagtggtacttctggggatactcgttggccttttctccttcttctaaccggtttatcggcaacctggacaactttggtcttaagaacattctcaaacacgaggacggcagtcgcaagtaccccgagctgctgtttgccggcttccagggtatgttctgctctgtgaccgtggccattgtggtgggaggtgtggccgagcgaggtcgtctgctgcccgccatgatttttgcattctgctgggccaccattgtctactgccccattgcattctggatctggggccccaacggatgggctggagctcactgggacgtgctggactttgcaggaggaggacctgtggaaattgcatctggtatcggaggtctggcatactcttttgctcttggccgaagaaaggaacaactgctgctcaacttccgaccccacaacgtgtctctggtgaccatgggaaccgctctactgtggtttggctggctgggattcaacggaggctctgctcttggctccaacctgaaggcggtctacgctgtgtggaactccaacattgccgcctgctttggtgctctgacttggtgtctgctggatttccggctcgaaaagaagtggtctaccgtggccatctgttccggtattatttcggggctggttgctgctactccctgttctggtatcattcctctgtgggcctctgtccctctcggtatcgttgcagcagcgatttgtaacttttctacacaaatcaagtacattctcaagattgatgattccatggatacctttgctgagcacggcgtcgcaggaattgtcggactcattttcaacgccttctttggagccgactacgtgattggcttggatggatccactcctcacggaggaggatgggtgtccaacaactggaagcagatctacaagcagatttgttttgtgttggccgcctctggatacacctttgtcatgactgtcgtgctctgctacgccatcaacttcatccccggctgcaagctgcgagcatctgaggaggccgaacttcgaggaatggacgaagaccagattggagagttcgcctacgactacgtcgaggtccgacgagactggctggcttggactccccccaccaagtcgcacatgcacgatgagcctgagcactcgaccgatgccgacgcgattgaggccaacgccgacgtcctggccggctccagtccaaacgaccagaactcgtccatggaacaaccccccacttcttcccaggccacctcggccgacgatgaaaagaacggaattcatccgtaa

SEQ ID NO: 67400 - protein, 498 aa, Yarrowia lipolytica CLIB122
MEMLEKRGGDVWQYTYDTGDVAYITVSMCMILVMIPGLGFLYSGLARRKSALSMIWVCFMGAIVAQIQWYFWGYSLAFSPSSNRFIGNLDNFGLKNILKHEDGSRKYPELLFAGFQGMFCSVTVAIVVGGVAERGRLLPAMIFAFCWATIVYCPIAFWIWGPNGWAGAHWDVLDFAGGGPVEIASGIGGLAYSFALGRRKEQLLLNFRPHNVSLVTMGTALLWFGWLGFNGGSALGSNLKAVYAVWNSNIAACFGALTWCLLDFRLEKKWSTVAICSGIISGLVAATPCSGIIPLWASVPLGIVAAAICNFSTQIKYILKIDDSMDTFAEHGVAGIVGLIFNAFFGADYVIGLDGSTPHGGGWVSNNWKQIYKQICFVLAASGYTFVMTVVLCYAINFIPGCKLRASEEAELRGMDEDQIGEFAYDYVEVRRDWLAWTPPTKSHMHDEPEHSTDADAIEANADVLAGSSPNDQNSSMEQPPTSSQATSADDEKNGIHP

SEQ ID NO: 67401 - DNA, 1419 bp, Aspergillus nidulans FGSC A4
  CDS (1)..(1419)
atgtctagtcccgaatatgatccctccatacctgatggcggagatacgaccaagctcgacgtgaacgcgccgtttgttggatatgagttccatgccgtttacatcgctgcctgtactttcatcgtctatctcattcttccgggaatcggttttctttacagcggtttgactagaaggaagtctgcgatgacttttttgtttcaggcatttttagtcctggcagtcaccacatttcaatggatgttctgggggtattcactcacctactcgcgggatggcggcccctacattgggacgctgcagaattttgggctcatggatgccctggcggccccatcgccagggtctgccgtgcttcccgaagtcctcttctgcttgtaccagctcctcttcggttcctgcacggtcatgattgttgttggcggcgcctttgaaagaggcggtatcttggcgtcacttgtcttcgcctttgtctgggaaaccattgtgtactgtcctctcgcacggtggacttggagtagccatggctggctgtataatcttccctccgtcgacttcgccggaggcggcccggtccatattgcctcaggctgcgctgcattggcgtacgcagttgtcctcggcaagcgcaaaggctacccagacgccagtatgaagcggcctcacaacacgactctggtcttcctgggtaccgtctttatttggactggctggcttgggtttaatggcggttcgaccctcaacgcaagtgtccgtagttacatggccgttatgaacaccaacatcgcaggctccacgggcgtcctgggttgggtcctggtcgacatgatccggaacaagggaaaattctctatggtaggagcttgcgaaggcgccattgctggccttgttggtatcactccctgtgcgggatgtgtcactttctggctgggcgccctagttggtttccttactggcatcgtgtgttccgcgtgcaagaacctcaacgagtggattcgggttgatgaagggatggacgttttcaaactccatggagtcggcggtatggtcggctcattcctgactggcattttcgccgatcagtacatctcggcgttggatggcgattccctcattcctggagccatcaacggcgagggcgttcaggttggaaagcagcttgctgagatctgcgccatctccgcttattctttcggtgtgacctgggtcatactcatggtgatgaagttcattccatacctggggctgcgggccaacgaagaagctgagatggtcggactggaccgatccttcttcgtggacgagcagatcggcgactactccatgctggatgggatcaatagctcgccgttgatgggggtgtcgaaaacaccctcgagcgaagtacagcagacagcggccgagacgaaaagggcgtag

SEQ ID NO: 67402 - protein, 472 aa, Aspergillus nidulans FGSC A4
MSSPEYDPSIPDGGDTTKLDVNAPFVGYEFHAVYIAACTFIVYLILPGIGFLYSGLTRRKSAMTFLFQAFLVLAVTTFQWMFWGYSLTYSRDGGPYIGTLQNFGLMDALAAPSPGSAVLPEVLFCLYQLLFGSCTVMIVVGGAFERGGILASLVFAFVWETIVYCPLARWTWSSHGWLYNLPSVDFAGGGPVHIASGCAALAYAVVLGKRKGYPDASMKRPHNTTLVFLGTVFIWTGWLGFNGGSTLNASVRSYMAVMNTNIAGSTGVLGWVLVDMIRNKGKFSMVGACEGAIAGLVGITPCAGCVTFWLGALVGFLTGIVCSACKNLNEWIRVDEGMDVFKLHGVGGMVGSFLTGIFADQYISALDGDSLIPGAINGEGVQVGKQLAEICAISAYSFGVTWVILMVMKFIPYLGLRANEEAEMVGLDRSFFVDEQIGDYSMLDGINSSPLMGVSKTPSSEVQQTAAETKRA

SEQ ID NO: 67403 - DNA, 1437 bp, Aspergillus nidulans FGSC A4
  CDS (1)..(1437)
atgtcgacttaccctgttgcctacaatgggaccggcgtgaacggtggtgactccctcagggaggatctcaacatctactacagttctggtgatattgcatgggttattacctcaaccgcgctagttcttctaatgataccgggtgtaggattcttctactccggtctcgctcgtcggaagtccgccctctccctgatatggctttcattgatgtctatcggtgtggtctcattccaatggttcttctggggttattcgttggccttttcccacactgccggaaagtacattggtaacttggataactttgggttcaagggtgtcctgggcgctccttcagtgggctcaaccaaggtccccgatcttctgtttgctgtctttcagggaatgtttgctgcgattaccgttgcacttgccgttggtgccgttgcagagcgtggtcgtatgcttccctgcatggttttcgtctttatctggagtaccatcatctacgaccccgttgcatgctggacctggaatgcttctggttgggtcttccagttaggaggcttggactttgctggtggcacgccagtccacattgtctccggtacgacggctctggcctactctttgatgctcggcaagcgtcgtggtcacggaactcatgagctcaactatcgccctcacaacgttactcatgttgtgattggcaccgtctttctttgggttggctggttcggtttcaacgccggctccgccttgagcgctaatctgcgtgctgtgatggctgctgtagtgacaaacttggctgcttctgtaggtggtgtcacctggtgcttgctcgactaccgtctagaaagaaagtggtcaaccgttggcttctgttccggtgtgatttccggccttgttgccattacccccggttctggcttcgtgactccctgggctgcgtttatcttcggcgttgtcggtgctgctgcttgcaacttcgcgactaaagtcaagtatctcatccgagttgatgatgctctcgatatcttcgctgtgcacggtatcggtggtcttgtcggtaacctcctgaccggtctcttcgcagctgactacattgcccacctggacggctctaccgagatcgacggcggctggatcaaccacaattacatccaactcggctaccaacttgccgattccgtcaccggcatggcctactccttcttcggcagctgcatcattctctttatcatcaacatgatccccggccttagcctgcgcgtccctgaagaagatgaagtccttggtatcgatgacgccgaaattggcgaatttgcttatgactacgtcgaactcacccgcgacgttattaacgggaccactgagccgatggacggcgcatccaagcgcagcaccactcccaccggacccgtcgaaccatcccctgccgagctcaaagcgtaa

SEQ ID NO: 67404 - protein, 478 aa, Aspergillus nidulans FGSC A4
MSTYPVAYNGTGVNGGDSLREDLNIYYSSGDIAWVITSTALVLLMIPGVGFFYSGLARRKSALSLIWLSLMSIGVVSFQWFFWGYSLAFSHTAGKYIGNLDNFGFKGVLGAPSVGSTKVPDLLFAVFQGMFAAITVALAVGAVAERGRMLPCMVFVFIWSTIIYDPVACWTWNASGWVFQLGGLDFAGGTPVHIVSGTTALAYSLMLGKRRGHGTHELNYRPHNVTHVVIGTVFLWVGWFGFNAGSALSANLRAVMAAVVTNLAASVGGVTWCLLDYRLERKWSTVGFCSGVISGLVAITPGSGFVTPWAAFIFGVVGAAACNFATKVKYLIRVDDALDIFAVHGIGGLVGNLLTGLFAADYIAHLDGSTEIDGGWINHNYIQLGYQLADSVTGMAYSFFGSCIILFIINMIPGLSLRVPEEDEVLGIDDAEIGEFAYDYVELTRDVINGTTEPMDGASKRSTTPTGPVEPSPAELKA

SEQ ID NO: 67405 - DNA, 1635 bp, Aspergillus nidulans FGSC A4
  CDS (1)..(1635)
atggcctctgaaggcatggctcccttcactcccgagtatgcctcgtacaactggacaggcgctccctcagactattccagcctggccaccaacgagctgggcggaaactcaagggtggaaaacttgaacaaatggtaccagtcgggtgaccaagcctacatcatcgttgcttcggccatggtcatgctcatggtgcctggcctcggattcctttactccggtctcgctcgccgcaagtcagccctcagcatgatctgggcttgtatgggctcgatgtgcgttgtaacattccaatggtacttctggggttactcgcttgctttctctcccaccgctacaaatggatacattggaaacctgcgcaatttcggtctgatgaaggttctggcggaccccagcccagggtctcctctggttcctaacctcctctacgccttctaccagatgcaattctgtgccgtaactgctgctatcattatgggagcggttgccgaacgtgggcgtcttcttcctgccatggtctttactttcgtctgggccacaatcgtgtactgccccatcgcttgctgggtatggaatgtcaacggctgggccttcaactatggcgtgctggattatgctggtggtggccccgtcgaaatctgctccggtctttcggcgctcgcatactctatggtcctcggtcgtcgccaggagcgcatgatgctcaacttccgcccccacaatgtttccctcattctgctcggtaccgtctttctctggttcggatggcttggattcaacggtggctcgtcattcggtgcaaacatgcgcgctacgatggcatgctggaacacaaacttgaccgctgcctttggcgcgatcacttgggttattctcgattggcgcctggctcgcaagtggtcgatggtcggttggtgttccggtacaatctccggtcttgtcgctgctactcctgcttccggtttccttcctccctgggctagtgttgttctcggtattgtgaccggcattgtatgcaactactccacgaaggtgaaatactggatccgtattgatgactctatggatgtgttcgccgagcacggtgttgctggtattgtcggtctcattttcaacgccttcttcgcagacgacgccatcgtcggccttgacggggtcaacaccggttctgaaatgggcggctggctcatccacaactggaagcaactttacatccaaatcgccttcatcgtcgctgcctccgcctactccttcgttgtgtcggccattgtcgcctacgccatcaacgccatcccaggcctgaagctccgtgcatccgaagaggccgaactcctcggcatggatgatgatcagctgggtgaattcgcttacgactatgttgaggtccgtcgtgactaccttgcctggacaccccagaagcacgaccaacacgcagacggtcatgaggttcctgctgccgcgaggtatggcatcggggagcacagcgagatgatgctcgacggtgaggctcccacaggtgcgaccaacagccgcggaagtgaggtatcaggcgtgcaagaaatcaatgtcaaggaagaatcgcaacggcctgcgccgccgaccgacgccgagaaggctgctcaggggctttaa

SEQ ID NO: 67406 - protein, 544 aa, Aspergillus nidulans FGSC A4
MASEGMAPFTPEYASYNWTGAPSDYSSLATNELGGNSRVENLNKWYQSGDQAYIIVASAMVMLMVPGLGFLYSGLARRKSALSMIWACMGSMCVVTFQWYFWGYSLAFSPTATNGYIGNLRNFGLMKVLADPSPGSPLVPNLLYAFYQMQFCAVTAAIIMGAVAERGRLLPAMVFTFVWATIVYCPIACWVWNVNGWAFNYGVLDYAGGGPVEICSGLSALAYSMVLGRRQERMMLNFRPHNVSLILLGTVFLWFGWLGFNGGSSFGANMRATMACWNTNLTAAFGAITWVILDWRLARKWSMVGWCSGTISGLVAATPASGFLPPWASVVLGIVTGIVCNYSTKVKYWIRIDDSMDVFAEHGVAGIVGLIFNAFFADDAIVGLDGVNTGSEMGGWLIHNWKQLYIQIAFIVAASAYSFVVSAIVAYAINAIPGLKLRASEEAELLGMDDDQLGEFAYDYVEVRRDYLAWTPQKHDQHADGHEVPAAARYGIGEHSEMMLDGEAPTGATNSRGSEVSGVQEINVKEESQRPAPPTDAEKAAQGL

SEQ ID NO: 67407 - DNA, 1443 bp, Candida albicans SC5314
  CDS (1)..(1443): transl_table=12
atgtctggaaatttcactggaacaggcacaggtggagatgtgttcaaagtcgatttaaatgaacaatttgatcgtgccgatatggtatggattggcactgcaagtgttttggtatggattatgattcctggtgtgggtctcttgtattcagggatctcccgtaagaaacatgcattatcattaatgtgggctgctttgatggctgcgtgtgtggcagccttccaatggttctggtgggggtactcgttggtttttgcccacaatggctctgtgtttttagggaccttgcaaaacttttgtctcaaggatgttttgggtgcaccatctattgttaaaaccgtgcccgatatcttgttctgtctttaccaagggatgtttgctgctgtcactgctattttgatggctggtgctgggtgtgaacgtgcgagattaggtcctatgatggtgtttttgtttatctggttgactgttgtttactgtcctattgcctattggacatggggtggaaatggttggttggtcagcttaggtgcattggatttcgccggtggcggtccagttcacgaaaactctgggtttgctgccttggcatactctctctggttgggtaagagacatgacccagttgccaagggcaaagttccaaaatacaagccacattcggtttcctccattgttatgggcacaatctttctttggtttggttggtacggtttcaacggtgggtccactggtaactcttccatgcgttcatggtacgcctgtgtcaataccaatcttgctgccgcaactggtgggttgacttggatgcttgtcgattggttcagaacaggtggtaagtggtcgactgttggtttatgtatgggtgctattgctggtcttgttggtatcactcctgctgctggttacgttcccgtttacacgtcagtaatcttcgggattgttccagccattatttgtaactttgcagtagacttgaaggacttgttgcagattgatgatggtatggacgtgtgggcactccatggtgttggtggatttgttggtaactttatgactgggttatttgctgcagactacgttgccatgattgatggaactgagattgatggtgggtggatgaaccaccactggaagcaattggggtatcagttagcaggaagctgtgcagtcgctgcctggtcgttcactgtgacgtccattattttgcttgccatggacagaatcccatttctcagaatccgtctccacgaagacgaggaaatgttgggaaccgacttggcccaaattggtgaatatgcctattatgctgatgacgatcctgaaaccaacccatacgtcttggaacctatccgttctactactataagccaaccattacctcatattgatggtgttgctgatgggtctagtaataacgactcaggagaagctaaaaattaa

SEQ ID NO: 67408 - protein, 480 aa, Candida albicans SC5314
MSGNFTGTGTGGDVFKVDLNEQFDRADMVWIGTASVLVWIMIPGVGLLYSGISRKKHALSLMWAALMAACVAAFQWFWWGYSLVFAHNGSVFLGTLQNFCLKDVLGAPSIVKTVPDILFCLYQGMFAAVTAILMAGAGCERARLGPMMVFLFIWLTVVYCPIAYWTWGGNGWLVSLGALDFAGGGPVHENSGFAALAYSLWLGKRHDPVAKGKVPKYKPHSVSSIVMGTIFLWFGWYGFNGGSTGNSSMRSWYACVNTNLAAATGGLTWMLVDWFRTGGKWSTVGLCMGAIAGLVGITPAAGYVPVYTSVIFGIVPAIICNFAVDLKDLLQIDDGMDVWALHGVGGFVGNFMTGLFAADYVAMIDGTEIDGGWMNHHWKQLGYQLAGSCAVAAWSFTVTSIILLAMDRIPFLRIRLHEDEEMLGTDLAQIGEYAYYADDDPETNPYVLEPIRSTTISQPLPHIDGVADGSSNNDSGEAKN

SEQ ID NO: 67409 - DNA, 1605 bp, Candida albicans SC5314
  CDS (1)..(1605): transl_table=12
atgtcagcagaagaagtaatacaatacatttctagaaggaaattattcacggaaaataatgaatataatgaaagttatttattactatttacaattgcatcatcaatgatttggatcatgataccgggtttagcatttttatattctggattagcaagaagaaaatcggcattatcaatgatttggatagttataatgtcatcatttgttgggatcttccaatggtatttttggggttattcattagcatttagtgatacttcaaaaaattcatttattggtgatttacattttttcgggtttaaaaatttattaggtgcaagtgatgataaaacaacttatccagatatagcatattctttatttcaattacaattcttattagtgactttagcaattatagctggtggttgtattgctgaaagaggaagatttttaccagcattagtgtttatgttttgttgggccaccgtggtttattgtcccgtggtttattggatttggggtggtggttgggccctgtcgtatagatcaggtgctttagattatgctggtggtggccccgtggaaatcttatcgggtatgtcagcatttgtttattcagcatttttggggagaagaaatgaaactttaatgattaattatcgtcctcataatatttcgacaatttttttgggaacatcattattatatgttggttggttatttttcaatggattttcttgtggtaatccttcacttaaagtagcttattcaatgatgaatactcatttatgtggagcttttggagccatatcttggtgtttattggatttccgtttggaaaataaatggtctatggtagcagtttgttctgggtgtatttctggtttagtggctgctactccttcttcaggaatgattccattatgggcatcagtaatattaggtattactgctgggatagtttgtaacttgtcgactaaaatcaaatatttattacatgttgatgattcattggatgtatgggcagagcacggtatggccggagttgttggattgattttcaatgcattatttggttcagctacagttattggttatgatggagttactgaccatcaaggtggttggattgatcataattggaaacaattatatattcaaattgtttatattttggccacaatggcttattcgggtgttgttactgccatattatgttttgtcattaataaaatccctggattacaccttagaatcgattataatggagaagaagctggtgttgatgaagatcaaattggtgaatttgcttatgattacgttgaagtgagaagagatttcttggattgggggattccaaccgttaatcctacttatcaaaacctgatcaatgatcaacaacaacaacaacagccagaggtacctgaaataacatcacaacagaagagaggtggtggattatctggaattgaagaagctgaagaaaaacaagtacaaggaataccaattaaaagacaaactcaaattattgatggtacaacaactcaaagtaattctgatacaacatcaaatacaagtatacaagagaagcatgatccagtggaatatcgtcccagttga

SEQ ID NO: 67410 - protein, 534 aa, Candida albicans SC5314
MSAEEVIQYISRRKLFTENNEYNESYLLLFTIASSMIWIMIPGLAFLYSGLARRKSALSMIWIVIMSSFVGIFQWYFWGYSLAFSDTSKNSFIGDLHFFGFKNLLGASDDKTTYPDIAYSLFQLQFLLVTLAIIAGGCIAERGRFLPALVFMFCWATVVYCPVVYWIWGGGWASSYRSGALDYAGGGPVEILSGMSAFVYSAFLGRRNETLMINYRPHNISTIFLGTSLLYVGWLFFNGFSCGNPSLKVAYSMMNTHLCGAFGAISWCLLDFRLENKWSMVAVCSGCISGLVAATPSSGMIPLWASVILGITAGIVCNLSTKIKYLLHVDDSLDVWAEHGMAGVVGLIFNALFGSATVIGYDGVTDHQGGWIDHNWKQLYIQIVYILATMAYSGVVTAILCFVINKIPGLHLRIDYNGEEAGVDEDQIGEFAYDYVEVRRDFLDWGIPTVNPTYQNSINDQQQQQQPEVPEITSQQKRGGGLSGIEEAEEKQVQGIPIKRQTQIIDGTTTQSNSDTTSNTSIQEKHDPVEYRPS

SEQ ID NO: 67411 - DNA, 1587 bp, Ustilago maydis 521
  CDS (1)..(1587)
atggtcaacatcacttacggtgtgcttcaagcacccgatggctcctcggctacctcgagcgccatcgccaacggaactgacattatcgtttcttacggcccaaatggcgagagcgtcgcttcctattcgcccggtgacatttcctgggttctcacatgtaccgctctcgtatggctcatgattcccggtctcggttacctctactctggtcttgctcgcagaaagaacgcgcttcacctccttttgctcactttggccgctctcgccgttgtctcgttccagtggttcttttggggctactcgctcaccttttctcaaacctcaggcgctttcctcggcaatctgcgcaactttggctacatgggtgttctcgaaaatcccgtgcctcaggcatacaacaaagtgcccgaaattgtatacgccatctaccagtgcatgttcgccaaccttgtccccgccatcgccatcggtgccgcttgtgagcgtggccgtgtctggcctttcctcgtctttacctttgtctggaccacgctcgtctacgatgtgatcgcctgctgggtctggaaccccaccggttgggcgttcaagtggggtgttcttgactacgccggtggtggacccgtcgagattaactcgggtatcactggtctcgtcatctcttactatcttggccctcgtaccggttatggcaccgagcgtctactcttcaagccacacaacgtttcctacatcttcctgggcaccgccttcctctggttcggctggatcggcttcaacggtggttcggtctttgctgccaacctccgtgcggctatggccatcagcaccaccaacctcgccgcttcgtccgccggtctcacctggatgttcctcgactggcgtctcgaacgcaagtggtccgtcgttggcttctgcacgggtgccattgctggtctcgtcgccatcactcccgctgctggctttgtcggcatgcccgctgctttgctcgtcggagtcgtttcctcggccgtttccaactttgccaccgttctcaagggccccatgcgcgttgacgatgtcatggacattttctcggtccacgctctcgccggtattgttggcacccttctcaccggtatcttcgcccaggcttccgtagccaacaacgacggcaacacggtcatcgccggtggctggctcgactcaaactggatccagctcgcctatcaactcgcctactgtgtcgctgtcacctgttggtgtggtggcgtcacgtttgctatcatgtttgttattgaccacattccttacatcggtcccttccgttcgagcgagatgggtgaagtggtgggtatggatgaggaccagtgtggcgagtgggcttacgactacgcctttatcaaccgtgatcttgagggcaactacaagcccgaccacggtcagacgctcgacatcaacgaaaagatgcccaacgttcatcaaaccgactcgctgcgctccgaaacgcacgccgactcgagccaagacaactccaactcgcagctcgccgctgccgaacaccagtctccatccaccgctgaaccagccgtggaaatgaagcaggcttaa

SEQ ID NO: 67412 - protein, 528 aa, Ustilago maydis 521
MVNITYGVLQAPDGSSATSSAIANGTDIIVSYGPNGESVASYSPGDISWVLTCTALVWLMIPGLGYLYSGLARRKNALHLLLLTLAALAVVSFQWFFWGYSLTFSQTSGAFLGNLRNFGYMGVLENPVPQAYNKVPEIVYAIYQCMFANLVPAIAIGAACERGRVWPFLVFTFVWTTLVYDVIACWVWNPTGWAFKWGVLDYAGGGPVEINSGITGLVISYYLGPRTGYGTERLLFKPHNVSYIFLGTAFLWFGWIGFNGGSVFAANLRAAMAISTTNLAASSAGLTWMFLDWRLERKWSVVGFCTGAIAGLVAITPAAGFVGMPAALLVGVVSSAVSNFATVLKGPMRVDDVMDIFSVHALAGIVGTLLTGIFAQASVANNDGNTVIAGGWLDSNWIQLAYQLAYCVAVTCWCGGVTFAIMFVIDHIPYIGPFRSSEMGEVVGMDEDQCGEWAYDYAFINRDLEGNYKPDHGQTLDINEKMPNVHQTDSLRSETHADSSQDNSNSQLAAAEHQSPSTAEPAVEMKQA

SEQ ID NO: 67413 - DNA, 1464 bp, Ustilago maydis 521
  CDS (1)..(1464)
atggttaacgccagctacacgcccagcggcgatctgatcacctactacgatgaccaaggcacgcccaccgaactcatctataacctcggcaacatgtcgtggatcattgtttcgaccgccttggtctttatcatgattcccggtcttggtttcttctacgccggtctgctcagaaagaagtcggcgctctcgatgatctggatgtccatggtgattttgtcggtcgcatccttcgagtggttcttctggggcttttctctcgctttctccaccagctctagcaacaagttcattggtaaccttgacaactttggtctgatcaacgtcgacattgggccttctacaggagggaccgggcttccacagctgctcttctgcatctaccagatgatgttcgccgccatcacccctgtgattgcctgcggtgcgtttgccgaccgtgctcgattgggtcccgttctcattttcgccttctgctggtgcactattgtctacaatcccatcgcctattggacatggaacgtcggcaagggttgggccaacgtcatgggtggtctcgacttcgccggtggtacacctgttcacatctcttcgggtaccgctgcgctcgccatctcgatcttcctcggcaagcgtaaggggtacggcacggagcagttggcctaccgaccccacaacgttgcctacgtcatcttgggaaccgtgctgctgtggtttggctggttcggcttcaacggtggttcggctcttggtgccaaccttcgtgctgttcaggccatgatggtcactcaggtggctacctcggtcggtggtctcacctggatgttctgggactggaggctggagcgcaagtggtcggctgtcggtttctgctctggtgccatctcgggtctggtcgctatcacgccagcttctggttacgtcggaacgcccgcagctgttgcctttggcgtgctcggtggtacggcttgcaactttgccactggtctcaagaaccttttcggttacgatgatgctctcgacatctttgctgctcacggtattggtggtattgtgggcaacttgcttactggtatctttgccgacaaccgcgttgcgtcgtttgacggtaccgctccgatccctggtggttggatcaacaagaactggattcagcttggttatcagcttgccgactcggctgccggtttcggttggtcgtttgtggttacgctcatcctgctgttcgccatcgaccgcatccctggctgccacttccgatctagcgaggaggacgagtctctgggtatcgatctcactcagatcggagaagaggtcatggtgatgcctctgcttcacgactttgttcgcccagaggacggcgcagagattcatcacgctactgcatccaccgatctcaagttctcgcctgctcacagcgagaaggacctcgaggctgctcgtccacagcctactgctgtctaa

SEQ ID NO: 67414 - protein, 487 aa, Ustilago maydis 521
MVNASYTPSGDLITYYDDQGTPTELIYNLGNMSWIIVSTALVFIMIPGLGFFYAGLLRKKSALSMIWMSMVILSVASFEWFFWGFSLAFSTSSSNKFIGNLDNFGLINVDIGPSTGGTGLPQLLFCIYQMMFAAITPVIACGAFADRARLGPVLIFAFCWCTIVYNPIAYWTWNVGKGWANVMGGLDFAGGTPVHISSGTAALAISIFLGKRKGYGTEQLAYRPHNVAYVILGTVLLWFGWFGFNGGSALGANLRAVQAMMVTQVATSVGGLTWMFWDWRLERKWSAVGFCSGAISGLVAITPASGYVGTPAAVAFGVLGGTACNFATGLKNLFGYDDALDIFAAHGIGGIVGNLLTGIFADNRVASFDGTAPIPGGWINKNWIQLGYQLADSAAGFGWSFVVTLILLFAIDRIPGCHFRSSEEDESLGIDLTQIGEEVMVMPLLHDFVRPEDGAEIHHATASTDLKFSPAHSEKDLEAARPQPTAV

SEQ ID NO: 67415 - DNA, 1491 bp, Cryptococcus neoformans var. neoformans B-3501A
  CDS (1)..(1491)
atggtcaacgtgacctatacagactcgtcttcggacatgatttacactgccgacgatggcactcagtatctttacaatctcggtgacatgtctttcgtcatcgccgccatggccctcgtctggatcatggttcccggtgtcggtctcttttactctggcctgttaagacggaagaatgcattatcaatgatcttcctgtctatggctggtgttgccgtcgggtctttccagtggttcttctggggttactcacttgctttttctgatactggttccaaatacattggcgacttgcgatactttggtctgaagggagttctcgcagagccttctgccggttctgaccgaatccctgctcttctcttctgtgtctaccaatgcatgttctgccttatcactggtgtcctcgccattggtggtttcgctgaacggtctcgtatcggtcccgttatggtcttcctcttctgctggctcaccctcgtctactgccctctcgcttgctggacatggaaccccaacggctggtcttttgtcatgggcggtctcgactttgctggtgggacccccgttcacatctcttctggtactgcctctctggctatcgccttgtacctcggcaagcgtcgaggctacggcactgaacgactcgcctacaagccccacaacactgctttcgttgttatcggcaccgttttcctctggttcggttggttcggcttcaatggtggttccgctctttctgccaacttgagggctgttcaggcttgtatcgtcaccaacctttctgcctctgtcggtggtttggtctggatgttcttggactacaggcttgaacgcaaatggtccgctgttggcttctgctccggtgctatttctggtttggtcggtatcacccctgctgctggctacgtcggttccccagctgctcttgccatcggtgcgattaccgccatcgcctgtaactttgccaccaagctcaagtttctcattggcgttgatgagactctcgatgtctttgcttctcacgggattggcggcatggtcggttgcttccttaccggtctcttcgcccaaggttctgtggccggctttgacggtatcaccgatatccccggtggctgggtcagccattactggatacaggctggttaccagatggccgatttgaccgctggtttcgcttacacctttgtcatgaccaccatcatctgctggttacttcacttcatccctggattgaggttgagggctagcgaagaggccgaaatcatcggtattgacgatgcttacctcggcgaatttgcttacgactatgttggcacagatcccgagctccgtcttcacagaattgactccaagccccaattcacttcaggggacgttattgctgaagtttctgccagcaacgggcatgagtctagcaccaccgaaaaggttgaccctcacgcgacgggtaacgccgctgcaggtggtggacgtgtcgatgtttaa

SEQ ID NO: 67416 - protein, 496 aa, Cryptococcus neoformans var. neoformans B-3501A
MVNVTYTDSSSDMIYTADDGTQYLYNLGDMSFVIAAMALVWIMVPGVGLFYSGLLRRKNALSMIFLSMAGVAVGSFQWFFWGYSLAFSDTGSKYIGDLRYFGLKGVLAEPSAGSDRIPALLFCVYQCMFCLITGVLAIGGFAERSRIGPVMVFLFCWLTLVYCPLACWTWNPNGWSFVMGGLDFAGGTPVHISSGTASLAIALYLGKRRGYGTERLAYKPHNTAFVVIGTVFLWFGWFGFNGGSALSANLRAVQACIVTNLSASVGGLVWMFLDYRLERKWSAVGFCSGAISGLVGITPAAGYVGSPAALAIGAITAIACNFATKLKFLIGVDETLDVFASHGIGGMVGCFLTGLFAQGSVAGFDGITDIPGGWVSHYWIQAGYQMADLTAGFAYTFVMTTIICWLLHFIPGLRLRASEEAEIIGIDDAYLGEFAYDYVGTDPELRLHRIDSKPQFTSGDVIAEVSASNGHESSTTEKVDPHATGNAAAGGGRVDV

SEQ ID NO: 67417 - DNA, 1728 bp, Cryptococcus neoformans var. neoformans B-3501A
  CDS (1)..(1728)
atggtcaacataacttatggagcactgctgtcgtcgtccgatggagcggttcacttcgagcctttaggaaccgacattatctccaccttagctggtcaaccaacagctttcgacccaggagacatagcatgggtgcttacttgttcggctttaattgttttcatgcttcccggtcttggatacctgtactctggtcttgctcgacgaaaaaatgccttgtcaatgctcttcctatctctggtctccctgggaattgtctcctttcagtggttcttcatcggatatagtttagtgttctcggaaacgggaggtagtttctggggagatggaaggaatatcggcttcagacaagttttggaaagacctataccggaagccaacggcaaacttccagaaattgtatttgccacttttcagctgatgttcgcttgccttgttccggcagtcttgcttggcgccgcagctgagcgaagcagaatactgcctgctatgattttcatgttctgctggactaccttagtctacgaccctctggcacactggatctggagtgccaatgggtgggcaaacaaatggggtgtattggactatgcaggtggcgtcccagttgagatagctagtgggacagctggattagcatattcatactttatcgggaaacgtcgtgggtatggcacagatcgtgtcctctttaaaccttcgaacgtaggcaatgtcgtgctcggcacagttttcctttgggttggatggctgggtttcaatggaggatcttgttactgcgcctctcttaaggctgctcttgccattttcaacaccaatctggcaggaagcgttgggggtgttgtatggctcattatggatttccgtcttgaaaggaagtggagcatggtcggatactgtacaggtgcgattgcaggtttggttgccatcaccccggctgctggatatgtcggcgccccagcggcagctctcatcggccttgtctctgccgcggtttctaacttggcaacaagattgaaagtcaccatgcgtgttgatgatcctatggatattttcgctgtgcacgccttggccggtatcgtaggtgtgctcatgactggtctgttcgcacagtccagcgtggccgccaatgatggtttctctgacatcgacggtggatggctcgaccgccattatgttcaacttggtaaacagattgcttgggcttgcgttggtatggcctggacatttgttgtcacttatgccatcatgttctttatcaacctgatccctggctgtcattttcgtgctaccgatgaggcggagatcgttggtatggacgaggttgaattgggtgaatacgttgcggactatgccttccatcagcgagacctagagggcgaatacgaagctcacactctatcccaatgtccctcagccaccaaactccatcttcaagaattccgccacaacaaggatggggagtcctctagttcttctcagcccaaagaattgcctccaacgatgcctcgtggcggcgccgttgttggcgatctggatggtgacacagccgttgaatcgcaacattcacgttcacgttcgagggggcggagtcagcatagagtaagaatcgaaaaggaaggtgacaacgaggcaatggagatgagcgacgtacgccacacaaaaactagcgatcaacggcaggaaggatcgaacttagaaggttcttatatgggccaccgagagtaa

SEQ ID NO: 67418 - protein, 575 aa, Cryptococcus neoformans var. neoformans B-3501A
MVNITYGALLSSSDGAVHFEPLGTDIISTLAGQPTAFDPGDIAWVLTCSALIVFMLPGLGYLYSGLARRKNALSMLFLSLVSLGIVSFQWFFIGYSLVFSETGGSFWGDGRNIGFRQVLERPIPEANGKLPEIVFATFQLMFACLVPAVLLGAAAERSRILPAMIFMFCWTTLVYDPLAHWIWSANGWANKWGVLDYAGGVPVEIASGTAGLAYSYFIGKRRGYGTDRVLFKPSNVGNVVLGTVFLWVGWLGFNGGSCYCASLKAALAIFNTNLAGSVGGVVWLIMDFRLERKWSMVGYCTGAIAGLVAITPAAGYVGAPAAALIGLVSAAVSNLATRLKVTMRVDDPMDIFAVHALAGIVGVLMTGLFAQSSVAANDGFSDIDGGWLDRHYVQLGKQIAWACVGMAWTFVVTYAIMFFINLIPGCHFRATDEAEIVGMDEVELGEYVADYAFHQRDLEGEYEAHTLSQCPSATKLHLQEFRHNKDGESSSSSQPKELPPTMPRGGAVVGDLDGDTAVESQHSRSRSRGRSQHRVRIEKEGDNEAMEMSDVRHTKTSDQRQEGSNLEGSYMGHRE

SEQ ID NO: 67419 - DNA, 1293 bp, Leptospira interrogans serovar Copenhageni str. Fiocruz L1-130
  CDS (1)..(1293): transl_table=11
ttggggataggaatgattatgaaatggaccaagagactgctcttattgctcaccctacttcttccatttgttttatttgggcaagaagctagcactcccgtagcggacaaaggagatacggtctggatgattgtagcatccgccctcgtattttttatgatacctgggcttgcattgttttatggaggtcttgtaagatctaaaaacgttctttcgactatgatgcatagttttgtagcaatcttagttttgaccctgcagtggaccatctttggatatagtttcgctttttccggaaccaatccttatttcggaaactttgatcttgcctttctaaatggaatcgatgaaaacactttagaattaacaattcctaaatatattcactttctttttcaaggtatgttcgcattaatcacacccgccttaatttctggagcaattgcagaaagagtaaaattcggcggttatataatttttattcttctttggtccactcttgtttatgatccagttgcacattgggtttgggcggcagacggttggctttttaaaatgagcgctttagattttgctggtggaaccgtagttcatcttatctcaggaattgcaggtcttgcagccgcaatcgttctgggtaaaagaaaaggagaaggacccgctctgatcgctcccaacaatcttacttatactttaatcggagccggtttactttggttcggttggttcggttttaacgctgggtccggacttgcggtaaacggaattaccgccagagcatttttagttactttaatcgcacctgcagccgcaggagttgcttggcttgtaatcgaatatttccatactaaaaaagcaaccgccctcggagccgcttcgggtattgtggccggtttggttgtaattactcccgcttctggttttgtaggagttcaaggagcaatcatcatgggacttcttgtaagtccggtatgctacgcagcgattcttttaaaaggaaaactaggatacgatgatagtttggacgcatttggaattcacggcgtaggtggtgcgttaggcgcggttcttacaggagttttcactcttacactcggcgcaggtgttgcgagtaaaggagatcaaattttggttcaactcattagcgtcgctgcaaccggagcttattcttttatcgtttctatgattctagtatttttgatcgataaaacaatcggctttcgtatttccgaagaaaaagaaattactggactggattcggaaattcacggagaaaaaggttatatcctttaa

SEQ ID NO: 67420 - protein, 430 aa, Leptospira interrogans serovar Copenhageni str. Fiocruz L1-130
MGIGMIMKWTKRLLLLLTLLLPFVLFGQEASTPVADKGDTVWMIVASALVFFMIPGLALFYGGLVRSKNVLSTMMHSFVAILVLTLQWTIFGYSFAFSGTNPYFGNFDLAFLNGIDENTLELTIPKYIHFLFQGMFALITPALISGAIAERVKFGGYIIFILLWSTLVYDPVAHWVWAADGWLFKMSALDFAGGTVVHLISGIAGLAAAIVLGKRKGEGPALIAPNNLTYTLIGAGLLWFGWFGFNAGSGLAVNGITARAFLVTLIAPAAAGVAWLVIEYFHTKKATALGAASGIVAGLVVITPASGFVGVQGAIIMGLLVSPVCYAAILLKGKLGYDDSLDAFGIHGVGGALGAVLTGVFTLTLGAGVASKGDQILVQLISVAATGAYSFIVSMILVFLIDKTIGFRISEEKEITGLDSEIHGEKGYIL

SEQ ID NO: 67421 - DNA, 1500 bp, Burkholderia vietnamiensis G4
  CDS (1)..(1500): transl_table=11
atgcgcaaacttctgatgtccctgctgatggcaggctcgctgatcgcggccggcgtcggccccgcgcttgctgacgatgcggcctccgccgccgctgcgtccgcgcctgccaccacggcttccgacgcgtcggccgcttctgctccggccgccacggacgcctcggcgcccgccgccgccaccgcacccgcttcgggcgctgccgacgcatcggctgccgccgccgcgtccgcgcccgccgccccggcagcgccgaccgcaccgttctccgtcgattcgtcgaagatcagcgccggcgacaccgcgtggatgctcacctcctccgcgctcgtgctgttcatgacgatccccggcctcgcgctgttctacgcgggcatggtccgcaagaagaacgtgctcgcgaccgtgatgcagagcttcgcgatcaccgcgctgatcacggtgctgtggacggtggtgggctacagcctcgcgttcacgccgggcaacggcttcatcggcggcctgtcgcgcgtgttcctgcacgggatgaactacatcaagggcgacaaggcgaccacgctgaccgtcagccatctggccacgacgatccccgagtcggtctacttcgtctatcagatgacgttcgcgatcatcacgccggcgctgatctgcggcgcgttcgccgaccggatgaagttctccgcgatgctggtgttcatggcgctctggtcgctgatcgtctatgtgccgatcgcgcacatggtgtgggagccgaccggctggctgtcggcagacggcgtgctcgacttcgcgggcggcacggtggtgcacatcaacgccggtatcgcaggcctgatctcgtgcctggtgctcggcaagcgcgtcggctacggccgcgaatcgatggcgccgcacaacctggtgctgacgatgatcggcggctcgatgctgtgggtcggctggttcggtttcaacgcgggttcggcagtcgcggctgacggccgtgccggcttcgcgatgctgacgacgcaagtcgcgacggcatgtgcggcgctcggctggatgttcgcggagtgggtcgcgaagggcaagccgtcggtgctcggcatcgtgtcgggcgcggtcgcgggtctggtggcgatcacgccggcagccggcttcgtcggcgtgacgggcgcactggtgatcggcatcgcggccggcgtcgtgtgcttctggtcggccacgtggctcaagtcgaagctcggctacgacgattcgctcgacgcattcggcgtacacggcgtgggcgggatcctcggcgcactgctgaccggcgtgttcgcggtcaaggacatcggcggcgcggacggcagcctgctgctgcaggcgaagggcgtgctgatcacgctggtctacagcggcgtgctgagcttcgtgctgctgaagctgatcgacatgacgatcggcctgcgcgtgaccgaagaggaagagcgcgaaggtctggacgtgatcctgcacggcgaacacgtcgagtaa

SEQ ID NO: 67422 - protein, 499 aa, Burkholderia vietnamiensis G4
MRKLLMSLLMAGSLIAAGVGPALADDAASAAAASAPATTASDASAASAPAATDASAPAAATAPASGAADASAAAAASAPAAPAAPTAPFSVDSSKISAGDTAWMLTSSALVLFMTIPGLALFYAGMVRKKNVLATVMQSFAITALITVLWTVVGYSLAFTPGNGFIGGLSRVFLHGMNYIKGDKATTLTVSHLATTIPESVYFVYQMTFAIITPALICGAFADRMKFSAMLVFMALWSLIVYVPIAHMVWEPTGWLSADGVLDFAGGTVVHINAGIAGLISCLVLGKRVGYGRESMAPHNLVLTMIGGSMLWVGWFGFNAGSAVAADGRAGFAMLTTQVATACAALGWMFAEWVAKGKPSVLGIVSGAVAGLVAITPAAGFVGVTGALVIGIAAGVVCFWSATWLKSKLGYDDSLDAFGVHGVGGILGALLTGVFAVKDIGGADGSLLLQAKGVLITLVYSGVLSFVLLKLIDMTIGLRVTEEEEREGLDVILHGEHVE

SEQ ID NO: 67423 - DNA, 1311 bp, Bradyrhizobium sp. ORS278
  CDS (1)..(1311): transl_table=11
atggggacctgcgcgtctcgttgcctgcgcacgtctgtagctttggctgcagcaggcgcactcgtcttcgccacgccagcatcggcagccgcgccgtccacgatcgatgcggccgacaccgcctggatgatcgtcgccaccgcgctggtgctgatgatgaccattccgggcctggcgctgttctactcgggcatggtgcgcaagaagaacgtgctggcgacgatggcgcagagcctcgcggccgtcatgctgatctcgatcttgtgggtcgcgttcggctattcgctcgccttcgtcggcgacggcgcctggatcggctcgctcgaccgcgccttcctggccggcatggggatggacagcgtgcatcccggcgccaagacgatcccggaggcgcttttcatgctgtaccagatgaccttcgcgatcatcacggtggcgctggtggcgggctcggtcgccgaccgcatgcgcttctcggcctatctcgtgttcggcgtcgcctggttcatcttcgtctatgtgccgctggcgcattggatctggggcggcggtttcctcgcccaggccggcgtggtcgacttcgccggcggcctcgtggtgcatctgtcggccggaaccggcgggctggtcgcggcgctggtgatgggccgccgccacggctatggcagcgagaatctgtcccccttcgacctgtcgctcgcggtggtcggcaccggcctgctgtgggtcggctggttcggcttcaatggcggctcggcgctcggcgccaacgcccacgccgtgatggcgatcctgaccacccatctggccgcctgcgccggcgcagttacctggggcgcgctggaatggtccacccggcgcaagccgtcggtgctcggcatgatttctggcgcggtcgccggccttggcaccatcacccctgcatcgggcttcgtggcgccgtggcatggcctcgtcatcggcgcgctcgccggcatcatctgctactgggcctgcacttcgctgaaacaccgcttcaattatgacgactccctcgacgtgttcggcgttcacggcatcggcggcctcaccggcacggtgctggccggcgtattcgcgaccgctgcgatcggcggcacgtccgggctcatcgaaggccatccgatgcagctcgcggcgcagctctatggggtggctgtcaccctggtctggtcgggcggagtgacctgggccctgctgaagctcgtcagcgccttcgtgccgctgcgggtgtcccgcgagcaggaactcgaggggctcgacatctcccagcatggcgaggcactgcaataa

SEQ ID NO: 67424 - protein, 436 aa, Bradyrhizobium sp. ORS278
MGTCASRCLRTSVALAAAGALVFATPASAAAPSTIDAADTAWMIVATALVLMMTIPGLALFYSGMVRKKNVLATMAQSLAAVMLISILWVAFGYSLAFVGDGAWIGSLDRAFLAGMGMDSVHPGAKTIPEALFMLYQMTFAIITVALVAGSVADRMRFSAYLVFGVAWFIFVYVPLAHWIWGGGFLAQAGVVDFAGGLVVHLSAGTGGLVAALVMGRRHGYGSENLSPFDLSLAVVGTGLLWVGWFGFNGGSALGANAHAVMAILTTHLAACAGAVTWGALEWSTRRKPSVLGMISGAVAGLGTITPASGFVAPWHGLVIGALAGIICYWACTSLKHRFNYDDSLDVFGVHGIGGLTGTVLAGVFATAAIGGTSGLIEGHPMQLAAQLYGVAVTLVWSGGVTWALLKLVSAFVPLRVSREQELEGLDISQHGEALQ

SEQ ID NO: 67425 - DNA, 1341 bp, Thermus thermophilus HB27
  CDS (1)..(1341): transl_table=11
atgcggaaaggaaccctcaacggcatcgcggccctaggtttatcgggactggccctggcggagggggtagacggggcggacacggcctggatgctggtctccacggccctggtcctcctcatgaccccggccctggccttcttctacggggggctcgtccggagcaaaaacgccttgaacaccatgatgatgagcttcgtcgccctggccttcgtgggcgtgggctgggcgctcctcgggtacaccctggccttcggggagggcggccccctcctggggggtctcgggcacctcttcctcaggggggtgggcctcgaggcccaaggcaccatcccccacgtcctcttcctggccttccaggggaccttcgccattatcaccgccgccctggtctcgggcgctctggtggagaggatgcgctttcccgcctacctggccttcctcaccctctgggggcttttcgtctacgccccgatcgcccactgggtctggggcggggggtttttgggggccctaggcgccctggacttcgccggagggacggtggtgcacatcaacgccggcgtcgccgccctggtgggcgccctggtcctcggcgcgcggaaggactacgggcggcaggccattctgccccataacgtccccttcaccctcctgggggcagccctcctctggttcggctggttcggcttcaacgggggaagcgccctggcggccaacgcctcggcggccctggccttcgcgaacaccatgctggcccccgcggccaccctcttggtctggaccctcctggacctcctccgcaccggcaaggccacggcggtgggggcggccacggccatcgtggtgggcctggtggccgtgaccccggccgcaggcttcgtctcccctctctccgccctcctcatcggggcgcttgccgccttccccagctactacgtcctcctctggcgggcgaggacccggctggacgacagcctggacgtcttcgccggccacggggtcggggggatcaccggggccctcctcaccggcatcttcgccgagaaagcctggaacggggtggcggacggcctcctcttcggcaatcccgcgcagctcgggatccaggcggcggcggtcctggccgccgtcgtgtactccgccttgggaaccttcgccctcctcaagctggtgggcctcctcacccccttgcgggcaggccccaaggaggaaggggtgggcctggacgtgacccagcacggcgaggaggcctacacctcgggcgagggggcgatcctcgtcctctcggaaaaggcccccgcggtcccgagcctcaggccccagggaggtgaggcatga

SEQ ID NO: 67426 - protein, 446 aa, Thermus thermophilus HB27
MRKGTLNGIAALGLSGLALAEGVDGADTAWMLVSTALVLLMTPALAFFYGGLVRSKNALNTMMMSFVALAFVGVGWALLGYTLAFGEGGPLLGGLGHLFLRGVGLEAQGTIPHVLFLAFQGTFAIITAALVSGALVERMRFPAYLAFLTLWGLFVYAPIAHWVWGGGFLGALGALDFAGGTVVHINAGVAALVGALVLGARKDYGRQAILPHNVPFTLLGAALLWFGWFGFNGGSALAANASAALAFANTMLAPAATLLVWTLLDLLRTGKATAVGAATAIVVGLVAVTPAAGFVSPLSALLIGALAAFPSYYVLLWRARTRLDDSLDVFAGHGVGGITGALLTGIFAEKAWNGVADGLLFGNPAQLGIQAAAVLAAVVYSALGTFALLKLVGLLTPLRAGPKEEGVGLDVTQHGEEAYTSGEGAILVLSEKAPAVPSLRPQGGEA

SEQ ID NO: 67427 - DNA, 1233 bp, Bacillus anthracis str. Sterne
  CDS (1)..(1233): transl_table=11
atgaatatgggagatacggtttttatgtttgtagcgacagtaatggtcatgttaatgacaccaggattggcacttttttatggaggtatggttcgcagtaaaaacgtactcagtacgacaatgcatagttatagcgcgatggctatcgtttcgattcaatggattgtaattggttattctttatcattcggaccagattggcacggacttatcggcacactcgattggttcggtttaaatggagttacctacgcaccaaatccagactattcatctactattcctcacaatttatttatgatgtttcaactcatgttcgctattttaactcctgctttaatttcaggtgcatttgccgaaagaatgcgattttcagctttccttattttcatccttctatggacaacgatcgtttacaatcctgtcgctcattgggtatggggcgttggcggatggctaagagaacttggcgcgttagacttcgctggcggtaatgtcgttcatattacatctggtgtggctggcctcgtattagctattttccttggaaaacgaaaaaacataaacggtacttctcctcatcatttaccatttacgatgctaggcgctgggctgctatggttcggttggttcggttttaacgtcggaagcgcattatctttaaatgatgtagctttaactgcatttattaatacgaatatagccgctgctgcctccgcattaacttggatgctttcagagtggttctttcaatcaaaaccaactgcgatgggagctgcttgtggcgccgtttccggtctagtcgctattacaccagcttgcgggttcgttacacctttctccgctcttcttatcggagcgattggcggcgtattatgcttcggagcagtctttttcttaaaaacaaaattcggatacgacgatacactcgatgcattcggatgtcacggcatcggcggaacttggggcggtattgcgacaggactatttgcaactactaccgtaaacggcgatggcgctaacggattattttacggaaacgccgcgttgctgtttaaacaatttgtagcaatcggcgcaacatatgcattcacaattataatgacgtacgccattattaaagcaatcaacttcttcctccctgtccgggtcgatgagcacgaggaacatatgggacttgatatttcgatgcatggagagaaagcttatgagtatactgagcgagtgaactaa

SEQ ID NO: 67428 - protein, 410 aa, Bacillus anthracis str. Sterne
MNMGDTVFMFVATVMVMLMTPGLALFYGGMVRSKNVLSTTMHSYSAMAIVSIQWIVIGYSLSFGPDWHGLIGTLDWFGLNGVTYAPNPDYSSTIPHNLFMMFQLMFAILTPALISGAFAERMRFSAFLIFILLWTTIVYNPVAHWVWGVGGWLRELGALDFAGGNVVHITSGVAGLVLAIFLGKRKNINGTSPHHLPFTMLGAGLLWFGWFGFNVGSALSLNDVALTAFINTNIAAAASALTWMLSEWFFQSKPTAMGAACGAVSGLVAITPACGFVTPFSALLIGAIGGVLCFGAVFFLKTKFGYDDTLDAFGCHGIGGTWGGIATGLFATTTVNGDGANGLFYGNAALLFKQFVAIGATYAFTIIMTYAIIKAINFFLPVRVDEHEEHMGLDISMHGEKAYEYTERVN

SEQ ID NO: 67429 - DNA, 1233 bp, Bacillus thuringiensis serovar konkukian str. 97-27
  CDS (1)..(1233): transl_table=11
atgaatatgggagatacggtttttatgtttgtagcgacagtaatggtcatgttaatgacaccaggattagcacttttttatggagggatggttcgcagtaaaaacgtactcagtacgacaatgcatagttatagtgcaatggctatcgtttcgattcaatggattgtaattggttattctttatcattcggaccagattggcacggacttatcggcacactcgattggttcggtttaaatggagttacctatgcaccaaatccagactactcatctactattcctcacaatttatttatgatgtttcaactcatgttcgctattttaactcctgctttaatttcaggtgcatttgccgaaagaatgcgattttcagctttccttattttcatccttctatggacaacgatcgtttacaatcctgttgctcattgggtatggggcgttggcggatggctaagagaacttggcgcgttagacttcgctggcggtaatgtcgttcatattacatctggtgtggctggcctcgtattagctattttccttggaaaacgaaaaaacataaacggtacttctcctcatcatttaccatttacaatgctaggcgctgggctgctatggtttggttggttcggttttaacgtcggaagcgcattatctttaaatgatgtggctttaactgcatttattaatacgaatatagccgctgctgcctccgcattaacttggatgctttcagagtggttctttcaatcaaaaccgactgcgatgggagctgcttgtggcgccgtttccggtctagtcgctattacaccagcttgcgggttcgttacacctttctccgctcttcttatcggagcgattggcggcgtattatgcttcggagcagtctttttcttaaaaacaaaattcggatacgacgatacactcgatgcattcggatgtcacggcatcggtggaacttggggcggtattgcgacaggattatttgcaactactgccgtaaacggcgatggcgctaacggattattttacggaaatgccgcgttgctgtttaaacaacttgtagcaatcggcgcaacatatgcattcacaattatcatgacgtacgccattattaaagcaatcaacttcttcctccctgtccgggtcgatgagcacgaggaacatatgggacttgatatttcgatgcatggggagaaagcttatgagtatactgagcgagtgaactaa

SEQ ID NO: 67430 - protein, 410 aa, Bacillus thuringiensis serovar konkukian str. 97-27
MNMGDTVFMFVATVMVMLMTPGLALFYGGMVRSKNVLSTTMHSYSAMAIVSIQWIVIGYSLSFGPDWHGLIGTLDWFGLNGVTYAPNPDYSSTIPHNLFMMFQLMFAILTPALISGAFAERMRFSAFLIFILLWTTIVYNPVAHWVWGVGGWLRELGALDFAGGNVVHITSGVAGLVLAIFLGKRKNINGTSPHHLPFTMLGAGLLWFGWFGFNVGSALSLNDVALTAFINTNIAAAASALTWMLSEWFFQSKPTAMGAACGAVSGLVAITPACGFVTPFSALLIGAIGGVLCFGAVFFLKTKFGYDDTLDAFGCHGIGGTWGGIATGLFATTAVNGDGANGLFYGNAALLFKQLVAIGATYAFTIIMTYAIIKAINFFLPVRVDEHEEHMGLDISMHGEKAYEYTERVN

SEQ ID NO: 67431 - DNA, 1296 bp, Yersinia pseudotuberculosis IP 32953
  CDS (1)..(1296): transl_table=11
ttgatgatgaaaaaacttttatccgtgttgggcctgggtacggtagcgctgttaccttcttgggcaatggcggcggcaccggcagtcgctgacaaagcagataatgcttttatgatgatttgcactgcgttagtactgtttatgacgatacccggtattgccctgttctacggtggcctgttgcgctccaaaaacgtattgtcaatgatgactcaggtcatggtgagttttgcgctggtatgtgttttgtggattctctacggctacagcctggcgtttagtgcgggtaatgcgttcttcggcagttttgatatggccatgctgaaaggtattgagctgactagcctgagtggctcgttttatcaatatattcatgtcgtgttccaagcctcatttgcctgtatcaccgtcgctctgattgtgggttcattcgcagagcgtattcgtttctcagcagtattaattttcgccgcgctgtggttcaccttctcttacctaccaatagcgcacatggtatggggtggtggtttcctggcaatggacggagcgctggattttgctggaggtacagtggtgcacattaacgccgctgttgctggtttggtcggggcttatctgttgggtaaacgtgccggattcggtaaagaggccttcaaaccccataacttaccgatggtctttaccggtacggcgattctgtatattggctggtttggcttcaatgccggttcagccagtgctgcgaacgaaattgcagcgctagcgttcttgaataccgtcgttgcaacggcgggcgccatcctctcgtgggtatttgctgagtgggctttacgaggtaaaccttcgctgttgggggcatgttccggttgtatcgcaggcttggttgcgattactccggcagcaggtacggtaggggttggcggtgcattgattatcggtttggttggtggtgttgctggcctgtggggggtcgtgctactgaaaaaatggctgcgggtcgatgatacctgtgatgtcttcggtgttcatggtgtgtgtggcatcgtcggttgtattctgacgggtgtcttcacctcggcgtcgctgggcggcactggttatgctgctggcgtaaccatggggcatcaggtcggcgttcagttattcagtgttggtgtgactgttgtctggtcgggtgttgttgccttcgttgcctttaaaattgcgggcttgattgtgggcctacgggtacccgaagagcaagagcgtgaaggtctggatgttaacagtcacggtgaaaacgcatataatcaataa

SEQ ID NO: 67432 - protein, 431 aa, Yersinia pseudotuberculosis IP 32953
MMMKKLLSVLGLGTVALLPSWAMAAAPAVADKADNAFMMICTALVLFMTIPGIALFYGGLLRSKNVLSMMTQVMVSFALVCVLWILYGYSLAFSAGNAFFGSFDMAMLKGIELTSLSGSFYQYIHVVFQASFACITVALIVGSFAERIRFSAVLIFAALWFTFSYLPIAHMVWGGGFLAMDGALDFAGGTVVHINAAVAGLVGAYLLGKRAGFGKEAFKPHNLPMVFTGTAILYIGWFGFNAGSASAANEIAALAFLNTVVATAGAILSWVFAEWALRGKPSLLGACSGCIAGLVAITPAAGTVGVGGALIIGLVGGVAGLWGVVLLKKWLRVDDTCDVFGVHGVCGIVGCILTGVFTSASLGGTGYAAGVTMGHQVGVQLFSVGVTVVWSGVVAFVAFKIAGLIVGLRVPEEQEREGLDVNSHGENAYNQ

SEQ ID NO: 67433 - DNA, 1233 bp, Bacillus cereus E33L
  CDS (1)..(1233): transl_table=11
atgaatatgggagatacggtttttatgtttgtagcgacagtaatggtcatgttaatgacaccaggattagcacttttttatggagggatggttcgcagtaaaaacgtactcagtacgacaatgcatagttatagtgcaatggctatcgtttcgattcaatggattgtaattggttattctttatcattcggaccagattggcacggacttatcggcacactcgattggttcggtttaaatggagttacctacgcaccaaatccagactactcatctactattcctcacaatttatttatgatgtttcaactcatgttcgctattttaactcctgctttaatttcaggtgcatttgccgaaagaatgcgattttcagctttccttattttcatccttctatggacaacgatcgtttacaatcctgttgctcattgggtatggggcgttggcggatggctaagagaacttggcgcgttagacttcgctggcggtaatgtcgttcatattacatctggtgtggctggcctcgtattagctattttccttggaaaacgaaaaaacataaacggtacttctcctcatcatttaccatttacaatgctaggcgctgggctgctatggtttggttggttcggttttaacgtcggaagcgcattatctttaaatgatgtagctttaactgcatttattaatacgaatatagccgctgctgcctccgcattaacttggatgctttcagagtggttctttcaatcaaaaccgactgcgatgggagctgcttgtggcgccgtttccggtctagtcgctattacaccagcttgcgggttcgttacacctttctccgctcttcttatcggagcgattggcggcgtattatgcttcggagcagtctttttcttaaaaacaaaattcggatacgacgatacactcgatgcattcggatgtcacggcatcggcggaacttggggcggtattgcgacaggactatttgcaactactaccgtaaacggcgatggcgctaacggattattttacggaaacgccgcgttgctgtttaaacaacttgtagcaatcggcgcaacatatgcattcacaattataatgacgtacgccattattaaagcaattaacttcttcctccctgtccgggtcgatgagcacgaggaacatatgggacttgatatttcgatgcacggagagaaagcttatgagtatactgagcgagtgaactaa

SEQ ID NO: 67434 - protein, 410 aa, Bacillus cereus E33L
MNMGDTVFMFVATVMVMLMTPGLALFYGGMVRSKNVLSTTMHSYSAMAIVSIQWIVIGYSLSFGPDWHGLIGTLDWFGLNGVTYAPNPDYSSTIPHNLFMMFQLMFAILTPALISGAFAERMRFSAFLIFILLWTTIVYNPVAHWVWGVGGWLRELGALDFAGGNVVHITSGVAGLVLAIFLGKRKNINGTSPHHLPFTMLGAGLLWFGWFGFNVGSALSLNDVALTAFINTNIAAAASALTWMLSEWFFQSKPTAMGAACGAVSGLVAITPACGFVTPFSALLIGAIGGVLCFGAVFFLKTKFGYDDTLDAFGCHGIGGTWGGIATGLFATTTVNGDGANGLFYGNAALLFKQLVAIGATYAFTIIMTYAIIKAINFFLPVRVDEHEEHMGLDISMHGEKAYEYTERVN

SEQ ID NO: 67435 - DNA, 1212 bp, Bacillus licheniformis ATCC 14580
  CDS (1)..(1212): transl_table=11
atgcagatgggggatacagtatttatgttcttttgcgctttgctcgtgtggctgatgacgccgggcatcgctttattttacggaggccttgtaaggagcaaaaatgtgctcagcaccgttatgcacagtttatcttcaattgccatcgtttctatcatatggattttgttcggctattcactcgctttcgctcccggaaacccattgatcgggggtttggattggatcggactgcacggtgtcggttttgaacccaatgccgattattcggagacgatcccgcatacgctttatatgatgttccaattgacatttgccgtcctgacgactgcgattatttccggaagctttgcggagcgcatgcgctttccggcctttattcttttctcggtgctctgggcggttttcgtttattcgcctgtcgcccactgggtatggggcggaggctggcttgacgagctgggagctattgattttgccggcggaaacgtcgttcacatttcttccggggtagccggtctggtcgttgcgattgttctcggcaagcggaaaaatatgagcgacaccgcccctcacaacctccttctgaccctgctcggggcgactttgatctggttcggatggttcggtttcaatgtcggaagcgcgctgacgatcgatgaagtcgccatgaccgcttttatcaacacgaatacggctgcggccgcggggctgatcggctggattttggcagaatggctgattaataagaagccgacgatgctcggcgccgtctcgggagcgattgcgggactcgtcgcgattacgcctggcgcaggttttgtcacgccattctcatctgtatggatcgggcttatcggaggaatcgtctgtttctggggggtgttttcgctcaagaaaaaattcgggtacgatgatgcgctcgatgccttcggacttcacgggctcggcgggacatggggcggaatcgcgacaggtttgttcgcgacgacatctgtcaacgcagacggtgccaacgggcttttttacggagacatcagtctcctttggaaacagctgattgcgattgctgcaacatatttgtttgtcgcaatcgtcacatacgctattattaagatagtcagtatcttttttaaactccgtgcctcagaggatgaagaatcattgggcctcgatcttacgctgcacggcgaaaaagcgtatcaagattaa

SEQ ID NO: 67436 - protein, 403 aa, Bacillus licheniformis ATCC 14580
MQMGDTVFMFFCALLVWLMTPGIALFYGGLVRSKNVLSTVMHSLSSIAIVSIIWILFGYSLAFAPGNPLIGGLDWIGLHGVGFEPNADYSETIPHTLYMMFQLTFAVLTTAIISGSFAERMRFPAFILFSVLWAVFVYSPVAHWVWGGGWLDELGAIDFAGGNVVHISSGVAGLVVAIVLGKRKNMSDTAPHNLLLTLLGATLIWFGWFGFNVGSALTIDEVAMTAFINTNTAAAAGLIGWILAEWLINKKPTMLGAVSGAIAGLVAITPGAGFVTPFSSVWIGLIGGIVCFWGVFSLKKKFGYDDALDAFGLHGLGGTWGGIATGLFATTSVNADGANGLFYGDISLLWKQLIAIAATYLFVAIVTYAIIKIVSIFFKLRASEDEESLGLDLTLHGEKAYQD

SEQ ID NO: 67437 - DNA, 1413 bp, Synechococcus elongatus PCC 6301
  CDS (1)..(1413): transl_table=11
atgttcgacaaacgatggcgaactctgggtttgactgcagcactggctggcatttctgcatttctgctggcccatccaactctggcagcaactgcacctcagctaacgctggagcagctcaatagcaacgtcactgccgccaagactggaactgacacgctactcctcctaatcggctcagccctcgtccttttgatgacaccggggctagcctttttctatggcggttttggcagagcccagaacgtcctaaatatcatgatgatgagcttcttgatgatggggctcgtcggcatgacttgggtgatttatggctacagtctcgctttcgacaccagtttagggagtccctttatcggcggttttagtaacctgtttttcaatggtgtcggtggcaagtttggcattgatcctgtctgggccggcgatgagttgatgatctccggtatgtctgcctccagctttgcgctgtttcaaggcatgttcgcaatcattacgcccgctctgatttctggagcgctggtagagcgggtcaattttaaggcttggttctggttcggcttgctctggtccacgcttgtctacatccctatggcgcacatggtctggggaagcaatggctttatctatggccagattggcgccctcgactttgccggcagcaccgttgtccatattgcctctggggtgggtgccctagtgtccgtggcaatgatcggcccgcgtcgcgtcttcccgaatcgtctgtcgccgccgcacaatgtgccctttattttgttgggggcaggtctgctttggttcggctggtttggatttaacggcgcgagctacttcgctgcccaaggcgccggttttgccttcctcaccaccaatacggcagcagcaacagccatgctgacttggctattactcgagcagattgacctcgggaagcccaccgccgtaggcgccgcaaccggcgcggtggctggtctagtcggaatcacaccgtctgctgggttcattcctgtttgggcggcacttcccatcggtgccttgacagccctagtctgctttctgttcgtcgccaaagttaagagccggatccgactggatgattccctagatgcttttggggtacacggcgttggcggaaccgtcggcgctattctcacgggcatttttgcccagaaggatttcctcgttgagaaagctttcccaacccagttcaaggtgatctcccagggtcctttggccatgacttgggcacagatccaagccgtgttgattacctatctctttgttggcatcgctaccttcgtgatctggacgatcctgaaatcggtcatgcgtgtccgcgccacggaggaacaggagttggaagggctggactttgccctacacggcgaagatgcctacagcaaagagcgctag

SEQ ID NO: 67438 - protein, 470 aa, Synechococcus elongatus PCC 6301
MFDKRWRTLGLTAALAGISAFLLAHPTLAATAPQLTLEQLNSNVTAAKTGTDTLLLLIGSALVLLMTPGLAFFYGGFGRAQNVLNIMMMSFLMMGLVGMTWVIYGYSLAFDTSLGSPFIGGFSNLFFNGVGGKFGIDPVWAGDELMISGMSASSFALFQGMFAIITPALISGALVERVNFKAWFWFGLLWSTLVYIPMAHMVWGSNGFIYGQIGALDFAGSTVVHIASGVGALVSVAMIGPRRVFPNRLSPPHNVPFILLGAGLLWFGWFGFNGASYFAAQGAGFAFLTTNTAAATAMLTWLLLEQIDLGKPTAVGAATGAVAGLVGITPSAGFIPVWAALPIGALTALVCFLFVAKVKSRIRLDDSLDAFGVHGVGGTVGAILTGIFAQKDFLVEKAFPTQFKVISQGPLAMTWAQIQAVLITYLFVGIATFVIWTILKSVMRVRATEEQELEGLDFALHGEDAYSKER

SEQ ID NO: 67439 - DNA, 1338 bp, Colwellia psychrerythraea 34H
  CDS (1)..(1338): transl_table=11
atgtcagttattgaattatttactatggaaacaactatgagcaaagcattaatcttgtgtttaaccttacttagcttttttatctcaggcactgcttgggcggaagaagggcaactaaatggcgcaaacaccagttggattttaacatctaccgcattggtattattgatgaccttaccgggcgttgctcttttttacggtggcttggttcgtaaaaagaatgtgttatcaatattaatgcaatgttttgctatcggctcaatctcatcaattttatggctattagtaggctatagcttagcttttggtgagggtaatgcttttatcggtgattttagtaaagtgatgatgcatggtattcctaaagatgctttgtcaggagatatccctgaaagtttatttatgctgtttcaaatgacttttgccattattacgccagtgcttattattggtggttttgcagagcgtatgaagttctctgcggtattactctttagtggtatttggttacttgctgtttatgcacctattactcattgggtatggggcggcggttggttagcacaaatgggcatttatgattttgccggtggtattgttgtacatattacggcgggtactgcggcattagttgccgctcttgttatcggtccacgtcgaggttttcctaaaacacctatgttgccacataacttaaccatgactgttactggtgctggtatgttatgggttggttggtttggctttaatggtggtagtgcactagccgctaacggtgatgcttctatggctatgcttgttacacatatttctgccgcagcaggtacattaacttgggcagctattgagtggaaaaaatttggtaaagccagtgttttaggtgctgttaccggtatggtcgcaggtttaggtaccattacgcctgcctctggttttgtcggccctggtggcgcgttaattattggtattagtgcaggctttgtttgtttttattcaacggtttatattaaacaaaaattaaaaattgatgattcgttagatgtatttcctgtacatggtgttggtggtattttaggtacgttattagtcggtgttttctcagcgaccagtcttggtgtatttagtggttttggttttgctgaaggcattgctacgatggcggaacaaattggtgttcagcttatcggcatattctctacactgatttataccgcagtcgttacttatattatccttaaattggtcggtttgatgacggatggtttacgtgttggtgaagagcaagagtctaacggtttagatcaggctgaacatgaagaagtcggttaccacttgtag

SEQ ID NO: 67440 - protein, 445 aa, Colwellia psychrerythraea 34H
MSVIELFTMETTMSKALILCLTLLSFFISGTAWAEEGQLNGANTSWILTSTALVLLMTLPGVALFYGGLVRKKNVLSILMQCFAIGSISSILWLLVGYSLAFGEGNAFIGDFSKVMMHGIPKDALSGDIPESLFMLFQMTFAIITPVLIIGGFAERMKFSAVLLFSGIWLLAVYAPITHWVWGGGWLAQMGIYDFAGGIVVHITAGTAALVAALVIGPRRGFPKTPMLPHNLTMTVTGAGMLWVGWFGFNGGSALAANGDASMAMLVTHISAAAGTLTWAAIEWKKFGKASVLGAVTGMVAGLGTITPASGFVGPGGALIIGISAGFVCFYSTVYIKQKLKIDDSLDVFPVHGVGGILGTLLVGVFSATSLGVFSGFGFAEGIATMAEQIGVQLIGIFSTLIYTAVVTYIILKLVGLMTDGLRVGEEQESNGLDQAEHEEVGYHL

SEQ ID NO: 67441 - DNA, 1194 bp, Methanosarcina barkeri str. Fusaro
  CDS (1)..(1194): transl_table=11
atgactattgaagcagcagacacagtatgggtactcatctcgtctgcacttgtattgttaatgcttcccggacttgcactgttctatggcgggcttgtccagcgtaaaaacgttttgagcagcatgatgcattcatttgttgcaatgggcgtcatggctctggaatgggtattgataggttactcacttgcatttgcagacggtaactggtttgtaggtggccttggacatgtattcctgaaagggatagatgtatattcagtaactggtacaattccgacttatgcatatgttgcgtttcagggaatgtttgcaataattacacctgctctgatttcaggtgcaattgtaggacgtgtgaagtttaaatcttatatcgcattcattgctctctggggacttatcgtatatgcacctgtctgccactgggtctggggtggtgggttccttacaggggaagctcttgactttgcaggcggtacagttgtgcacataacctcaggtgtctcctcacttgcaattcttacataccttggaaagagacgtggttttggggtagattcattaaagccacataatgttactttgacgcttcttggaactggtcttctctggttcggatggttcgggtttaacgcaggttcatcacttgctgcaaatgagattgcatctctcgcattcattacaacacttgtagccccagcagctgcaggatttatctggatggcccttgaatggtatcacttagggtatccaacagctctgggatttgcaacagggattcttgcaggacttgttgcaataactccaagtgcaggctttgtcacgccaatggcagcaattcctataggtgcgatcacaagtttcgtgtgctacaatgctgtaggactcaaagaaaggcttggatatgatgactcgctggatgcctttggagtacatggtgttggtggaatagtaggcgcactcctagtaggtgtatttgcaagtgtaggagggaccggtctcttacttgggaattccagccaaatgttaatccagcttcaaggcgttgtcgtcacaattgtttatgcagctgtcgggactctccttattggattcatacttaacagaactatagggcttaaagtcagcgaaagtgaagaaaacatcggacttgacaagacgcagcatggtgaagttgcatataacatctga

SEQ ID NO: 67442 - protein, 397 aa, Methanosarcina barkeri str. Fusaro
MTIEAADTVWVLISSALVLLMLPGLALFYGGLVQRKNVLSSMMHSFVAMGVMALEWVLIGYSLAFADGNWFVGGLGHVFLKGIDVYSVTGTIPTYAYVAFQGMFAIITPALISGAIVGRVKFKSYIAFIALWGLIVYAPVCHWVWGGGFLTGEALDFAGGTVVHITSGVSSLAILTYLGKRRGFGVDSLKPHNVTLTLLGTGLLWFGWFGFNAGSSLAANEIASLAFITTLVAPAAAGFIWMALEWYHLGYPTALGFATGILAGLVAITPSAGFVTPMAAIPIGAITSFVCYNAVGLKERLGYDDSLDAFGVHGVGGIVGALLVGVFASVGGTGLLLGNSSQMLIQLQGVVVTIVYAAVGTLLIGFILNRTIGLKVSESEENIGLDKTQHGEVAYNI

SEQ ID NO: 67443 - DNA, 1407 bp, Thiobacillus denitrificans ATCC 25259
  CDS (1)..(1407): transl_table=11
atgaaaaaactctttgcttcgttcggcctgatcctcgcgctgctggcgccgggcctcgcggccgcgcaggacgcggccgtgccgatggatggcgccgcagcagtcgaaacggcgccggcggctgtagcgccggcagccgcagttccggccgaaacagccgcgacgccggtcccagacaagggcgacacgacctggatgatggtctcgacgttgctcgtcgtcctgatgatcgtcccgggcgtcgcactcttctacggcgggctcgtgcgcgccaagaacatgctgtcggtgctgacgcaggtgatggcgatcttctgcctgatatcggtgctgtgggcggtctatggctactcgctggcgttcggcgacggcggcggcatgaactgggcgatcggcgacctctccaagctcttcctcgccgggatcacgcccgacagcaccgccgcgaccttctccgacggcgtcgtcattcccgaattcaccttcgtcgccttccagctgaccttcgccgcgatcacggtcgcactgatcgtcggcgggctcgccgagcgcgtgaaattctcggcgctgctcgtgttcgcggtgctgtggttcaccttctcctacctgccgatcgcgcacatggtgtgggcgaccggcggctatctgttcgagaagggcgacctcgacttcgcgggcgggaccgtggtccacatcaacgcgggcgtcgctgcgctcgtcggcgcgatcgtactcggcaagcgcatcggctacggccgcgacgcgatgccgccgcacaacctgccgatgacgatgatcggcgcgtcgctgctgtgggtcggctggttcggcttcaacgccggctccaacctcgaagcgaccggcggcgcggcgctcgccttcatcaacacgatactcgcgaccgccgcggcagggctggcgtggatgttcgccgagtggatggtgcgcggcaagccttcgttgctcggcgtcgcgtcgggcgtggttgccgggctcgtcgcgatcacgcccgcagcgggcctggtcgggccgatgggcgggatcgtgctcggcgcggtcgccggcgtcgtctgcctgtggggcgtcagcgggctcaagtcggcgctcggctacgacgacagcctcgacgtcttcggcatccacggcatcggcggcatcatcggcgcgatcggcaccggcatcttcgtctcgccgacgctcggcggcgtcggggtcgacggctacacgctcgccggccaggtcatgacacaggcgagcggcgtgctgatcacgatcgtgtggtcggcggtcgtcagcttcgtcgccttcaagctcatcgacgtgaccctcggcttgcgcgtcgccgaagaacaggagcgcgagggactcgacaccgcgtcgcacggcgagcgcgcgtactccgtctag

SEQ ID NO: 67444 - protein, 468 aa, Thiobacillus denitrificans ATCC 25259
MKKLFASFGLILALLAPGLAAAQDAAVPMDGAAAVETAPAAVAPAAAVPAETAATPVPDKGDTTWMMVSTLLVVLMIVPGVALFYGGLVRAKNMLSVLTQVMAIFCLISVLWAVYGYSLAFGDGGGMNWAIGDLSKLFLAGITPDSTAATFSDGVVIPEFTFVAFQLTFAAITVALIVGGLAERVKFSALLVFAVLWFTFSYLPIAHMVWATGGYLFEKGDLDFAGGTVVHINAGVAALVGAIVLGKRIGYGRDAMPPHNLPMTMIGASLLWVGWFGFNAGSNLEATGGAALAFINTILATAAAGLAWMFAEWMVRGKPSLLGVASGVVAGLVAITPAAGLVGPMGGIVLGAVAGVVCLWGVSGLKSALGYDDSLDVFGIHGIGGIIGAIGTGIFVSPTLGGVGVDGYTLAGQVMTQASGVLITIVWSAVVSFVAFKLIDVTLGLRVAEEQEREGLDTASHGERAYSV

SEQ ID NO: 67445 - DNA, 1413 bp, Anabaena variabilis ATCC 29413
  CDS (1)..(1413): transl_table=11
gtgtttcagaaaattttgataactggggtgattaccctactactgctgacaattcctgttatgggtagtgcttgggcgcaagtcccagcaacggctccacctgctgatacaggagatacagcatttatgctgatttcatcagccctagtcttgctgatgacaccaggattggcatttttctacggtggatttgtacgatcgcgcaatattctcaatacattgatgatgagttttgtattgatggcgatcgtcggcgttacttgggttttatggggttatagtctgtcatttgcgccaggactgccatttattggtggtttacagtggtttgggttaaacggtgtggggctagaaaccacaggttatctgcaaggttcagagccgacaaatgtggtttcttatgccgggacgattccccatcaggcatacatgatatatcaagccatgtttgccattatcaccccagccttaatttctggagcgatcgccgaacggatgagtttccgtgcctattgcctatttgtgctactgtggtcaacctttgtttacacgcctctagcccacatggtttgggcaaaaggtggattattaggtttgtacggtggcttaggcgcgctcgacttcgccggcggtacagtagttcatattagctctggggtttctgccctcgtggccgcaatagtcctgggaccgaggaaaacccatcccgatcgcctcagccctccccacaacgtaacatttattttgttgggtgctggtttgctatggtttggctggttcggttttaatgctgggagtgccttatctgttgctagtagcacttctggcagtttcattactaatccagccacaactgcctttgttgccaccaatacctcagccgcagctggggctttaatgtggctaattctagaaggagtattacgcggtaaacccaccgccgtaggtgcagccacaggcgcagttgccggtttagtagggattaccccagccgccggctttgtcacccctctagcgtcaattttgataggttgtatcacagcttttgtttgcttctatgccgtaagtttcaaacacaagttaaatgttgacgatgccttagatacctacccggtgcatggtgttggtggaacagttggcgcaattctcacagccttgtttgccaccgccgaagttaactcaggcggtaaaaacggcgtactcaagggtaattttggtgaactaggtgtggaactggccgccattgtcatcgcctatgtaattgcagcagttggcacttggataattttgaagatcattgatgctagcgttggcttacgggtgaaagaagaagccgaatatcaaggtttggatatcaacgaacacggagaagaagcatacaactccgagtttagcgatcgcatcgtaccgtaa

SEQ ID NO: 67446 - protein, 470 aa, Anabaena variabilis ATCC 29413
MFQKILITGVITLLLLTIPVMGSAWAQVPATAPPADTGDTAFMLISSALVLLMTPGLAFFYGGFVRSRNILNTLMMSFVLMAIVGVTWVLWGYSLSFAPGLPFIGGLQWFGLNGVGLETTGYLQGSEPTNVVSYAGTIPHQAYMIYQAMFAIITPALISGAIAERMSFRAYCLFVLLWSTFVYTPLAHMVWAKGGLLGLYGGLGALDFAGGTVVHISSGVSALVAAIVLGPRKTHPDRLSPPHNVTFILLGAGLLWFGWFGFNAGSALSVASSTSGSFITNPATTAFVATNTSAAAGALMWLILEGVLRGKPTAVGAATGAVAGLVGITPAAGFVTPLASILIGCITAFVCFYAVSFKHKLNVDDALDTYPVHGVGGTVGAILTALFATAEVNSGGKNGVLKGNFGELGVELAAIVIAYVIAAVGTWIILKIIDASVGLRVKEEAEYQGLDINEHGEEAYNSEFSDRIVP

SEQ ID NO: 67447 - DNA, 1317 bp, Carboxydothermus hydrogenoformans Z-2901
  CDS (1)..(1317): transl_table=11
atgaagaagaaatttttatccttgctttttggcctaatccttttacctaatttatctttagccggagagccagggtataacccgggagatgttacctttgtactgctttcagcggcgttggtctttttaatgactccggggcttgccctgttttatggtggaatggtacgccggaaaaatgttttaaatacggtggcgatgagttttattgcgatagtggtagtttcactgcaatggattttaataggctataccctttcttttgggaatgatgtaaaaggaattatcggagatttttcttaccttggattaaaaaacgtaatgggtcttactgtttctaaccttcccggatacgtgtttgttgttttccaattaatgtttgccatcataacagcagctattatttcaggttcggtggtagaaaggatgagctttgctgcctggatcttatttattgctctctggacgacattagtctatgacccccttgcccatatggtctggggtggtgggatgctttttaagctaccgactttagattttgctggaggaacggtggtgcatataagttcgggaatatcgggcttggtggcagcacttatattaggtaaaagaaaagaaggggaaaatgctcccttaatgccgcataatttaccgcttaccattttaggggcggggcttctctggtttggctggtttggatttaatgcgggaagtgcccttgcagccaataatctcgcagcgctggcgtttattaacaccaatacttcggcggtaatggctgctctggcctgggccttagcggagtggctccatcgccggaaggttacggttttaggtattgccaccggggcggtggctgggctggtggcggttactccggcggcaggctttgttaccccaacatcttccgtttttattggcttagtcggtggggtcctggtctatattgcggtaggcatattaaaggctaagtttaattatgacgattctttggatgcttttggctgtcacggggtaggcggtatctggggagcagttgctacgggcatttttgccactaaagcggtaaacccggcgggagctgatggagtactttacggaaattttggtcaactattaaaccagttagctggagtagggttagcgattgcattagcggtagttggaactgttataattttaaagttaatcggtattttcctacctttgcgggttaaagatgaagcggaaagcataggcttggatattacagttcatggggaagatgcttataaagatttaatttttaccgggaagtcggttccgttttcttaa

SEQ ID NO: 67448 - protein, 438 aa, Carboxydothermus hydrogenoformans Z-2901
MKKKFLSLLFGLILLPNLSLAGEPGYNPGDVTFVLLSAALVFLMTPGLALFYGGMVRRKNVLNTVAMSFIAIVVVSLQWILIGYTLSFGNDVKGIIGDFSYLGLKNVMGLTVSNLPGYVFVVFQLMFAIITAAIISGSVVERMSFAAWILFIALWTTLVYDPLAHMVWGGGMLFKLPTLDFAGGTVVHISSGISGLVAALILGKRKEGENAPLMPHNLPLTILGAGLLWFGWFGFNAGSALAANNLAALAFINTNTSAVMAALAWALAEWLHRRKVTVLGIATGAVAGLVAVTPAAGFVTPTSSVFIGLVGGVLVYIAVGILKAKFNYDDSLDAFGCHGVGGIWGAVATGIFATKAVNPAGADGVLYGNFGQLLNQLAGVGLAIALAVVGTVIILKLIGIFLPLRVKDEAESIGLDITVHGEDAYKDLIFTGKSVPFS

SEQ ID NO: 67449 - DNA, 1515 bp, Burkholderia sp. 383
  CDS (1)..(1515): transl_table=11
atgcgcaaacttctgatgtccctgctgatggccggctcgctgatcgcggccggcgtcggctccgcgctcgccgacgacgcggcgtccgccgcggccgcgtccgcccccgccgcaatggcttccgacgcttcggctgccgccgctccggccgcttcggcaccggctgccaccgacgcatccgccacggccgctgccgccgcaccggcctcgggcgccaccgatgcatcggccgccgctgccgcttcggccccggccgcaccggccgcgccgaccgagccgttcacggtcgattcgtcgaagatcagtgcgggcgacaccgcgtggatgctgacctccaccgcgctcgtgctgttcatgacgatccccggcctcgcgctgttctacgccggcatggtccgcaagaagaacgtgctcgcgacggtgatgcagagcttcgcgatcaccgcggtgatcacggtgctgtggacggtggtcggctacagcctcgcgttcacgccgggcaacggcttcattggcggcctgtcgcgtgcgttcctgcacgggatgacctacgtcaagggcgacaaggcgacgacgctgaccgtcagccacctggcgacgacgattccggaatcggtctacttcgtctaccagatgacgttcgcgatcatcacaccggccctgatctgcggcgcgttcgccgaccggatgaagttttcggcgatgctcgtgttcatgacgctctggtcgctgatcgtctatgtgccgatcgcgcacatggtgtgggagccgaccggctggctgtcgtcggatggcgtgctcgacttcgcgggcggcacggtggtgcacatcaacgccggtatcgcgggcctcgtgtcatgcctgatgctcggcaagcgcatcggcttcggtcgtgaatcgatggcgccgcacaacctcgtgctgacgatgatcggcggctcgatgctgtgggtcggctggttcggcttcaacgcgggttccgcagtcgcggccgacggccgtgccggtttcgcgatgctgacgacgcaagtcgcgaccgcctgcgcggcgctcggctggatgttcgccgagtggatctcgcacggcaagccgtcggtgctcggcatcgtgtcgggtgcggtcgcgggtctcgtcgcgatcacgccggcagccggcttcgtcggcgtgacgggtgcactcgtgatcggcatcgcagccggcgtcgtgtgcttctggtcggcgacgtggctcaagtcgaagctcggctacgacgattcgctcgacgcattcggcgtgcacggcgtgggcgggattctcggcgcgctgctgacaggcgtgttcgcggtcaaggacatcggcggcgccgacggcagcctgctgctgcaggccaagggcgtgctgatcacgctggtctacagcggcgtgctgagcttcgtgctgctgaagctgatcgatctcacgatcggcctgcgcgtgtcggaagaagaagagcgcgaaggcctcgacgtggtcctgcacggcgagcatgtcgaataa

SEQ ID NO: 67450 - protein, 504 aa, Burkholderia sp. 383
MRKLLMSLLMAGSLIAAGVGSALADDAASAAAASAPAAMASDASAAAAPAASAPAATDASATAAAAAPASGATDASAAAAASAPAAPAAPTEPFTVDSSKISAGDTAWMLTSTALVLFMTIPGLALFYAGMVRKKNVLATVMQSFAITAVITVLWTVVGYSLAFTPGNGFIGGLSRAFLHGMTYVKGDKATTLTVSHLATTIPESVYFVYQMTFAIITPALICGAFADRMKFSAMLVFMTLWSLIVYVPIAHMVWEPTGWLSSDGVLDFAGGTVVHINAGIAGLVSCLMLGKRIGFGRESMAPHNLVLTMIGGSMLWVGWFGFNAGSAVAADGRAGFAMLTTQVATACAALGWMFAEWISHGKPSVLGIVSGAVAGLVAITPAAGFVGVTGALVIGIAAGVVCFWSATWLKSKLGYDDSLDAFGVHGVGGILGALLTGVFAVKDIGGADGSLLLQAKGVLITLVYSGVLSFVLLKLIDLTIGLRVSEEEEREGLDVVLHGEHVE

SEQ ID NO: 67451 - DNA, 1467 bp, Geobacter metallireducens GS-15
  CDS (1)..(1467): transl_table=11
atgaagtttaaactatcatttgtcgcattgctggcaactgtcgcgctctcgctcccggtcgccctcctggcagaggaggtgaagaccgccgctccggcacaggctgccctgtcctcggcccagacggctgcccttgcgcccgctgtcaccgcggcgcccgccgctgctccggccacccctgccgcaccgaaaaacgtcgatccggttctcaataccggcgacaccgcctggatgctcgtctccgccgccatggtcctcttcatgattccgggccttgccttcttctacggcggcatggtccggggcaagaacgtcctctcgacgatcatgcactcctttgtcgccatggggatcgtcggtgtgcaatgggcggtgattggctactccctctccttcggccctgacatcggcggcggcctcctcgggaacctgagcaaggcgctcctgaacggtctcatcaccttcaaggatggcaacccggtctacgccctctttcagaacgtgccgaccgcaccgggggccatccctgagtacgtcttcgccatgttccagtgcatgttcgccatgattaccgttgccctcatctccggcgccctggccgagcgggtgaagttctccgcctactgcgtcttcgtgctcctctggaccaccctggtgtacgaccccttggcccactgggtctggatgagcgacggctggctcttcaagaaaggcgctctcgacttcgccggcggcacggttgttcacctctcctccggtatctcggccctggcgtttctcatcttcctcggcaagcggcacgggtttccccacgagcggatggcgccccacagcctgccgctgactatgctcggcgtcggcatgctctggttcggctggttcggcttcaacgccggttccgccatcgtcggggccaactgctccgacgcggcgggggggctggccggtctcgcctttgccaccacgaccatcgcgccggctgccggcggcctttcctggatgatcgcggaatggattcacgcgggcaaaccttccgccctcggtttcggttccggtgtcgttgccggcctggtcgtcattacccccgctgccggtttcgtgcaacccggggccgccatcctcatgggacttgcggcgggcgtggtctgctatggtggcgtgctgctgaaggccaagctcaagtacgacgactccctcgacgccttcggtgtccacggagtgggggggaccttcggcgccctcaccaccggtatcttcgccaccgtcggcgccacggggctcctctccggcaatgtctcccagttcttaacccaggtgattgcagtcgtggccgccggcgcctatgccttcatcgtcacccttgttattgcctttgtcctccacaagaccatcgggctccgcgtggaaaaggaagacgagatcatggggctcgaccagacccagcattccgagtcggcctacaactga

SEQ ID NO: 67452 - protein, 488 aa, Geobacter metallireducens GS-15
MKFKLSFVALLATVALSLPVALLAEEVKTAAPAQAALSSAQTAALAPAVTAAPAAAPATPAAPKNVDPVLNTGDTAWMLVSAAMVLFMIPGLAFFYGGMVRGKNVLSTIMHSFVAMGIVGVQWAVIGYSLSFGPDIGGGLLGNLSKALLNGLITFKDGNPVYALFQNVPTAPGAIPEYVFAMFQCMFAMITVALISGALAERVKFSAYCVFVLLWTTLVYDPLAHWVWMSDGWLFKKGALDFAGGTVVHLSSGISALAFLIFLGKRHGFPHERMAPHSLPLTMLGVGMLWFGWFGFNAGSAIVGANCSDAAGGLAGLAFATTTIAPAAGGLSWMIAEWIHAGKPSALGFGSGVVAGLVVITPAAGFVQPGAAILMGLAAGVVCYGGVLLKAKLKYDDSLDAFGVHGVGGTFGALTTGIFATVGATGLLSGNVSQFLTQVIAVVAAGAYAFIVTLVIAFVLHKTIGLRVEKEDEIMGLDQTQHSESAYN

SEQ ID NO: 67453 - DNA, 1206 bp, Desulfovibrio desulfuricans G20
  CDS (1)..(1206): transl_table=11
atgaacgcggcagataccgctttcattcttgtctgttcggctctggtgatgtttatgacaccggggctggcgttgttttacggggggcttgtcagatcgcgcaatgtgctcagcaccaccatgcacagcgtggctttgctcggcattgcctcacttgtctggtgggcagtggggtattctctggcgttcggcagtgaccacgggggcattatcggcgggctggagtatctttttctgcataacgtaggcacggaaccgggtcctgtcgataatctgccgcatctgctgttcatggtttttcagtgcatgtttgccgttatcacaccggcgttgatttcgggtgcctatgccgagcgtatccgtttcggggcgatggtgctgttttctgttttatggcttgtgctggtgtatgcgcccatggcgcactgggtttggggcggcggatggatggcccggctgggtgcgcttgattttgccgggggggccgtggtgcatatgagctctgccgctgctgcgctggcggctgccaatgtgctgggactgcgccgcggatacgggcgcgaggcatttattccgcacaatctgcccatgacagtactgggagcaggtattctgtggttcggctggttcggttttaacgccggaagcgcgctggcggccaacggcgcggcagccaatgcatttgtaaccacacatcttgccgcggctgcggctctggtgggctggcttgccgtggaaaaactgcatggcggcagagcaaccacccttggtgcggcttcgggagccgtggcgggactggttgccattactcccgccgcagggtttgtcacaccggcttcagcggtgttcatcgggctggccggcggagtgctgtgttacggcggtgtgtttctcaagcacaagctgcgttatgatgacgctcttgatgtggtggggattcatggtgttgggggcacgtggggcgcgctggcaaccggaatttttgccgatgccgccgtgggcggggcagacggtctgctgcacggcaacgcatatcagctctgggtgcagtttgtctcggttgtggctacatggctgttttgctatgttgccagctggttgcttttcaaggctgtcgatgcggtcatgggactcagggtctccggtgaagccgagcttgccggtcttgatgtgagtgaacacaacgaaaccgcctaccagatgtaa

SEQ ID NO: 67454 - protein, 401 aa, Desulfovibrio desulfuricans G20
MNAADTAFILVCSALVMFMTPGLALFYGGLVRSRNVLSTTMHSVALLGIASLVWWAVGYSLAFGSDHGGIIGGLEYLFLHNVGTEPGPVDNLPHLLFMVFQCMFAVITPALISGAYAERIRFGAMVLFSVLWLVLVYAPMAHWVWGGGWMARLGALDFAGGAVVHMSSAAAALAAANVLGLRRGYGREAFIPHNLPMTVLGAGILWFGWFGFNAGSALAANGAAANAFVTTHLAAAAALVGWLAVEKLHGGRATTLGAASGAVAGLVAITPAAGFVTPASAVFIGLAGGVLCYGGVFLKHKLRYDDALDVVGIHGVGGTWGALATGIFADAAVGGADGLLHGNAYQLWVQFVSVVATWLFCYVASWLLFKAVDAVMGLRVSGEAELAGLDVSEHNETAYQM

SEQ ID NO: 67455 - DNA, 1413 bp, Synechococcus elongatus PCC 7942
  CDS (1)..(1413): transl_table=11
atgttcgacaaacgatggcgaactctgggtttgactgcagcactggctggcatttctgcatttctgctggcccatccaactctggcagcaactgcacctcagctaacgctggagcagctcaatagcaacgtcactgccgccaagactggaactgacacgctactcctcctaatcggctcagccctcgtccttttgatgacaccggggctagcctttttctatggcggttttggcagagcccagaacgtcctaaatatcatgatgatgagcttcttgatgatggggctcgtcggcatgacttgggtgatttatggctacagtctcgctttcgacaccagtttagggagtccctttatcggcggttttagtaacctgtttttcaatggtgtcggtggcaagtttggcattgatcctgtctgggccggcgatgagttgatgatctccggtatgtctgcctccagctttgcgctgtttcaaggcatgttcgcaatcattacgcccgctctgatttctggagcgctggtagagcgggtcaattttaaggcttggttctggttcggcttgctctggtccacgcttgtctacatccctatggcgcacatggtctggggaagcaatggctttatctatggccagattggcgccctcgactttgccggcggcaccgttgtccatattgcctctggggtgggtgccctagtgtccgtggcaatgatcggcccgcgtcgcgtcttcccgaatcgtctgtcgccgccgcacaatgtgccctttattttgttgggggcaggtctgctttggttcggctggtttggatttaacggcgcgagctacttcgctgcccaaggcgccggttttgccttcctcaccaccaatacggcagcagcaacagccatgctgacttggctattactcgagcagattgacctcgggaagcccaccgccgtaggcgccgcaaccggcgcggtggctggtctagtcggaatcacaccgtctgctgggttcattcctgtttgggcggcacttcccatcggtgccttgacagccctagtctgctttctgttcgtcgccaaagttaagagccggatccgactggatgattccctagatgcttttggggtacacggcgttggcggaaccgtcggcgctattctcacgggcatttttgcccagaaggatttcctcgttgagaaagctttcccaacccagttcaaggtgatctcccagggtcctttggccatgacttgggcacagatccaagccgtgttgattacctatctctttgttggcatcgctaccttcgtgatctggacgatcctgaaatcggtcatgcgtgtccgcgccacggaggaacaggagttggaagggctggactttgccctacacggcgaagatgcctacagcaaagagcgctag

SEQ ID NO: 67456 - protein, 470 aa, Synechococcus elongatus PCC 7942
MFDKRWRTLGLTAALAGISAFLLAHPTLAATAPQLTLEQLNSNVTAAKTGTDTLLLLIGSALVLLMTPGLAFFYGGFGRAQNVLNIMMMSFLMMGLVGMTWVIYGYSLAFDTSLGSPFIGGFSNLFFNGVGGKFGIDPVWAGDELMISGMSASSFALFQGMFAIITPALISGALVERVNFKAWFWFGLLWSTLVYIPMAHMVWGSNGFIYGQIGALDFAGGTVVHIASGVGALVSVAMIGPRRVFPNRLSPPHNVPFILLGAGLLWFGWFGFNGASYFAAQGAGFAFLTTNTAAATAMLTWLLLEQIDLGKPTAVGAATGAVAGLVGITPSAGFIPVWAALPIGALTALVCFLFVAKVKSRIRLDDSLDAFGVHGVGGTVGAILTGIFAQKDFLVEKAFPTQFKVISQGPLAMTWAQIQAVLITYLFVGIATFVIWTILKSVMRVRATEEQELEGLDFALHGEDAYSKER

SEQ ID NO: 67457 - DNA, 1404 bp, Moorella thermoacetica ATCC 39073
  CDS (1)..(1404): transl_table=11
ttgttcctggctgccgggaccgtcctggcccggccggcgctggcggcagccggggacgcggttgataccggcgataccgcttttatcttagtagccagcgccctggtcatgttgatgacccccggcctggccttcttttacggcggtatggtccgccagaagaacgtcctgggtatcatcatgcaatgcctggccactctggcccttatttccgtccagtgggtcctgtggggctattccctggcctttggtcccgaccatctccacctgctgggagggctggactgggcggggttccggggcgtcggtctggaacccaatcccctttacgccgccaccatcccccaccaggtattcgccatgttccagctcatgttcgcaataatcaccccggccctgataaccggtgcctttgccgagcgaatgcgcttcccggccttcctgctctttaccttaatgtgggctaccctggtctatgaccccctggcccactgggtctggggcgcggggggctggctgcgggaactcggcgccctggactttgccggcggcacggtggtgcatatcagcgccggcgtggccgggctggtctgcgccctggtcctgggacgccggcgggattacggccggatccccctgccgccccacaacctccccatgaccgttttgggcgccgcgctgttatggttcggctggttcggttttaatgccggcagcgccctaggggccaacggtctggccggtaacgccttcgtcactaccaatacggctgccggggccgccatcctgggctggctggcggtagagtggctgctccacggcaaacccaccgccctgggagcggccagcggcgcggtggcaggcctggtcgccatcaccccggcggccggtttcgtcactcccccggcggccctggtaatcggcggtatcggcggcgccctttgttgcctgtcagtggccgtggccaaggttaaactgggctacgacgattccctggacgcctttggctgccacggcgtcggcggtacctggggggccattgccaccggcatctttgccaccaaagccgtgaaccccgccggggccgacggcctgctttacggcaacgcccatttgctgggggtacaggtggtaggcgtggcggcggcctggatctttaccgccgcagtgacctacggcattctcaaggtcgtctccctgttgacacctctgcgggtcacagccgaggaagaggaagccggcctggatctctcccagcacggcgaaagcgcctatcccgacaccggcctggcagccctggaggtagcagagggtaaacgggttaccgccccgggagaactggcggtaaattggatggtgagccagggtaacccggccggaaccggtcttttccgccaggaataa

SEQ ID NO: 67458 - protein, 467 aa, Moorella thermoacetica ATCC 39073
MFLAAGTVLARPALAAAGDAVDTGDTAFILVASALVMLMTPGLAFFYGGMVRQKNVLGIIMQCLATLALISVQWVLWGYSLAFGPDHLHLLGGLDWAGFRGVGLEPNPLYAATIPHQVFAMFQLMFAIITPALITGAFAERMRFPAFLLFTLMWATLVYDPLAHWVWGAGGWLRELGALDFAGGTVVHISAGVAGLVCALVLGRRRDYGRIPLPPHNLPMTVLGAALLWFGWFGFNAGSALGANGLAGNAFVTTNTAAGAAILGWLAVEWLLHGKPTALGAASGAVAGLVAITPAAGFVTPPAALVIGGIGGALCCLSVAVAKVKLGYDDSLDAFGCHGVGGTWGAIATGIFATKAVNPAGADGLLYGNAHLLGVQVVGVAAAWIFTAAVTYGILKVVSLLTPLRVTAEEEEAGLDLSQHGESAYPDTGLAALEVAEGKRVTAPGELAVNWMVSQGNPAGTGLFRQE

SEQ ID NO: 67459 - DNA, 1410 bp, Burkholderia thailandensis E264
  CDS (1)..(1410): transl_table=11
atggccgacgacgcgtcgtcggcacccgccgccgcatcggccgcaacggcttccgacacgtcggcgagcgccgccgtcgcgtccgcgccggccgccgcttccgcggccgcttcggccgccgcgccggcttcggccgccgccgcgcccgccgcgccgaccgcgccgaccgcgccgttctccgtcgattcgtcgaagatcaattcgggcgacaccgcgtggatgctcacgtcgaccgcgctcgtgctgttcatgacgatcccgggcctcgcgctcttctacggtggcatggtccgcaagaagaacgtgctcgcgaccgtgatgcagagcttcgcgatcaccgcgctgatcacggtcctctggacggtggtcggctacagcctcgcgttcacgccgggcaacggcttcatcggcggcttctcgcgcgtgttcctgtccgggatgaactacatccacggcgacaaggcgacgacgctcaccgtcagccacctcgcgcagacgatcccggaatcggtctacttcgtctatcagatgacgttcgcgatcatcacgccggccctcatctgcggcgcgttcgccgaccggatgaagttctcggcgatgctcgtcttcatgacgctctggtcgctgatcgtctacgtgccgatcgcgcacatggtctgggagccgacgggctggctgtcgtcggacggcgtgctcgacttcgcgggcggcacggtcgtgcacatcaacgccggcatcgcgggcctcgtgtcgtgcctcatgctcggcaagcgcgtcggctacggccgcgaagcgatggcgccgcacaacctcgtgctgacgctgatcggcggctcgatgctgtgggtcggctggttcggcttcaacgcgggctccgcggtggccgccgacggccgcgccggcttcgcgatgctgacgacgcaagtcgccaccgcgtgcgcggcgctcggctggatgttcgccgagtggatcgcgaagggtaagccttcggtgctcggcatcgtgtcgggcgcggtcgcgggtctcgtcgcgatcacgccggcggccggcttcgtcggcgtcgcgggcgcgctcacgatcggcgtcgcggcgggcgtcgtgtgcttctggtcggcgacgtggctcaagcacaagctcggctacgacgattcgctcgacgcgttcggcgtgcacggcgtgggcggcattctcggcgcgctgctgacgggcgtgttcgcggtcaaggacatcggcggcgtcgacggcagcctgctgctgcaggcaaagggcgtcgcgatcacgcttgtctacagcggcatcgtcagcttcgtgctgctgaaggtgatcgacctcgtgatcggcctgcgtgtgacggaagaagaagaacgagaaggcctcgacgtgatcctgcatggcgagcacgtcgaataa

SEQ ID NO: 67460 - protein, 469 aa, Burkholderia thailandensis E264
MADDASSAPAAASAATASDTSASAAVASAPAAASAAASAAAPASAAAAPAAPTAPTAPFSVDSSKINSGDTAWMLTSTALVLFMTIPGLALFYGGMVRKKNVLATVMQSFAITALITVLWTVVGYSLAFTPGNGFIGGFSRVFLSGMNYIHGDKATTLTVSHLAQTIPESVYFVYQMTFAIITPALICGAFADRMKFSAMLVFMTLWSLIVYVPIAHMVWEPTGWLSSDGVLDFAGGTVVHINAGIAGLVSCLMLGKRVGYGREAMAPHNLVLTLIGGSMLWVGWFGFNAGSAVAADGRAGFAMLTTQVATACAALGWMFAEWIAKGKPSVLGIVSGAVAGLVAITPAAGFVGVAGALTIGVAAGVVCFWSATWLKHKLGYDDSLDAFGVHGVGGILGALLTGVFAVKDIGGVDGSLLLQAKGVAITLVYSGIVSFVLLKVIDLVIGLRVTEEEEREGLDVILHGEHVE

SEQ ID NO: 67461 - DNA, 1233 bp, Syntrophus aciditrophicus SB
  CDS (1)..(1233): transl_table=11
atgaatgcgggagatacagcttgggtgcttatatccaccgtactggtttttgtcatgacgcccggcctggcttttttctatggcggcctggtgcgtcggaaaaatgttctgtccattctcatgcagtgcttcatcatcatgtgcgtgatcagtctgcagtgggtcctgtacggatactcgctggccttcggcccggatacgggttgggggctcatcggcggtctttcgtgggtggggctctccggcgtgggaggttcgcccaacggcgattatgcgtcgaccattccccacctcgctttcatgatgtttcaggcgatgttcgccattatcacccccgcgctgatcatcggcgccttcgcggaaagggtcaggttctcggcttttctcgtgatgacggttctctgggccaccctggtctacgatccgctggctcactgggtctggggcagtggaggctggatgagaaacctgggagcgctcgatttcgcgggaggaatcgtggttcatgtcagttcggggatttccgccctggtcatggcgattctgctggggaaacggatcggctatgaaaaagagcctttccggccgcacaatctgccctttacggtcctgggaggcgcgctgctgtggttcggctggttcggcttcaatgcgggaagcgctctcggggcgaatgaactggcggccaatgcctttgtgacgaccaataccgcaacagcggccgccggcctgacctgggcactgatcgaatggcggctttccggcgccccgaccgtcctgggggccgtgaccggcgccgtggccggtctggtagccgtcacgccggcctgtggatttgtaaccccggtcaacgccatttttatcggggtgagcgtcagtgtgatctgctatgccgccatcgccgtcgtcaagggccggctgggttatgacgattccctggatgctttcggtgttcacggagtcggcggggcctggggaacgattgccaccggacttctcgcggaaaaggcggtcaatgccgccggggcggacggcctgtttttcggcggtctgcatcagtttcttgttcagttgatgctggtgggcgttaccgttctgtatgccggggtcgttaccttcatcctcttcaaggttgtggatgcccttctcggcatgaaagtggacaggaaaagtgaaatcctggggctggatctcagccagcaatgcgaatcggcctacacggtcgtcgattag

SEQ ID NO: 67462 - protein, 410 aa, Syntrophus aciditrophicus SB
MNAGDTAWVLISTVLVFVMTPGLAFFYGGLVRRKNVLSILMQCFIIMCVISLQWVLYGYSLAFGPDTGWGLIGGLSWVGLSGVGGSPNGDYASTIPHLAFMMFQAMFAIITPALIIGAFAERVRFSAFLVMTVLWATLVYDPLAHWVWGSGGWMRNLGALDFAGGIVVHVSSGISALVMAILLGKRIGYEKEPFRPHNLPFTVLGGALLWFGWFGFNAGSALGANELAANAFVTTNTATAAAGLTWALIEWRLSGAPTVLGAVTGAVAGLVAVTPACGFVTPVNAIFIGVSVSVICYAAIAVVKGRLGYDDSLDAFGVHGVGGAWGTIATGLLAEKAVNAAGADGLFFGGLHQFLVQLMLVGVTVLYAGVVTFILFKVVDALLGMKVDRKSEILGLDLSQQCESAYTVVD

SEQ ID NO: 67463 - DNA, 1290 bp, Frankia sp. CcI3
  CDS (1)..(1290): transl_table=11
atggacaaattgaattcgggcgataccgcgtggatgctcatcagttccgcgatcgtgctgttcatgacgcccggactggcgttcttctacggtggcatggtccgagcgaagaacgtgctcggaatgatcatgcagaacttcttctgcatcgggatcgtcacgctgatctggtcggtcatcgggttcagcgtcgcgttcggcgagggtaacggcttctggggcggattcgacttcttcgctctccaggacctctccggcagcgacggcgcgatcccgtacgtcgtgttcgtcgccttccagctgatgttcgcgatcatcacgcccgccctcatcaccggcgcgatcgccgatcgcatgaagttcagcgccttcgcgatcttcatcccgctctggtcgctgctggtctactcgccgatcgcacactgggtgtgggcgagcaagggctggttgttcgagcgcggcgcgatggacttcgcgggcggcacggtcgtccacgccaacgccggtatcgcggcgatcgtgctggcgctggtcctcggcaagcgggccggttggccgaccggcgacttccgcccccacaacgtcccgttcgttctcctgggcaccggcatcctgtgggtcggatggttcgggttcaacgcgggttccgcgctgggcgccaacaaggtcgccggatacgccctgctcaacacccagatcgcgaccggcgtcgcgatcctcggatggctcgcggtcgagcagctgcgcgacggcaaggcgaccaccctgggagccgcctccggcgcggtcgcgggtctggtggccatcaccccggcctgtggtttcgtctctccgatgggttcgatcgccatcggcggcatcgccggcgtcgtctgcgccctggccacctcgatcaagggcaaggtcggcatcgacgactcgctcgacgtcggtgcggtccacctggtcggcggtgtgctcggagccctgctgaccggcctcttcgccaccgtcgacacgaacgaggccggcaaggacggtgtcttctacggcggcccgtggagcgtcttcggggaacaggcgctcgccgtcggcgcgacgctgggctactcggccgtcgtgacggcgatcatcgctctcgccctgaagtacaccatcggtctccggctgaacgccgacgacgagatcgccggcatggacgaggcgttgcacggggagacggcgtaccgcttcacgtccatcggcggtagcggctcgctgtccacgagcagcatcagccccgtcaaggtgcccgaggaggcccaggcatga

SEQ ID NO: 67464 - protein, 429 aa, Frankia sp. CcI3
MDKLNSGDTAWMLISSAIVLFMTPGLAFFYGGMVRAKNVLGMIMQNFFCIGIVTLIWSVIGFSVAFGEGNGFWGGFDFFALQDLSGSDGAIPYVVFVAFQLMFAIITPALITGAIADRMKFSAFAIFIPLWSLLVYSPIAHWVWASKGWLFERGAMDFAGGTVVHANAGIAAIVLALVLGKRAGWPTGDFRPHNVPFVLLGTGILWVGWFGFNAGSALGANKVAGYALLNTQIATGVAILGWLAVEQLRDGKATTLGAASGAVAGLVAITPACGFVSPMGSIAIGGIAGVVCALATSIKGKVGIDDSLDVGAVHLVGGVLGALLTGLFATVDTNEAGKDGVFYGGPWSVFGEQALAVGATLGYSAVVTAIIALALKYTIGLRLNADDEIAGMDEALHGETAYRFTSIGGSGSLSTSSISPVKVPEEAQA

SEQ ID NO: 67465 - DNA, 1314 bp, Novosphingobium aromaticivorans DSM 12444
  CDS (1)..(1314): transl_table=11
atgcggaaatatctggcgacggcgcttgccgccaccgtggcgttgcttccggttctggcacacgcgcaaacaggcgctgtcagcgtcgaagacgtggccgacaccggcgacacggcttggatcctcgtctcctcggccttcgtcctgatgatggcgatgccgggcctcaccctcttctacggcggcctcgtccgcgccaagggcttccttgccgtcctcgtccaggtcggcgcgatcgccgccgtggcttcggtcctctgggtcgcggtcggatacacgcttgccttcggtgacgtgtcgggcggctggatcggtggcggaaatgcgtggatgctgctgaacctcggcaacgtccgagccaacaccgccattccggaaagcgccttcgcgctgttccagatgtgtttcgcactcatcacgcccgcgctgatggtcggcgcctgggtggaccgcgcacgcttcggctgggtcgtggccttctccgccctgtggagccttatcgtctacgcgccggttgcccactgggtctggggcggcggctggcttgccacccggttcggcacactcgatttcgccggcggcatcgtggtccacaccacggccggtgtctcggcgctcgtcgtcgccatgctcctcggcaagcgcgccggcttcccccggacgctcatgctgccccacagcccctcgctgaccatggcgggcgccgcgctcctgtgggtgggctggttcggcttcaacggtggctccgcactggccgccaatgacgatgcagcctcggccatcatcaacacccacgtcgcggcctgcgtcgcggcacttgtatggctgatcatcgaaaagctcagcgtgggcaagccgacctcggtcggcttcgcgaccggcgcggtcgccggcctcgccacggttacccccgccgccgggttcatttcgcccggcgcggcaatgctcttcggcgccgccgccgcatgcgtctgctatccgatgatccagatcgtgaagcagcgcctcgagatcgacgattcgctcgatgtcttcgcggtccacggcgttggcggcatgatcggttcgcttcttctggcggtcttcctcgcgccctccttcggcggcacgggctatgccgatggcatgaacctcgcgcgccaggccgtcgcccagtttgccggtgtcggcatcgtcgcggcatggagcgcgtttgccaccgtcatctgcgccctcatggtatcgatggtcattccgatgcgcgtgaccgaggacgaggaacgcgaaggcctcgacatcaccagccacggcgaacgcgcctgggaattcgattga

SEQ ID NO: 67466 - protein, 437 aa, Novosphingobium aromaticivorans DSM 12444
MRKYLATALAATVALLPVLAHAQTGAVSVEDVADTGDTAWILVSSAFVLMMAMPGLTLFYGGLVRAKGFLAVLVQVGAIAAVASVLWVAVGYTLAFGDVSGGWIGGGNAWMLLNLGNVRANTAIPESAFALFQMCFALITPALMVGAWVDRARFGWVVAFSALWSLIVYAPVAHWVWGGGWLATRFGTLDFAGGIVVHTTAGVSALVVAMLLGKRAGFPRTLMLPHSPSLTMAGAALLWVGWFGFNGGSALAANDDAASAIINTHVAACVAALVWLIIEKLSVGKPTSVGFATGAVAGLATVTPAAGFISPGAAMLFGAAAACVCYPMIQIVKQRLEIDDSLDVFAVHGVGGMIGSLLLAVFLAPSFGGTGYADGMNLARQAVAQFAGVGIVAAWSAFATVICALMVSMVIPMRVTEDEEREGLDITSHGERAWEFD

SEQ ID NO: 67467 - DNA, 1386 bp, Desulfitobacterium hafniense Y51
  CDS (1)..(1386): transl_table=11
atgaaaagagtatgggtattattattagcgattataagcatgttggctctgcctgttgcagttttggcggaagatggtgctgtggtggatacaggggacaccagcttcattattttatcagcggccctggtttttctcatgacccccggcctggcgttattctatggcggtatggttcgtaaaaagaatgttctgagtacggtgatgcatagttttattctcatgggtgtatcttccgtactttgggtgttgatcggctttagcttggcctttggtacagaccatgccggtattatcggaagtttagagtggattggcctcagcggtgtcggtatggaacctaatggagattactcctcgaccatccccttcctcttattcatggccttccaaatgatgtttaccatcattactccggcaattatctcgggttctgttgctgaacgcatgcggttcccggcctttctgggatttatggttctgtggttgttggttgtctattatcccctggctcactcggtatggggtgtgggtggtttcctgcgtgaaatgggagcattggattttgcaggcggaactgttgtgcatatcagctcaggggttaccggtttagtcgctgctttaatcctgggcaaacgcaaagggcatggcaaagaacctatggctcctcatcaattgcctatgacggttttaggggcaggtctgctctggtttggctggtttggctttaatgccggcagtgccttaggcgccaatggattagccgccatggctctggtcacgaccaatacttcagctgccgccggtgctttagcctggatggccacagaatggatgcaccgtggtaagcccaccattttgggcgcagccagtggtgccattgcagggcttgtagcgattaccccaggagcaggtttcgtcactcccatgtcctctctggtgattggcctcgtcggtggagccatttgctacttcggagtcagtgttcttaaggcaaaacttggctatgatgattctttggatgctttcggttgtcatggaatcggtggaatctggggagctctggcaacgggtatcttcgcttcggcttctgtggggggaactgacggattgttgtatggaaatgcagctcaggtagggattcaagccatcggtgttgctgtaactattgttctggcagtcgttgccacatttataattatgaagctggtcggtatattcacacccttgcgggttactgctgaagaagaagagatgggcctggacatctccctccatggcgaagaggcttaccccgactttatcggcagtggttatcttcccacaattgtatcggctgccaaagcagtcagtgtttccacacccagcggtcagccgggaaaatag

SEQ ID NO: 67468 - protein, 461 aa, Desulfitobacterium hafniense Y51
MKRVWVLLLAIISMLALPVAVLAEDGAVVDTGDTSFIILSAALVFLMTPGLALFYGGMVRKKNVLSTVMHSFILMGVSSVLWVLIGFSLAFGTDHAGIIGSLEWIGLSGVGMEPNGDYSSTIPFLLFMAFQMMFTIITPAIISGSVAERMRFPAFLGFMVLWLLVVYYPLAHSVWGVGGFLREMGALDFAGGTVVHISSGVTGLVAALILGKRKGHGKEPMAPHQLPMTVLGAGLLWFGWFGFNAGSALGANGLAAMALVTTNTSAAAGALAWMATEWMHRGKPTILGAASGAIAGLVAITPGAGFVTPMSSLVIGLVGGAICYFGVSVLKAKLGYDDSLDAFGCHGIGGIWGALATGIFASASVGGTDGLLYGNAAQVGIQAIGVAVTIVLAVVATFIIMKLVGIFTPLRVTAEEEEMGLDISLHGEEAYPDFIGSGYLPTIVSAAKAVSVSTPSGQPGK

SEQ ID NO: 67469 - DNA, 1296 bp, Saccharophagus degradans 2-40
  CDS (1)..(1296): transl_table=11
atgaaaccccttcttcgcacgttgccattggcagcactgctattgccaagtattgccttagcagatgacttaaatggtgcaaacaccgcatggatacttaccgctactgctttagtactctttatgacgttgcccggcctgtcgcttttttacggcggtttggtgcgcacaaaaaatgtactaagtgtgcttatgcaatgcttcgccattgcgtgtatcgcatcgttaatttggtttgcattcggctatagcctcgctttctctgaaggcaatatgattattggagacctaagcaaagccttttttaatggcatgggtaaaaattcaatgtctggcgatatacccgagccactctttgctatgtttcaaatgacctttgtgattatcacccctgcgttaattgtgggtgcatttgcagagcgtatgaagttctcttcggtgctcatttctaccgttttatggatacctcttgtttacgcacctgtttgtcattgggtgtggggcggcggttggttagctagccagtttggtgtactcgactttgccggcggtactgttgtgcatattactgcgggtgtagctgcactggtaactgcacttatgattggcaatcgtaatggttttccacatacgccgatgcccccgcataacatgacaatgaccgtaacaggcgcgggtatgttgtgggtaggctggttcggttttaacgctggtagtgcgctaagcgcgggtggcgatgccgccatggcaatgctggttacgcacatatctgctgctgccggttcgttagcatggatgaccatcgaatggctcaagtttggtaagccaagcgtgttgggtattgttaccggtatggttgcaggtttaggtactattacacctgcgtctgggtttgttggccctggtggtgcgttagtcattggtataaccgctggtgtagtgtgtttttatgccacccagttaatcaaacgcaaactagttattgatgactctcttgacgttttcccagtgcacggcgttggcggtattttgggtactatgcttgccggtgtatttgcctctacaagtattggtgctttctctggccacggtttcgcagatggaatagaaacaatgggtgcgcaggtttggtctcagtttgtgggtgtcattactactattgtgttcacagcggttatgacctacatcatcattaaagttaccggttggattacaggcggtatacgtgtcgacaaagatgaagagacccaagggttagacttagtattacacgacgaagcaggttataaactttaa

SEQ ID NO: 67470 - protein, 431 aa, Saccharophagus degradans 2-40
MKPLLRTLPLAALLLPSIALADDLNGANTAWILTATALVLFMTLPGLSLFYGGLVRTKNVLSVLMQCFAIACIASLIWFAFGYSLAFSEGNMIIGDLSKAFFNGMGKNSMSGDIPEPLFAMFQMTFVIITPALIVGAFAERMKFSSVLISTVLWIPLVYAPVCHWVWGGGWLASQFGVLDFAGGTVVHITAGVAALVTALMIGNRNGFPHTPMPPHNMTMTVTGAGMLWVGWFGFNAGSALSAGGDAAMAMLVTHISAAAGSLAWMTIEWLKFGKPSVLGIVTGMVAGLGTITPASGFVGPGGALVIGITAGVVCFYATQLIKRKLVIDDSLDVFPVHGVGGILGTMLAGVFASTSIGAFSGHGFADGIETMGAQVWSQFVGVITTIVFTAVMTYIIIKVTGWITGGIRVDKDEETQGLDLVLHDEAGYKL

SEQ ID NO: 67471 - DNA, 1500 bp, Burkholderia xenovorans LB400
  CDS (1)..(1500): transl_table=11
atgcgcaaattattgatgtccttgctgatggccggttcgctgctcgcgggcggtatcggcgctgctctcgcggacgacgcgtccgctcccgcagccgcctcggctcccgatgcgacggcgagcgccccggcaccggacgcttcggcggcacccgctgccgccgccgcttcggcacccgccgccgatgcatccgccgcaccggctgccagcgcggccgccgcacctgctgcatcggacgccgcgccggccgcgccgaccgcaccgttctccgtcgattcctcgaagatcaattccggcgacaccgcctggatgctgacttccaccgccctcgtgctgttcatgacgatcccgggtctggcactgttctacggcggcatggtccgcaagaagaacgtgctcgcgatcctgatgcaaagcttcgcgatcacctgcgtggtgacgatcgtctggatcgtgatcggctacagccttgccttcacgccgggcagttcgttcatcggcggcttctcgcgcgtcttcatggcgggcatgagctacatcaagggcgacaaggccacgacgctgaccgtcagccatctggccccgacgatcccggaaacggtctattgcgtctatcagatgacgttcgcgatcatcaccccggcactgatcacgggcgcgtttgccgaccgtatgaagttctcggcgatgctggtgttcatgacgctgtggtcgatcatcgtctactcgccgatcgcacacatggtctgggaaccgaccggctggctggctagcgcgggcatcctcgacttcgcgggcggcacggtggtgcacatcaacgccggtattgcggcgctggtctgcgcgctggtcctcggcaagcgtatcggctacggcaaggaagcgatggcgccgcacaacctgacgctcacgctgatcggcggcgccatgctgtgggtgggctggttcggcttcaacgcgggttcggcagtggcggctgacggccgtgccggtttcgcgatgttcgcaacccaggtggcaactgccgcggcagcactcgcctggatgttcgctgaatgggccgccaagggtaagccgtcggtgctcggtatcgtgtcgggcgcagtggcaggtctggtggcgatcacgccggcttcgggcttcgtcggtacgctcggctcgctggtgatcggtatcgtggcaggcgtggtctgcttctggtcggcaacgtggctcaagcacaagctcggctacgacgattcgctcgacgcgttcggcgtgcactgcatcggcggtatcgtgggtgcgctcctgaccggcgtgttcgcggtcaaggacatcggcggcgcggacggcagcgtcatcctgcaagccaagggcgtgctgacgacgctgatctacagcggcgtggtgagctacatcctgctgaagatcatcgacatggtgatgggcattcgcgtgacggaagaacaggaacgcgaaggtctggacgtgagcctgcacggcgaacacgtcgagtaa

SEQ ID NO: 67472 - protein, 499 aa, Burkholderia xenovorans LB400
MRKLLMSLLMAGSLLAGGIGAALADDASAPAAASAPDATASAPAPDASAAPAAAAASAPAADASAAPAASAAAAPAASDAAPAAPTAPFSVDSSKINSGDTAWMLTSTALVLFMTIPGLALFYGGMVRKKNVLAILMQSFAITCVVTIVWIVIGYSLAFTPGSSFIGGFSRVFMAGMSYIKGDKATTLTVSHLAPTIPETVYCVYQMTFAIITPALITGAFADRMKFSAMLVFMTLWSIIVYSPIAHMVWEPTGWLASAGILDFAGGTVVHINAGIAALVCALVLGKRIGYGKEAMAPHNLTLTLIGGAMLWVGWFGFNAGSAVAADGRAGFAMFATQVATAAAALAWMFAEWAAKGKPSVLGIVSGAVAGLVAITPASGFVGTLGSLVIGIVAGVVCFWSATWLKHKLGYDDSLDAFGVHCIGGIVGALLTGVFAVKDIGGADGSVILQAKGVLTTLIYSGVVSYILLKIIDMVMGIRVTEEQEREGLDVSLHGEHVE

SEQ ID NO: 67473 - DNA, 1533 bp, Ralstonia metallidurans CH34
  CDS (1)..(1533): transl_table=11
atgaaaacctggttcaagcgaatcctgacggccggcgcgatgacgctggcgctcggcacggccggtctcggcctctccacccacgccgtggcgcaggacaagcccgccgcggaagcatcggccgcgacggcgtccgcaacccccgcagccgccgttgcagcaccggctgcggccacgcctgccgcggcgcccgccgaagctgccgccgcgccggctgccccggtgcccaacaagggcgacacggcctggctgctggtctccaccacattcgtgatcctgatgacgctgccgggcctggcgctgttctacggtggcctggtccgctcgaagaacatgctgtcggtgctgatgcagtgcctgatgatcttctcggtgatctcgatcctgtgggccatctacggctatagcttcgcgttcacggagggcaacgccttcttcggtggcacggaccgtctgttcatgaagggcctgacggtcgatgccgtggccgccacgttcagcaagggcgtggtggtgccggaactgggctacttcgcgttccagtgcgcgttcgcggcgatcacttgcagcctgatcatcggcgccttcgccgagcgcgccaagttctcagcggtgctggtcttcgtggtcctctggttcacgttcgcctacatcccgatggcccacatggtctggttctggcccggcccggatgcgtacaccgacgccgccgcaggcaccgccgccaccgccaaggccggctggctgttccagaagggcgcgctcgatttcgcgggcggcacggtggtgcacatcaacgcggccgtggccggtctggtgggcgcgttcatgttcggcaagcgcatcggcttcggtcgtgaagcgatccgcccgcacagcctgaccttcacgatggtgggcgcctcgctgctgtggttcggctggttcggcttcaacgccggttcggccctggaagccaacggcagcgccgcgctggccttcgtcaacacgctgttggccacggccgccgcggtggtttcctggaccttcggcgagtggatcggcaagggcaagccgtcgatgctcggtggcgcctcgggggctgtcgccggcctggtggcgattaccccggccgccggcttcgttggcccgatgggctcgatcgcgatgggcctgatcgccggcctgctgtgcctgtggggcgtgaccggtctgaagcgcctgctgggcatggacgattcgctggacgtgttcggtgtgcacggcgtgggcggtattctcggcgcgctgctgaccggtgtgttcgccgcgccgagcctgggcggtacgggcatctatgactacgttgccaacaaggtggccgacgactactcgatcgccggtcaggtctggatccagttcgaaggtgtgctgaccacgatcgtctggtccggcgtggtcgcgctggtggcctacaagctgatcgatatgctgattggcctgcgcgtgccggaagaggaagagcgcgaaggtctggatatcacctcgcacggtgaaaccgcgtatgaggtctga

SEQ ID NO: 67474 - protein, 510 aa, Ralstonia metallidurans CH34
MKTWFKRILTAGAMTLALGTAGLGLSTHAVAQDKPAAEASAATASATPAAAVAAPAAATPAAAPAEAAAAPAAPVPNKGDTAWLLVSTTFVILMTLPGLALFYGGLVRSKNMLSVLMQCLMIFSVISILWAIYGYSFAFTEGNAFFGGTDRLFMKGLTVDAVAATFSKGVVVPELGYFAFQCAFAAITCSLIIGAFAERAKFSAVLVFVVLWFTFAYIPMAHMVWFWPGPDAYTDAAAGTAATAKAGWLFQKGALDFAGGTVVHINAAVAGLVGAFMFGKRIGFGREAIRPHSLTFTMVGASLLWFGWFGFNAGSALEANGSAALAFVNTLLATAAAVVSWTFGEWIGKGKPSMLGGASGAVAGLVAITPAAGFVGPMGSIAMGLIAGLLCLWGVTGLKRLLGMDDSLDVFGVHGVGGILGALLTGVFAAPSLGGTGIYDYVANKVADDYSIAGQVWIQFEGVLTTIVWSGVVALVAYKLIDMLIGLRVPEEEEREGLDITSHGETAYEV

SEQ ID NO: 67475 - DNA, 1419 bp, Acidobacteria bacterium Ellin345
  CDS (1)..(1419): transl_table=11
atgcgtcgagtggttgcgaaacttcttctcggtctaaccttgctcgctttcgctgcgccgctggtgagcgcgcaaaccgctgcaacgcctccagatcgaatcgctcaactagaagccaaagttaccgatgccaagaattcggcggacaacgcctggatgctggtttgcgccgccctggtactgatgatgactgcgccgggactggcgctgttctatggtggcctggtgcgcaaaaagaacgtgctggcgacgatgctgcagagcttctcgatgatggcgatcatcaccgttctgtgggcgttgatcttgtatagcctggcgttcggctcgggaagttcgttcatcggcggctggcacaacgcgtttttgcacggcgtggggctggcccccgacacggattatgcgccgaccattccggcgcagacgttcatgatttaccagctgatgttcgcgatcattacgccggcgctgatcaccggcgcattcgcggaacggatgaagttcagcgcgatggcagtgttcatggtgctgtggtctctgattgtttacgcaccgatggcgcacatggtttgggggaagggcggactgctgaacgcttcgctgggcggcaggttcccgaccctggatttcgcgggtggaacggtggtgcacataacttccggtgtctcggcactggtgtgcgcgctgtatctcgggaagcgtattggatatccgaaggagccgatgccgccgcatagcgtggtgctgagctttattggcgcaggattgctttgggtgggctggtttggatttaacgcgggcagtgcgctatcggcgggaacgctggcgacgagcgcgtttgtggcgacccactttggcgcggcggcggcggtgattggctggtcggcggcagagtggctccacaacggcaagccgactacgctgggcgcgatctcgggcgcggtggcggggctggtggcgattacaccggcggcgggcttcgtcagccctatgtcagcgctgtttatcggcctgctggcaggtgccttctgcttcacgatggtcgccttcgcgaaagcgaagttcggctatgacgattcgctggacgccttcggcgtacacggcgcgggcggaacgctcggtgcaatcctgactggcgtgttcgcgtcgagcgcgatcaacccgatgttcaaggatgcgaggggcaatcccctaccctcgggtttcatcgaaggcaattatcgccagctattgaaccagggcgtgggcgtggtgattgcgtggagcctggctatcgtgggaacactcgcgattctgttcctggtggacaaattgatcggcctgcgcgtgagtgaagaacacgaggttgcaggactggatatttcgctgcacggcgaagagggctattactgggaagcttccatgagtcaaaattcgtag

SEQ ID NO: 67476 - protein, 472 aa, Acidobacteria bacterium Ellin345
MRRVVAKLLLGLTLLAFAAPLVSAQTAATPPDRIAQLEAKVTDAKNSADNAWMLVCAALVLMMTAPGLALFYGGLVRKKNVLATMLQSFSMMAIITVLWALILYSLAFGSGSSFIGGWHNAFLHGVGLAPDTDYAPTIPAQTFMIYQLMFAIITPALITGAFAERMKFSAMAVFMVLWSLIVYAPMAHMVWGKGGLLNASLGGRFPTLDFAGGTVVHITSGVSALVCALYLGKRIGYPKEPMPPHSVVLSFIGAGLLWVGWFGFNAGSALSAGTLATSAFVATHFGAAAAVIGWSAAEWLHNGKPTTLGAISGAVAGLVAITPAAGFVSPMSALFIGLLAGAFCFTMVAFAKAKFGYDDSLDAFGVHGAGGTLGAILTGVFASSAINPMFKDARGNPLPSGFIEGNYRQLLNQGVGVVIAWSLAIVGTLAILFLVDKLIGLRVSEEHEVAGLDISLHGEEGYYWEASMSQNS

SEQ ID NO: 67477 - DNA, 1392 bp, Myxococcus xanthus DK 1622
  CDS (1)..(1392): transl_table=11
atgaagaagtggttcgcgatggcccttctcgtgggtgtgggtgtgacggggttgctggtcgaaccggcggcgcagttgaagcaaggggggcccatcgacacctcggacacggcgtggatcctcacagccacggcgctggtcctgctgatgacgccgggactgtccttcttctacggcggcatggtgcggctgaagaacgtggtgtccacgctgctgcagagcttcatcgccatggcggtcatcagcctgatctgggtggtggtgggcttcagcctgtgcttcggcgacagcttccatgggctcatcggcgacccgcgaaccttcttcatgttcagcggcgtgggcggtgagacgcacccggacctggcacccaccatccccttgatgctgttcgcgctgttccagctcaagttcgccatcatcaccccggcgctcatcaccggcgcgttcgcggagcgcgtgcgcttcaaggcgtacgtgctcttcatggtgctcttcacgctcgtcatctacgcgccgctggcgcactggacgtggcacccggagggcttcctccgtcagtggggcgtgctcgacttcgcgggcggcacggtggtgcacatgtccgcgggcttcgcggcgctggctggcgcgctggtgctgggccgccgcaaggtgcacgtggagaacacgacgcacgcgcccgccaacatccccttcgtgatgctgggcacgggcatgctgtggttcggctggttcggcttcaacgcgggctcggcgatgtcggcctcgtcgctggccacgctggccttcgccaccaccaacacggcgtccgcggcggcgatgctgggatggattgccttcgactggctgcgcggccgcaagcccagcgccatgggcgcgtgcatcggcgcggtggtgggcctggtcgcggtgacgcccgcggccggcttcatcaccgtggggcagagcatcttcgtgggtctggtcgccagcttcgtgagcaacgcggcggtgcacttcaagaaccgcacccccgttgatgacacgctggacgtcttcccctgccacggactgggcggcgtggtgggcatggtgctgacgggcgtgctggccaaggacgtgggcctcatccacggcgagacgcgcaccttcatgatgcacatgctggcgctggtgctggtgtcggtgttctccttcgccggctcgttcctgctctacaagttggtggaccgcatcgtcccgctgcgcgtcacccgcgagcacgaggaagaaggcctggacctgagccagcacggcgagacggtgggcgagtccatcatcgcggccgcgccacagcccgcgctcaccgcgacgacggcggtcgccaccgagccagcgccggacgcatcccgcctgcctcagccagcctga

SEQ ID NO: 67478 - protein, 463 aa, Myxococcus xanthus DK 1622
MKKWFAMALLVGVGVTGLLVEPAAQLKQGGPIDTSDTAWILTATALVLLMTPGLSFFYGGMVRLKNVVSTLLQSFIAMAVISLIWVVVGFSLCFGDSFHGLIGDPRTFFMFSGVGGETHPDLAPTIPLMLFALFQLKFAIITPALITGAFAERVRFKAYVLFMVLFTLVIYAPLAHWTWHPEGFLRQWGVLDFAGGTVVHMSAGFAALAGALVLGRRKVHVENTTHAPANIPFVMLGTGMLWFGWFGFNAGSAMSASSLATLAFATTNTASAAAMLGWIAFDWLRGRKPSAMGACIGAVVGLVAVTPAAGFITVGQSIFVGLVASFVSNAAVHFKNRTPVDDTLDVFPCHGLGGVVGMVLTGVLAKDVGLIHGETRTFMMHMLALVLVSVFSFAGSFLLYKLVDRIVPLRVTREHEEEGLDLSQHGETVGESIIAAAPQPALTATTAVATEPAPDASRLPQPA

SEQ ID NO: 67479 - DNA, 1353 bp, Rhodococcus sp. RHA1
  CDS (1)..(1353): transl_table=11
atgaacgaagcagtcgctgcggccgataccgcctggattctggcggccttcacggcagtgagcctcatggtgcccggtctggccatgttctacggcggaatggtcagcgtgcgcaacaccctcaacatggccatgatgacgttcggcgcgttcgccgtcgtcggcgtcctgtggatcgtgttcggctactccgccgtgctgggtaactccctcggcggtctcggcgtcctgggcgaccccctcgagtacttcggctccagctcgctgctggaggcccccgccgaacccggactgccgcccgcgctggtctccggattccagctgttgttcgccggcatcaccgtcgcgctcatctccggagcgctggccgaccggatgaagttcggtgcctggatggtgttcgccggactgtgggccacgttcgtctacttccccgtcgcccactgggtgttcgcgttcgactccgaggacgggtcggtgatcggtggatggatcgcaaacacgctcggcgccgtcgacttcgccggcggcacggccgtgcatatcaatgccggcgtggccgctctcgcggtcgtcctggtcctcggggcccgcaagacgttccccgtctcgccgcgcccgcacagccttcccctgaccatgctcggcgcgggaatcctgttcttcggttggttcgggttcaacggtggctcggctctgtccgccggaaacagtgcatccgtcgtcatcctcaacacggtcgccgcgtcgtgcgccggtatctgcgcctggctcgtcgtcgagaaactgcgcgaaggccacgccacgtcgctgggcgccgcgtcgggtctgattgcggcgctggttgccatcacgccggcctgtggcgccgtctcacccctcggcgcgctcgtcgtgggaggcgcggccggcgcggtctgctgcttcgcggtctcctggaagtaccggctcggctacgacgacgcactcgacgtcgtcggcgtgcacctggtcggcggcatcctcggtaccgttctgatcggtttcctcgcagatccggctgctcccagcggcgccgcgggactcttctacggcggtggcgtcgacgtcctgtggcgccaatgtgtcgccgtggcagccgttctcgcgtactccttcgtcgtcacgctcgtgatcgtcctcgcactgaagaaattcatgggcattcgcgccgaccaggacagcgaatacgacggcctcgacgtgtccgtccacggcgagacggcctacgtactcgatgccgtcggcctcaccggcgcctccaagcacggcgccgacgcggttctcggcgcagaagcgatcacgaccagggctgcggaccctgccaaggcctga

SEQ ID NO: 67480 - protein, 450 aa, Rhodococcus sp. RHA1
MNEAVAAADTAWILAAFTAVSLMVPGLAMFYGGMVSVRNTLNMAMMTFGAFAVVGVLWIVFGYSAVLGNSLGGLGVLGDPLEYFGSSSLLEAPAEPGLPPALVSGFQLLFAGITVALISGALADRMKFGAWMVFAGLWATFVYFPVAHWVFAFDSEDGSVIGGWIANTLGAVDFAGGTAVHINAGVAALAVVLVLGARKTFPVSPRPHSLPLTMLGAGILFFGWFGFNGGSALSAGNSASVVILNTVAASCAGICAWLVVEKLREGHATSLGAASGLIAALVAITPACGAVSPLGALVVGGAAGAVCCFAVSWKYRLGYDDALDVVGVHLVGGILGTVLIGFLADPAAPSGAAGLFYGGGVDVLWRQCVAVAAVLAYSFVVTLVIVLALKKFMGIRADQDSEYDGLDVSVHGETAYVLDAVGLTGASKHGADAVLGAEAITTRAADPAKA

SEQ ID NO: 67481 - DNA, 1347 bp, Rhodococcus sp. RHA1
  CDS (1)..(1347): transl_table=11
gtgcctgcaatcgacgccggagcaaccgcctggcttctgatcagtaccgcgctggtccttctgatgacgccggggctcgccctgttctacggcggaatggtccgttccaccggcgtactgaacatgatcatgatgagcttcgtgtcgatcgcgctggtcacggtcgcgtggctggtggccgggtactccctcatcttcggtgacgacatcggcggcggactgatcggcgggctggagcacctggggatggtgggcatcgaccccaccaccgtccacgggcaggtgcccgagatcctgttcgccacgttccagctgacgttcgcgatcatcaccgccgcactgatcagcggtgcgatcgccgatcgggccaagttctcggcctggatgatcttcgtgcccgtctgggccctcgtcgtctacgcacccgtcgcgcactgggtgtggaacccgcagggctggatcgcgcagttcggtgccctcgactacgcgggcggactggtcgtcgagatcgtgtccggagcgtcgggcctggcgttggcgctggtcctgggcccgcgtctcggtttccggtccgagtcgatgcgtccccacaaccttccgctggtgttgctgggcgtcggcctgctgtggttcggctggttcggtttcaacgccggctccgcgctcgccgccgacggcaccgccgccgcgatcttcctgaacaccctcgtcgccgggtgcaccggtctgctcggctggctgctcgtcgaacagaagcgggacggtcaccccaccacgttcggtgcggcgtccggcgtcgtcgccggcctggtcgcgatcaccccgtcctgcggcaccgtgagcatggtcggggcactcgtcgtcggcgccgtcgccggtgtggtctgctcgttcgccgtcggctggaagttccgtgtcgggtacgacgactcgctcgatgtcgtgggagtccacctgatgggcggcatcgtcggcaccctcctgatcggactgctggccaccgaggtcatgaccagcggaccggaaggcctcttctacgggggcgggttcgcgcaactcggtaagcaggtgctcgccgtggtggtcgtcgccttgtacgcgttcggcgtgacgtacgcgctgggcaaactgatcgaccggatcttcgggttccgggtgagcgcggaggacgagtcgtccggcatcgacctcgcgttgcacgccgaatcggcgtacgaacacggtgtgctcgggcacggtccgggcggcggtggtcagggcaacagtgtcttcccgtggatgcacgaggccgaacgccggcggcacctggacgccgaacggaagcagaacccctccgattccgagtag

SEQ ID NO: 67482 - protein, 448 aa, Rhodococcus sp. RHA1
MPAIDAGATAWLLISTALVLLMTPGLALFYGGMVRSTGVLNMIMMSFVSIALVTVAWLVAGYSLIFGDDIGGGLIGGLEHLGMVGIDPTTVHGQVPEILFATFQLTFAIITAALISGAIADRAKFSAWMIFVPVWALVVYAPVAHWVWNPQGWIAQFGALDYAGGLVVEIVSGASGLALALVLGPRLGFRSESMRPHNLPLVLLGVGLLWFGWFGFNAGSALAADGTAAAIFLNTLVAGCTGLLGWLLVEQKRDGHPTTFGAASGVVAGLVAITPSCGTVSMVGALVVGAVAGVVCSFAVGWKFRVGYDDSLDVVGVHLMGGIVGTLLIGLLATEVMTSGPEGLFYGGGFAQLGKQVLAVVVVALYAFGVTYALGKLIDRIFGFRVSAEDESSGIDLALHAESAYEHGVLGHGPGGGGQGNSVFPWMHEAERRRHLDAERKQNPSDSE

SEQ ID NO: 67483 - DNA, 1401 bp, Shewanella sp. MR-4
  CDS (1)..(1401): transl_table=11
atgacccaacagacaaccgcacttaacgctaagctccagcacggcacgaatacccaaatcagcctgcacactaagctcgctcagccaaacgcccgttattcaaaattgggttatcaggcattattggcgctgttcgccagcggctttgcaggcacggctttggccgatgaggcgcagctcagcggcgccaacactgcctggattttaagctcatctgccctagtcctattgatgacactcccagggctggcgctgttttacggcggtctggtgcgcagtaaaaacgtgctatcgattttaatgcagtgtttttctatcgccgctatcgcctccgtgctgtggtttgtggtgggttactctatcgccttcgataccggcaacggttttatcggcgggcttggcaaagcttttctagccagcattggtcgcgatagtgtcagtggggatattcccgaacctttatttatgcttttccaaatgaccttcgcgattatcacgccagcgctgatcatcggtggctttgccgagcggatgagattctccgctgtactgatgttttcaagcgcttggttgctgttagtctatgcacctatcacccactgggtgtggggcggcggctggttggccgagcttggcctgtatgactttgcaggcggtacagtcgtacacattactgctggggtagcggcactggtggcggcaaaagtgttagggccgcgtaagggattcttaaactcggccattatgccccataacttgaccatgacagtgacaggcgcgggcatgttgtgggtaggctggtttggctttaatggcggcagcgctttaggcgccaatggcactgcggccatggcgattctcgcgacccatctagccgcgtcgatgggcgccatcacgtgggcaggtatcgagtggtataaattcggtaaggccagtgcactcggtatcgtcaccggcatggtggcaggccttggcactatcactcctgcatcgggttatgtcggccctgctggcgcgttagttatcggttttcttggcggcgtggtctgcttcttttcaactgtgtacattaaacaaaagcttaagattgacgactcactcgatgtgttcccagtgcacggtgtcggcggtattctcggtactttgctggcgggagtatttagttcgactcagcttgggatcttcagcggttatggttttgccagtgtcaaccacactatgctcgaccaactcggggcgcaggccattggcgttatcgctacgttcagctatacagcgattgtaacgtggttattgtttgtggtgattggcaaaatcctcggtggacttcgcgtcagcacagagcaggaagtgaatggcctagacctttccgaacatgaagaaacaggctatagcctgtag

SEQ ID NO: 67484 - protein, 466 aa, Shewanella sp. MR-4
MTQQTTALNAKLQHGTNTQISLHTKLAQPNARYSKLGYQALLALFASGFAGTALADEAQLSGANTAWILSSSALVLLMTLPGLALFYGGLVRSKNVLSILMQCFSIAAIASVLWFVVGYSIAFDTGNGFIGGLGKAFLASIGRDSVSGDIPEPLFMLFQMTFAIITPALIIGGFAERMRFSAVLMFSSAWLLLVYAPITHWVWGGGWLAELGLYDFAGGTVVHITAGVAALVAAKVLGPRKGFLNSAIMPHNLTMTVTGAGMLWVGWFGFNGGSALGANGTAAMAILATHLAASMGAITWAGIEWYKFGKASALGIVTGMVAGLGTITPASGYVGPAGALVIGFLGGVVCFFSTVYIKQKLKIDDSLDVFPVHGVGGILGTLLAGVFSSTQLGIFSGYGFASVNHTMLDQLGAQAIGVIATFSYTAIVTWLLFVVIGKILGGLRVSTEQEVNGLDLSEHEETGYSL

SEQ ID NO: 67485 - DNA, 1197 bp, Leuconostoc mesenteroides subsp. mesenteroides ATCC 8293
  CDS (1)..(1197): transl_table=11
atgaacagtggtgatttagcatgggttttagtttcagctgcattagtctgggtaatgacacctggattagccttgttctacggtggcttaggtgagcgtagaaacttgttacacacgatgtttattccagttatgattattggaattgcttcgttagtatggtttgttgttggatatacgttatcatttggtggtagtggaaatgtgattggtaattttaaacatttgttcttaacgaatgtttcattcacgcattctactaaagatttaacaattcctgacggtgcatttgccctgttccaaggtatgtttccgataataacagccgcaattattactggatccgtcattggtcgagttagaattaaagcattgctcgtatttattgcactttggttgattttcatttactcaccgttagcgcacatggtttggggcggtggcttcttggctcagttaggcgcaattgattttgctggtggaactgttgttcatatttctagtggtgtaactggattggtgctggctttgatgattggacatcgtcatattgacaagcacatacctgtacgaccttcttatgttttgattggtggcgctttgttatgggttggatggtttggtttcaactctggatcagctcttgcagcaaatggcacagctgttctagcattagttaacacatggttagcatcagcggcagctgtattgacttggggtcttgttgaatataagtatcatggacgtgctacattatccggtattactagtggtggtgttgctggtctagttgctattacgcctgctgctggttttgtggcaccatgggcagctgtagtgatgggactcttagctggttttataggctttgctggtatcacatttgttaaaaatagttttggatatgatgatacattagatgcttttggtattcatggtattggcggcgccgtgggtgcaatattgacaggtgtatttgctgataaaagtgttggcggtgttgctggtctaatcaacgggaatatatcattggttggtaagcagttagtcgcaattttatttactatcgcatttgctgcgattggcacatatgttttagctaaaataacagaactcattgctgcaccactgcgtttgacagctgatgaagaagctgaaggttatgacgcaattatgcatgatttgactgtggaataa

SEQ ID NO: 67486 - protein, 398 aa, Leuconostoc mesenteroides subsp. mesenteroides ATCC 8293
MNSGDLAWVLVSAALVWVMTPGLALFYGGLGERRNLLHTMFIPVMIIGIASLVWFVVGYTLSFGGSGNVIGNFKHLFLTNVSFTHSTKDLTIPDGAFALFQGMFPIITAAIITGSVIGRVRIKALLVFIALWLIFIYSPLAHMVWGGGFLAQLGAIDFAGGTVVHISSGVTGLVLALMIGHRHIDKHIPVRPSYVLIGGALLWVGWFGFNSGSALAANGTAVLALVNTWLASAAAVLTWGLVEYKYHGRATLSGITSGGVAGLVAITPAAGFVAPWAAVVMGLLAGFIGFAGITFVKNSFGYDDTLDAFGIHGIGGAVGAILTGVFADKSVGGVAGLINGNISLVGKQLVAILFTIAFAAIGTYVLAKITELIAAPLRLTADEEAEGYDAIMHDLTVE

SEQ ID NO: 67487 - DNA, 1416 bp, Solibacter usitatus Ellin6076
  CDS (1)..(1416): transl_table=11
ttggcaaccctcgagattggtcccacgatgaaccattattcaaaactcactttagtttctgtacttgcagccaccgcggggttggcgcagaccgctccggatttgacaacgaaactggcggcgatggaagcagcgacgaagagcgcgcaaagcgccggcgacaatgcctggatgctggtcagttcggccctggtcctgatgatgaccgctcccggactggcgttgttctatggcggcctggtacgccgcaagaacgtgctgggcacgatgatgcacagctttatcctgatggcggtagtcacggtgatctgggctgtggcggggtacagcctggccttcggcggatcttcgccctatctggggaattttcagttcgcgttcctcgatggcgtaggcacggcgcctaacgccgattacgcggcgacgattccgcacgccacgttcatggtgtatcaactgatgttcgcgatcattacccccgcgctgatttcaggggctttcgccgagcgcatgaagttcagcgcgatgctgctcttcacggttctgtggacgctggtagtctacttcccgatggcccacatggtgtggggcaagggcggcctgctcaacgcattctcgggcgggaagatcccgtgcctcgattttgcgggtggcacggtggtccacatcaccagcggagtctcggcgttggtctgcgcgctgtacctgggcaagcgggtgggttatccctcgtcggcgatgaagccccataacctggtgatcagcaccatcggagccggcatgctgtgggtgggctggttcggcttcaacgcaggcagcgctctcgccgcttcgggcctcgcgaccagcgccttcgtcgcgacgcacttcggcgccgcggcggcaacccttgcgtggctggcggtggaatggatcgacgccggcaagccgagcatgctgggcgcgatttcgggctgcgtcgccggcctggtcgcgatcacgccggcctccggcttcgtgaagcccttcccggccatgatcatcggcgcctgcgcgggtctgctctgttacttcatggttacgcgcgtgaagcgtaagttcggttatgacgacgcgctggacgccttcggcgttcacggcgcgggcggcaccctgggcgcgatcctgaccggcgtgttcgccaccaatttcatcaacgacggtttgaagaatgccgctggccagccgcaggcgctcgggctggtggacggtaacggcggccaggtgatgaaccaaatcctgggtatcgcaatttcatggggcctggcgatcgtgggcacgctcgtgattctgaaattcgtggacgccgtgattggcgtgcgggtcacgaaggagcaggagagcgacgggctggatctcagcatgcacaacgaagaagggtacgttttcgagaattag

SEQ ID NO: 67488 - protein, 471 aa, Solibacter usitatus Ellin6076
MATLEIGPTMNHYSKLTLVSVLAATAGLAQTAPDLTTKLAAMEAATKSAQSAGDNAWMLVSSALVLMMTAPGLALFYGGLVRRKNVLGTMMHSFILMAVVTVIWAVAGYSLAFGGSSPYLGNFQFAFLDGVGTAPNADYAATIPHATFMVYQLMFAIITPALISGAFAERMKFSAMLLFTVLWTLVVYFPMAHMVWGKGGLLNAFSGGKIPCLDFAGGTVVHITSGVSALVCALYLGKRVGYPSSAMKPHNLVISTIGAGMLWVGWFGFNAGSALAASGLATSAFVATHFGAAAATLAWLAVEWIDAGKPSMLGAISGCVAGLVAITPASGFVKPFPAMIIGACAGLLCYFMVTRVKRKFGYDDALDAFGVHGAGGTLGAILTGVFATNFINDGLKNAAGQPQALGLVDGNGGQVMNQILGIAISWGLAIVGTLVILKFVDAVIGVRVTKEQESDGLDLSMHNEEGYVFEN

SEQ ID NO: 67489 - DNA, 1311 bp, Magnetococcus sp. MC-1
  CDS (1)..(1311): transl_table=11
atgatgcgtttctcatcacatctccttaagggcggcgctctatttgccctacttttaatcacgcccacgtgggcttgggccgccgaacaggggttggataaagccgataccgcctggatcttaaccaccaccgccttggtgctctttatgaccctgcccggcttggccctgttttatggcggcttggtgcgctctaaaaacattctctccatccttatgcagtgttttgccatcgcctgtttggtctcggtgctctggttggccgggggttacagtctggcctttgagcatggggggcccctcaatggtgtcatcggttcactgcaaaaagccttttttgcaggtgttgcccacaataccgtcaagggtagcctgcccgaaggggtgtttgccgcctttcaaatgacctttgccattattaccccagcgttggtgatcggtggttttgccgaacgcattcgatttgccgtcatcctgccctttacagcgctatggctattgttggtctacattccagtgtgtcattgggtctggggtggcggttggatgcaagctgccggggtgatggattttgccgggggtgtggtggtacacatcaccgccggggtggccgctttggtggcggccctggtattggggccgcgcaacggttttcaaaaaaccgtcatgtttccccataacctaaccatgacctacgccggggctgccatgctttgggtgggctggttcggttttaatgggggttcggccctcaccgccgatggttcagcagggtgggcgattttggcgacccacatgggggccgccgcagggtcgctggcctggatgggtatggagtggatgcgccatggcaaacccagcgtattgggtattgtcaccggcatggtggctggtttgggcaccgtaaccccagcctctggttacattagcccctttgggggctttgcaatcggcctcattgctggtgtggtctgctatctggccaccatgatggtgaaacagcgttggaaaatagatgactccctggatgtctttcccgtacacggcgtgggcggtatgatcggtacactcatgacggccctatttgccgctccgctatttgggggccatggcttggcttccaatgcgcaaattttaccgcaacttgccacccaaggggtggcggtgggggtgacggcgctctataccgccgtggtcacttggctaatctttaaagggttggctcaagtgatgcaactgcgggtgagcagggatcaagagaccgagggccttgatttggtcgaccatgacgaacggggttataacctctaa

SEQ ID NO: 67490 - protein, 436 aa, Magnetococcus sp. MC-1
MMRFSSHLLKGGALFALLLITPTWAWAAEQGLDKADTAWILTTTALVLFMTLPGLALFYGGLVRSKNILSILMQCFAIACLVSVLWLAGGYSLAFEHGGPLNGVIGSLQKAFFAGVAHNTVKGSLPEGVFAAFQMTFAIITPALVIGGFAERIRFAVILPFTALWLLLVYIPVCHWVWGGGWMQAAGVMDFAGGVVVHITAGVAALVAALVLGPRNGFQKTVMFPHNLTMTYAGAAMLWVGWFGFNGGSALTADGSAGWAILATHMGAAAGSLAWMGMEWMRHGKPSVLGIVTGMVAGLGTVTPASGYISPFGGFAIGLIAGVVCYLATMMVKQRWKIDDSLDVFPVHGVGGMIGTLMTALFAAPLFGGHGLASNAQILPQLATQGVAVGVTALYTAVVTWLIFKGLAQVMQLRVSRDQETEGLDLVDHDERGYNL

SEQ ID NO: 67491 - DNA, 1434 bp, Mycobacterium avium 104
  CDS (1)..(1434): transl_table=11
gtgacatacccgatactgggccagcccaataccggcgataccgcctggatgctggccagttccgcgctggtgctgttgatgacgccgggtctggcgtttttctacggcgggatggtgcgcgccagaagcgtgctgaacatgctcatgatgagcatcagcgcgatgggcgtggtcaccgtgctgtgggtgctttacggctattcggtcgccttcggcgacgacgtcggcaacttcatgggcaagccgacgtcctactggggcctcaagggtctcatcggcgtcaacgcggtggccgccgacccgagcaaaggcactgcggcaacggacattccgctggccggtacgctgccggccaccgtgttcgtggccttccagctgatgttcgcgatcatcaccgtcgctctgatctccggcgcggtgtccgaccggctgaagttcgccgcctggctggtgttcgccggcctgtgggcgacgttcgtctatttcccggtggcgcactgggtgttcgcattcgacggcttcgcctccgagcacggcggctggatcgccaacaagctgcacgcgatcgacttcgccggcgggacggcggtgcacatcaattccggtgtggcgggcctgatgctggcgatcgtgctgggcaagcgccgcggctggcccaccacgttgttccggccgcacaacctgccgttcgtgatgctgggcgccgggctgctgtggttcggctggtacgggttcaacgccggatcggccaccagctccaacggcgcggcggggtcgacgttcatgacgacgacgatcgcgaccgccaccgcgatgctggcctggatgctcaccgaacgcatccgcgacggcaaggccaccacgttgggcgcggcgtccgggatcgtcgccgggctggtcgccatcaccccgtcctgctcgtcggtcaacgtgctgggcgcgctggtggtgggcctggtggccggcgtggtgtgcgcgctggcggtcggcctgaaattcaagctgggctttgacgactcgctcgacgtggtcggggtgcacctggtcggcgggctggccggcaccctgctggtgggcctgctggccgccccggagagcccggccatcagcggcgtcaccggcgtctccaagggactgttctacggtggcggctgggcgcagctggaacggcaggcggtcggcgcgttcagcgtcctcatctactctggtgtggttacgctgatcctggcgttgatcctgaagtacacgatggggcttcgtctcaacccggaggccgaagcctcgggtatcgacgaggctgagcacgccgagagtggttacgatttcgccgtggctaccggctcggttctcccgccccgggtcgctgtggcggatacccgcaacggcctggaggagcagcgagtgggcgacaaagtggaggcagagcagtcatga

SEQ ID NO: 67492 - protein, 477 aa, Mycobacterium avium 104
MTYPILGQPNTGDTAWMLASSALVLLMTPGLAFFYGGMVRARSVLNMLMMSISAMGVVTVLWVLYGYSVAFGDDVGNFMGKPTSYWGLKGLIGVNAVAADPSKGTAATDIPLAGTLPATVFVAFQLMFAIITVALISGAVSDRLKFAAWLVFAGLWATFVYFPVAHWVFAFDGFASEHGGWIANKLHAIDFAGGTAVHINSGVAGLMLAIVLGKRRGWPTTLFRPHNLPFVMLGAGLLWFGWYGFNAGSATSSNGAAGSTFMTTTIATATAMLAWMLTERIRDGKATTLGAASGIVAGLVAITPSCSSVNVLGALVVGLVAGVVCALAVGLKFKLGFDDSLDVVGVHLVGGLAGTLLVGLLAAPESPAISGVTGVSKGLFYGGGWAQLERQAVGAFSVLIYSGVVTLILALILKYTMGLRLNPEAEASGIDEAEHAESGYDFAVATGSVLPPRVAVADTRNGLEEQRVGDKVEAEQS

SEQ ID NO: 67493 - DNA, 1428 bp, Acidovorax sp. JS42
  CDS (1)..(1428): transl_table=11
atgaaaaaactatttgcttccctactgatcggtgcaagcctgctggccggtggcgccggcgcgctggcccagacacccgacgcggccgcggcggcttcggagcccgtggccgtcgcccccgcgcctgcgcccgctgccgagcccgtcgcagcacctgctgcggcacccgcacccgcacccgcggcagcggcgcccgccgcgcccaaggtggactcgggcgacaccgcctggatgctgacctccacgctgctcgtgatcctgatgatcatcccgggcctggccttgttctacggggggctgggccgcaccaagaacatgctgtccgtgctgatgcaggtgttcgtgatcttcgccctggtgtcgctgctgtggtccatctacggctacagcctcgcgttctccggcgagggccaattcgtgggcgacctgtccaagctcttcctgaagggcgtgagccaggaaacctttggtgcgctggcgaccattcccgaatacgtgttcatcgccttccagggcacgttcgcggccatcaccgtggcgctgatcgtgggctcctttgcggaacgcatgcgttttgcggccgtgctcatcttcgcgctgctgtggttcaccttcagctacgtgcccatggcccacatcgtgtggggtggcggcctgctggcggccgacggcgcgctcgattttgcgggcggcaccgtggtgcacatcaatgccggtatcgcgggcctggtgggtgcctacatggtgggcaagcgtatcggcttcggcaaagaggccttcaccccgcacagcctgacgctgacgatggtgggcgcctcgctgctgtgggtgggctggttcggcttcaacgccggctctgcaggggccgccaacgccgttgcgggcctggccttcgtgaacacggtgctggccacctcggccgccacgctgtcgtggatcgccggcgaagcgctgcacaagggcaaggcctccatgctgggcgcggcctcgggcgcggtggccggcctggtggcggtcacgcccgccgcgggcttcgtgggccccatgggctccatcgcgatcggcctgatcgccggcctggtctgcctgtggggcgtgggtggcctgaagaagatgctgaacgtggacgacgccttcgacgtgtttggcgtgcatggcgtgggcggcatcgtgggcgccatcctcaccggcgtgttcgcggcccagggcctgggcggcaccggcggcctgacgcccgacaccttcagcatgggcgcgcaggtgtgggtgcaggtcaagagcgtgctgttcaccatcgtgtggtcgggcgtggtgtccttcatcgcctacaaggtcgccgacctgctggtgggcctgcgcgtgagcgaggaagccgagcgcgagggcctggacatcacctcccacggcgagacggcctaccaccgctga

SEQ ID NO: 67494 - protein, 475 aa, Acidovorax sp. JS42
MKKLFASLLIGASLLAGGAGALAQTPDAAAAASEPVAVAPAPAPAAEPVAAPAAAPAPAPAAAAPAAPKVDSGDTAWMLTSTLLVILMIIPGLALFYGGLGRTKNMLSVLMQVFVIFALVSLLWSIYGYSLAFSGEGQFVGDLSKLFLKGVSQETFGALATIPEYVFIAFQGTFAAITVALIVGSFAERMRFAAVLIFALLWFTFSYVPMAHIVWGGGLLAADGALDFAGGTVVHINAGIAGLVGAYMVGKRIGFGKEAFTPHSLTLTMVGASLLWVGWFGFNAGSAGAANAVAGLAFVNTVLATSAATLSWIAGEALHKGKASMLGAASGAVAGLVAVTPAAGFVGPMGSIAIGLIAGLVCLWGVGGLKKMLNVDDAFDVFGVHGVGGIVGAILTGVFAAQGLGGTGGLTPDTFSMGAQVWVQVKSVLFTIVWSGVVSFIAYKVADLLVGLRVSEEAEREGLDITSHGETAYHR

SEQ ID NO: 67495 - DNA, 1425 bp, Nostoc punctiforme PCC 73102
  CDS (1)..(1425): transl_table=11
atgattggggctatgaccctactgtttttggcaggaccgctaatgggtaatgcttttgcccaaacaccagttgctgtaccagctgctgatactggagacacagcatttatgctgatttcagcagcattagtgctgctaatgacaccaggattggcgtttttctatggtggatttgtgcgatcgcgcaatatcctaaacacattgatgatgagctttgtcttgatggcgatcgtgggagttacctggattctctggggttatagtctttcttttgcaccagggttgccattcattggtgggttgcaatggtttgggttgaacggtgttggtttagagactcaaggctacttgccacatctgccttatgaagatgcgctcaaagcagcagaccccaaatatgctgatgtagtctcttatgccggaacgattccccaccaggcattcacgatttatcaagccatgtttgccattatcaccccagctttaatttctggggcactcgttgagcggatgagtttccgcgcctattcgctgtttgtgctgctttggtcaacctttgtttacgcccctctagcccacatggtatgggcgaaaggtggattcttgggtttagctggtggattaggtgccctcgactttgcaggtggcacagtagttcatattagttctggcgtttcagcgctagtagctgcgatcgtccttggccctcggaaaacccatcccgatcgccttagtccgccacacaatgttccttttattttgctgggtgctggcttgctctggtttggttggttcggtttcaacgctgggagtgccctatctgttgctagtggaacttctggtaacttaacaacaaatttagcaacaacagcctttgttgccaccaatacagcggcggcggcggcggctttaatgtggctaattttggaagcagttttacggggtaaaccgacagctgtgggagcagctacaggagccgttgctggtttagtagggatcactcccgccgccggatttgtgacaccgctatcagcgattttaattggtttcatcaccgcctttgtttgcttctatgctgtaagtttcaagcataagctgcaaatcgacgatgctttagatacctatcccgtgcatggcgttggtggtacagtgggggcaattttaacagccatctttgccacaactcaagtcaacggcggaggtaaagacggagtgctacgtggtaattttggtgaattgggagttgaactaatagcaatcgccgttgcttacgcgatcgcaggtgttggtacgtggattattctcaaagttatcgatgctacagtcggtctgcgtgttaaagaagaagcagaattgcaaggtttggatatcaacgaacacggcgaagagggttacaactctgagtttggcgatcgtccgacttag

SEQ ID NO: 67496 - protein, 474 aa, Nostoc punctiforme PCC 73102
MIGAMTLLFLAGPLMGNAFAQTPVAVPAADTGDTAFMLISAALVLLMTPGLAFFYGGFVRSRNILNTLMMSFVLMAIVGVTWILWGYSLSFAPGLPFIGGLQWFGLNGVGLETQGYLPHLPYEDALKAADPKYADVVSYAGTIPHQAFTIYQAMFAIITPALISGALVERMSFRAYSLFVLLWSTFVYAPLAHMVWAKGGFLGLAGGLGALDFAGGTVVHISSGVSALVAAIVLGPRKTHPDRLSPPHNVPFILLGAGLLWFGWFGFNAGSALSVASGTSGNLTTNLATTAFVATNTAAAAAALMWLILEAVLRGKPTAVGAATGAVAGLVGITPAAGFVTPLSAILIGFITAFVCFYAVSFKHKLQIDDALDTYPVHGVGGTVGAILTAIFATTQVNGGGKDGVLRGNFGELGVELIAIAVAYAIAGVGTWIILKVIDATVGLRVKEEAELQGLDINEHGEEGYNSEFGDRPT

SEQ ID NO: 67497 - DNA, 1296 bp, marine gamma proteobacterium HTCC2143
  CDS (1)..(1296): transl_table=11
atgggtactttatcgatgcgtctatcgacgttatcaattgctttaatggcatctggtttagcggctgctgaagatacactcaatgcggctaacaccagctggatactaacgtcgacagcgctggtgttgtttatgacgcttcctggtctggcgctattttacggggggttggtccggtcgaaaaacgtactgagtattctgatgcagtgttttgctattacctgtattgcttcagttctttggttcgtagtcggctatagcatcgccttcggcgaagggaacccttattttggggggatggggaaagccttgttgtcgggagtgacgtcaagttctctagcgggtgatattcctgaaaccgtctttgttatgtttcagatgacctttgccatcattacaccagctttgattatcggcggttttgcagagcggataaagttctctgccgtggtaatatttaccgcattatggttgttagttgtctacgccccaatcactcactgggtttggggtggaggctggttaggtgagatgggtttactggattttgccggtggcacagtggttcacatcaccgccggtgttgccgctttggtgtctgcagttgtgttgggcaaccgcaaaggcttcggcgaaaccgcgatgcctccgcacaacatgaccatgacaattatgggcgcgggtatgttatgggtaggctggtttggttttaatgccggtagtgccctcgctgcgaacggtgatgcgggtatggccatgttggtcacgcacttatcagctgcggctgggacgtttacttggttgacgattgaatggattaaatacggtaagcccagtgcattaggcgcagtaacaggcatggtggctggtttgggaacaatcacaccggcatcaggctatgtaggccccggcggagcattggttataggtctcagcgctggtatcgtatgcttttatgcgacgctctatatcaaacaggtgttgaaaatagacgattcgctggatgtgtttccggtacacggtgttggcggcatattggggacttttctagcgggaatatttgccagcgcggagcttggcatattcagcggtcaaggcttgccagagggtgtcactattctacagcagctgggtgttcaattaaccgggattgttgctacctttgtttacgctggcgtggcaacgtacatcatattagtcgttgttagggcgctggtcggattgcgagtgactgaagacgaagagagagagggtttggatactgtgtctcacaacgagcggggttacgatttgtag

SEQ ID NO: 67498 - protein, 431 aa, marine gamma proteobacterium HTCC2143
MGTLSMRLSTLSIALMASGLAAAEDTLNAANTSWILTSTALVLFMTLPGLALFYGGLVRSKNVLSILMQCFAITCIASVLWFVVGYSIAFGEGNPYFGGMGKALLSGVTSSSLAGDIPETVFVMFQMTFAIITPALIIGGFAERIKFSAVVIFTALWLLVVYAPITHWVWGGGWLGEMGLLDFAGGTVVHITAGVAALVSAVVLGNRKGFGETAMPPHNMTMTIMGAGMLWVGWFGFNAGSALAANGDAGMAMLVTHLSAAAGTFTWLTIEWIKYGKPSALGAVTGMVAGLGTITPASGYVGPGGALVIGLSAGIVCFYATLYIKQVLKIDDSLDVFPVHGVGGILGTFLAGIFASAELGIFSGQGLPEGVTILQQLGVQLTGIVATFVYAGVATYIILVVVRALVGLRVTEDEEREGLDTVSHNERGYDL

SEQ ID NO: 67499 - DNA, 1308 bp, marine gamma proteobacterium HTCC2080
  CDS (1)..(1308): transl_table=11
atgcacgttacacgtaaatcggctttcatagcgttatgcgcttttctattacctcttcccgctttggctggggagatttcctccgctgatactgcgtggctcttgaccgcgactgcgctggttttatttatgaccttgccgggactgtcgttattctacggtggtctagtgcgtgtccgtaacgtcttgtcggtgttaatgcagtgttttgctttggctgcgttgatgtcagtggtttggtttgtggcgggttacaccttggcctttggctctgccggtgttgagcagggcgcctggattggtgatcttggcaatctaatgctcatgggcattgatattgatggcgtcaacggttcaattcccgactccctgtttgttatgtttcaaatgacctttgcgattattactccagccctaattattggcggttttgccgagcgtattcggttttcagcactattgctgttcagtacggcatggctattacttgtctacgcacctatttgtcactgggtttggggcggtggctggttgggcgccatgggtcttcaggattttgccggtggcacagtggttcatatcacggcaggtgtcgccgccttggtcgccgcaatcatgatgggaccgcgtcgagggtttggttccgtggccatgccgccacacaacctaacgatgaccgtgacaggtgccggcatgctttgggtgggatggtttggttttaatgccggttcggctgtggcggcggatcaaagtgccgctatggcgatgctggtgacacatctttctgcagcttgcggttctttggcatggatggctatggagtgggtgcgtcacggtaagccctcggttctaggcatcgttaccggtatggtggcgggtctgggtacgattacacccgcatcaggctcagtagggcctgcagcagcggttgtgattggactcactgcaggggtcgtctgctacttcgcaacgattaccttgaaaaatcgtctgaaaatagatgacagtctcgatgtttttcccgtccacggtgttggtggtattttgggcacactgttggcaggtgtcttttgctcaccgaatctgggcatctttagcggcaatggtttctccgacggtattgacagtatcgctggtcagcttgccgttcaggcgacaggtgtcggcgcaacgtttctgtataccctggtcgtgagctacattctctttaaggtggtcgatgccctcgtgggacttcgcgtcgatagtgatgaagaaaccatcgggctggatttggtgcttcacgatgagcgaggctacgacttgtag

SEQ ID NO: 67500 - protein, 435 aa, marine gamma proteobacterium HTCC2080
MHVTRKSAFIALCAFLLPLPALAGEISSADTAWLLTATALVLFMTLPGLSLFYGGLVRVRNVLSVLMQCFALAALMSVVWFVAGYTLAFGSAGVEQGAWIGDLGNLMLMGIDIDGVNGSIPDSLFVMFQMTFAIITPALIIGGFAERIRFSALLLFSTAWLLLVYAPICHWVWGGGWLGAMGLQDFAGGTVVHITAGVAALVAAIMMGPRRGFGSVAMPPHNLTMTVTGAGMLWVGWFGFNAGSAVAADQSAAMAMLVTHLSAACGSLAWMAMEWVRHGKPSVLGIVTGMVAGLGTITPASGSVGPAAAVVIGLTAGVVCYFATITLKNRLKIDDSLDVFPVHGVGGILGTLLAGVFCSPNLGIFSGNGFSDGIDSIAGQLAVQATGVGATFLYTLVVSYILFKVVDALVGLRVDSDEETIGLDLVLHDERGYDL

SEQ ID NO: 67501 - DNA, 1287 bp, Candidatus Desulfococcus oleovorans Hxd3
  CDS (1)..(1287): transl_table=11
atgaaaaaaattctgttggtaccggtggcgttgctgctgtccgtgctgccggcatttgccgaagaggcggtgctggacaccggcgacacggcctggatcatcgtggccacggccctggtgatgatgatgaccccggccggcctggccctgttttacgggggcatgtcccgcagcaagaacctgctcaacacctatgccatgacctttgccgcctactgcctggccagcctggtgtgggtctgctggggctataccctggcctttggcccggacaagggcgggatcatcggcggcctggaccacctgtttttaaacggcatcggcattgacaccctgtccggcaccattcccgcatcggtgtttgtcctgttccagcttacctttgccggcatcaccgtggccctggtgctgggatcagtggtggaccgaatgaagttttccgcgtggattgtcttctgcctgctgtggctcacctttgtctacagcccggtggcccactgggtgtggggcggcggctggatggccgagatgggggcactggactttgccggcggcaacgtggtgcacatcaacgcgggtattgccggcctggtgctggccctgatgctgggaaaacgggaaggctatggaaaagtggccatgtttccctccagcgtctccttaacggccctgggcgcggccctgctctggttcggctggttcgggtttaacgcgggcagcgcgctgggcgccaacggcctggccggctcggcctttctggtcaccaacacatcggccgccatggccggcatggcgtggatgtttgccgaatggatcgtcagcaagcggcccaccctgctgggccttgcctcgggcgtggtggccgggctggtggccatcaccccggcggccgggtttgtcaacctgcccgcctccctggtcatcggcctggtggccggggtcctgggattctacagcgtggccgtgctcaagcacaaaatcgggtatgacgactctttggacgcctttggtgttcacggcgtatgcggcatatggggcgccctggccaccggcctgtttgccaaccccgccatttccggggccagcggcctgttttacggcaaccccgcccagctgggcattcaggcgatctccattgtggccaccattgcctttaccgccgtggccaccctgattatcgtttatgtcacccggctgatcaccggcggcttgcgcgtaagccgggaagatgagatgatgggccttgacaacgccattcacggcgaacgggcctttgagctggactga

SEQ ID NO: 67502 - protein, 428 aa, Candidatus Desulfococcus oleovorans Hxd3
MKKILLVPVALLLSVLPAFAEEAVLDTGDTAWIIVATALVMMMTPAGLALFYGGMSRSKNLLNTYAMTFAAYCLASLVWVCWGYTLAFGPDKGGIIGGLDHLFLNGIGIDTLSGTIPASVFVLFQLTFAGITVALVLGSVVDRMKFSAWIVFCLLWLTFVYSPVAHWVWGGGWMAEMGALDFAGGNVVHINAGIAGLVLALMLGKREGYGKVAMFPSSVSLTALGAALLWFGWFGFNAGSALGANGLAGSAFLVTNTSAAMAGMAWMFAEWIVSKRPTLLGLASGVVAGLVAITPAAGFVNLPASLVIGLVAGVLGFYSVAVLKHKIGYDDSLDAFGVHGVCGIWGALATGLFANPAISGASGLFYGNPAQLGIQAISIVATIAFTAVATLIIVYVTRLITGGLRVSREDEMMGLDNAIHGERAFELD

SEQ ID NO: 67503 - DNA, 1305 bp, Pseudomonas putida GB-1
  CDS (1)..(1305): transl_table=11
atgaagcacctcaccctcgctgtaatgttgttagccctggccacccaggccactgccgccgaaaccaccctggacaccggcaacaccgcctggatgatctgcgccgcgatgttcgtgctgatgatgtgcatccccggcctggcgatgttttacggcggcatggtgcgggccaagaactttctttcggtgttcacccagctgttcgccgtggccggcgttatcggcattatctgggtgctgttcggctacagtctggtggtcgataccaccggcatggtcgagggccagctcaccttcaacagtttcatcggcgggttggacaaggcgctgatgctggatatcggccatgacagcctggtcggcaccatccccgaaggtgtgtttgcggtgtttcagctgacgttcgccatcatcaccccagcgctgattgccggtggttttgccgagcgcatgaagttcaccgcctcgttgctgttcatgacggcgtggttcgtgctggtgtatgcacctattgcccatatggtatggggcgggccgggggcactgatggtcaactggggggtgctggacttcgccggcggcactgcggtgcacatcaattccggcgtggcggccttggcggcggcgttgatgctgggcaagcgcaagggctacccgcaggtggccatgccgccgcataacctgggttttactctggtgggcgcggggttgttgtgggtgggctggttcggcttcaacgttgggtcggggcttgccgcgaaccagggggcaggggtggtgatgctggcgaccatggtggcggcctgcgcggggattgtcggttggttgctgaccgagaaggtgatgcatggtcgaccgactgccttgggtgctgcgtcgggggcactggcggggctggtgggtattacaccggcctgcgcattcgtcgggccgctgggggcactggtgatcggtgtgttgaccggggccatctgcttctttgccgtgacccggctcaagcaggcgctagggtatgacgacagccttgatgtgttcgggctgcatggtgtgggtgggatggtcggggcgattctgaccggtgtgtttgccgcgccggcactgggtggctatgtggaaggcgcatcgcccattgggcaagcactggtgcagttgaagggtgtggcgttcaccttcgtttactgcttcgtggtgagctgggtaattctcgcggccatcaagctgaccatcgggttgcgggccagccgagaggaagaagagcaagggctggacctggcggagcacaatgagcgcgcttataacctttga

SEQ ID NO: 67504 - protein, 434 aa, Pseudomonas putida GB-1
MKHLTLAVMLLALATQATAAETTLDTGNTAWMICAAMFVLMMCIPGLAMFYGGMVRAKNFLSVFTQLFAVAGVIGIIWVLFGYSLVVDTTGMVEGQLTFNSFIGGLDKALMLDIGHDSLVGTIPEGVFAVFQLTFAIITPALIAGGFAERMKFTASLLFMTAWFVLVYAPIAHMVWGGPGALMVNWGVLDFAGGTAVHINSGVAALAAALMLGKRKGYPQVAMPPHNLGFTLVGAGLLWVGWFGFNVGSGLAANQGAGVVMLATMVAACAGIVGWLLTEKVMHGRPTALGAASGALAGLVGITPACAFVGPLGALVIGVLTGAICFFAVTRLKQALGYDDSLDVFGLHGVGGMVGAILTGVFAAPALGGYVEGASPIGQALVQLKGVAFTFVYCFVVSWVILAAIKLTIGLRASREEEEQGLDLAEHNERAYNL

SEQ ID NO: 67505 - DNA, 1332 bp, Pseudomonas putida GB-1
  CDS (1)..(1332): transl_table=11
atgactctgcgtaagatcgcagggctaggagccctattgtccctcgtaatgcccgggcttgccctggcagaggaagctgccccagcgctgaactccggcgataccgcctggatgctgaccgcaacggcgctggtgctgttcatgaccattccgggcctggccctgttctatggcggcatggtgcgttccaagaacgtgctgtcggtgatgatgcagtgctttgcaatcaccggcctgatgagcattctctgggtcgtttacggctacagcatggccttcgataccaccggtatggaaaagggcgtgctcaacttcaactccttcgttggcggtttctccaaagcctttctcagcggcgtaacgcccgagaacttgacctcggccaccgcgctgttccctgaagcggtattcatcaccttccagatgacatttgccatcatcaccccggcgctgatcgtcggtgccttcgccgagcgcatgaagttctccgcgatgctggtgttcatgggtatctggttcaccctggtgtatgcgcctatcgcgcacatggtgtggagtggtgacggcgcactgatgtgggactggggcgtgctggacttcgctggcggcaccgtggtgcacatcaacgccggtatcgcaggcctggtcagctgcctggtgctgggcaagcgaaaaggctacccgaccacgccgatggccccgcacaacctgggctataccctgatgggtgcggccatgctgtggatcggctggttcggcttcaacgcaggctccgccgctgcggccaacggcaccgccggcatggccatgctggtcacccagatcgccactgccgctgcggcactgggctggatgttcgccgagtggatcggccacggtaaacccagtgccctgggcatcgcctcgggtgtggttgccggcctggtcgccattaccccggctgcaggcaccgtgggcccgatgggcgctctggtgattggcctggcgtcgggtgtgatctgctacttctgcgccaccaccctcaagcgcaagctgggctatgacgactcgctggacgctttcggcgtgcacggaatcggcggcatcatcggtgccatcctcaccggcgtgttcgcagcccctgcactgggcggcttcggtaccgtcaccgacatcggcatgcaggtctggatccaggccaagggcgtgatcttcaccgtggtgtacaccgccatcgtcacctacgtgatcctcaaggtgctggatgtggtgatgggcctgcgggtcaacgaagaagaagagtcggtcggcctcgacctggctcagcacaacgaacgcggctacaacctgtaa

SEQ ID NO: 67506 - protein, 443 aa, Pseudomonas putida GB-1
MTLRKIAGLGALLSLVMPGLALAEEAAPALNSGDTAWMLTATALVLFMTIPGLALFYGGMVRSKNVLSVMMQCFAITGLMSILWVVYGYSMAFDTTGMEKGVLNFNSFVGGFSKAFLSGVTPENLTSATALFPEAVFITFQMTFAIITPALIVGAFAERMKFSAMLVFMGIWFTLVYAPIAHMVWSGDGALMWDWGVLDFAGGTVVHINAGIAGLVSCLVLGKRKGYPTTPMAPHNLGYTLMGAAMLWIGWFGFNAGSAAAANGTAGMAMLVTQIATAAAALGWMFAEWIGHGKPSALGIASGVVAGLVAITPAAGTVGPMGALVIGLASGVICYFCATTLKRKLGYDDSLDAFGVHGIGGIIGAILTGVFAAPALGGFGTVTDIGMQVWIQAKGVIFTVVYTAIVTYVILKVLDVVMGLRVNEEEESVGLDLAQHNERGYNL

SEQ ID NO: 67507 - DNA, 1353 bp, Erythrobacter sp. SD-21
  CDS (1)..(1353): transl_table=11
atgaccatgcgtaatttcatgcgcgccgccgctgctgcatgcaccgcgctcttcaccgctactgccgcctatgcgcaggacgccgctccggaggccgtggaagccgcttccgccgtgcccaatcccggaaacaacgcctggatgatgacggcgacgatcctcgtcctgctgatgattattccgggcctgacattgttttacggaggtctgacccgctcgaagaacatgctctcgaccatgacccagatcggcgccactgccgcgctggccatgattgtctgggtgatgtggggctacagcctcgcctttggcgacacgacctacgagggcgcgctcggcctcttcatcagcgggggcagcctgttcctgtccggcaccgatgccagcagcacggcggccaccttcaccgatgaagtcatcagcaaatatgtcttcattagcttccagatgaccttcgccgcgatcaccgccgccctgatcctgggcgcaacggccgagcggatgaagttcagcgcggtgatggccttcgtgccgatttggctgaccatcgtctatttcccgatcgcgcacatggtctgggcgggcggcggcctgctgttcgaagacggcgcgctcgattttgcgggcggcacggtggtgcacatcaacgccggtgtctcgggcctcgtcctcgcctacctcctcggcaagcgccgcggctggccgcaggaaccgatgatgccgcactcgatgacgctgaccatggtcggcacgggcctgctgtgggtgggctggttcggcttcaatgccggctcggctctggaggcggacggctcggctgggctggccatgatcaacaccttcgtcgccaccgcggccggtgcgctggcctggatggtgatcgagaggctggcgggtcacaagggttcggcgctgggcttctgctcgggcgtgattgccggccttgtcgctgtcaccccggccgcgggcaattcgggacccttcggcgccatcctgctcggcatcctttcggcggcgatctgctacttcttcgtcgccaaggtgaaggccaagttcgggtatgacgacagcctcgacgccttcggcatccacggcatcggcggcatcgttggcgccatcggtacggcggtggtctaccagccgttcctcggcggccccggcgacggttcgaccgcgcttggctcgcagctcgggatccagatattctcggtcgtcgtcacgatcgcctgggcggccatcggcactctgttggccggcttcatcgtcaaggcagtggttggcctcagggtcagcgaagaggccgaagtcgacgggctcgacatctccgaacacggagagcgcgcttacaattaa

SEQ ID NO: 67508 - protein, 450 aa, Erythrobacter sp. SD-21
MTMRNFMRAAAAACTALFTATAAYAQDAAPEAVEAASAVPNPGNNAWMMTATILVLLMIIPGLTLFYGGLTRSKNMLSTMTQIGATAALAMIVWVMWGYSLAFGDTTYEGALGLFISGGSLFLSGTDASSTAATFTDEVISKYVFISFQMTFAAITAALILGATAERMKFSAVMAFVPIWLTIVYFPIAHMVWAGGGLLFEDGALDFAGGTVVHINAGVSGLVLAYLLGKRRGWPQEPMMPHSMTLTMVGTGLLWVGWFGFNAGSALEADGSAGLAMINTFVATAAGALAWMVIERLAGHKGSALGFCSGVIAGLVAVTPAAGNSGPFGAILLGILSAAICYFFVAKVKAKFGYDDSLDAFGIHGIGGIVGAIGTAVVYQPFLGGPGDGSTALGSQLGIQIFSVVVTIAWAAIGTLLAGFIVKAVVGLRVSEEAEVDGLDISEHGERAYN

SEQ ID NO: 67509 - DNA, 1401 bp, Gibberella fujikuroi
  CDS (1)..(1401)
atgaccactccttacaatggcaccactgatcatgccgactatggctactcaacccatgtgcatgatctcaacatcttctacgacacgggcaacttgacgttcctcgccgtcagcgccgtccttgtgcttctcatgattcccggcgtcggcttcttctacagtggtctcgctcgtcgcaagtctgctctgacgctcattctgttgtcgatgatttcagttgcggtcatcagtttccagtggttcttctggggatactccttgaccttctcgcgaactggaaactcattcctcggtgacttgacccagtttggtctcatggacaccctcgctcagcccaatggctcttccgctctccctgacattctcttttgtctgtaccagggcatgttcgctgccattactcctgcccttgccattggttgcgttgctgatcgaggtcgcatcctccccgccatcgtcttcatgttcctttggtccaccatcgtctacgatcccatcgcctactggacctggaacgccaacggctggctcttcaaccttcccagctacgactttgctggaggtggtcccgttcacgtctcttcaggaacctgcgcgctcgcctactcccttatgctcggcaagcgtaccggctactccaacaacaacggtcttccttaccgccctcacaacgtcacccacgttgttctcggcacggtcttcctctgggtcggctggttcggcttcaacggaggttctgctctcgccatgaacatccgcgccgtcatggcatgctacgttaccaacctggctgcctcatgcggtgccattgcctggatcctcctcgattaccgtctcgagaagaagtggagcaccattggcttctgctccggtgccatttctggtctcgttgccatcactcctgccgctggtttcgtgaagccctgggctgccgtcattatcggaatctgcggtggtatcttctgcaacttcgccaccaaggtcaagttcctcatcaacgttgacgacagtcttgatatctttgccatccacggaattggtggtatggttggtaacatccttaccggtatctttggaaccaaaaccattgccgctctcgacggtggagagtacgaccctattggttgggttgacggtcactttgttcagctgggttaccaaatcgctggtactcttgccgtcttcgcttggtcctttaccctcacttgcattctccttttccttctcaacctcatccctggcctctcccttcgtgtctccccagaggaggaggagctcggcactgatgatggccagctgggcgagtttgcctatgactatgttgagatgactcgacacatggctgacagcacacatcctcattctgatgctagtgcccgaacaagtcaggagaaggtctaa

SEQ ID NO: 67510 - protein, 466 aa, Gibberella fujikuroi
MTTPYNGTTDHADYGYSTHVHDLNIFYDTGNLTFLAVSAVLVLLMIPGVGFFYSGLARRKSALTLILLSMISVAVISFQWFFWGYSLTFSRTGNSFLGDLTQFGLMDTLAQPNGSSALPDILFCLYQGMFAAITPALAIGCVADRGRILPAIVFMFLWSTIVYDPIAYWTWNANGWLFNLPSYDFAGGGPVHVSSGTCALAYSLMLGKRTGYSNNNGLPYRPHNVTHVVLGTVFLWVGWFGFNGGSALAMNIRAVMACYVTNLAASCGAIAWILLDYRLEKKWSTIGFCSGAISGLVAITPAAGFVKPWAAVIIGICGGIFCNFATKVKFLINVDDSLDIFAIHGIGGMVGNILTGIFGTKTIAALDGGEYDPIGWVDGHFVQLGYQIAGTLAVFAWSFTLTCILLFLLNLIPGLSLRVSPEEEELGTDDGQLGEFAYDYVEMTRHMADSTHPHSDASARTSQEKV

SEQ ID NO: 67511 - DNA, 1386 bp, Gibberella fujikuroi
  CDS (1)..(1386)
atgctctcggccacagctctagtgctgttaatggttcccggtgttggcttcttctattcaggcctcgcccgtcgcaaatcggctctgtcgcttatatggctctcagtaatgagcgccgcagtgacgactttccaatggttcttctggggcttctctctcaccttctcgcatacggccggcccgtttatcggtgaccttgccaactttggcttccgcgatgtcctggcccggccctcggttggttccgctcatctccccgatatgctcttcgccgtttaccagggcatgttctccgccctaactgtggctctcgctaccggtgccgtcgccgagcgtggccgcatgctcccctgtattatcttcaccttcgtgtgggccactgtcgtgtacgaccctattgcctgctggacctggaatcccagtggctggtctaacaagatgggcggcctcgattttgctggaggcacccctgtgcacatcgcttctggaagcgctgctctggcttattcaatgatgctgggcaagcgtagtggccatggaacgcatgagctcaactaccgccctcacaatgctactcatatcgtgaccggaacagtcttcctttgggttggatggtttggcttcaacgccggctctgctctctctgctaaccttcgcggcgtaatggccgccatcgtgactaaccttgctgcttgtgtcgggggcatcacctggtgtctgttggactatcgtctggagaggaagttctccactgtcggcttttgctctggtgttgttgccggtctcgtctgcatcacccctggctctggctatgtccccccatggtctgctgtcatctttggtgctgtcggcgctgctggctctaactatgctaccaaggttaagttcctccttggaattgacgatgcactcgatatctttgccgtccacggcattggtggtttgatcggcaatatctgtaccgccttcttcgccaccccaagcatcgctgctctcgacggctactctcacatcaagggcggttgggtcgaacgtcactgggcgcagatgggttatcaactggccgattccatctgtggaggcccatactcattcgtcgtcacttgcagcatcctattcctcatgaacctcattccgggtctgcgtcttcgagtcgattcggatgccgaagtacagggcattgacgatgccgagattggagagttcgcatacgactacgttgagcttactcgtgaagtcgtcagcgatatcgacaacgagtccggaagccgatactcggctgatcctacggctttccaccattacgaaaaaaatcacattcccatgattgatgctcgcatgtttggtggccagcccgcgcatgcccctgtgacgtttccacagtga

SEQ ID NO: 67512 - protein, 461 aa, Gibberella fujikuroi
MLSATALVLLMVPGVGFFYSGLARRKSALSLIWLSVMSAAVTTFQWFFWGFSLTFSHTAGPFIGDLANFGFRDVLARPSVGSAHLPDMLFAVYQGMFSALTVALATGAVAERGRMLPCIIFTFVWATVVYDPIACWTWNPSGWSNKMGGLDFAGGTPVHIASGSAALAYSMMLGKRSGHGTHELNYRPHNATHIVTGTVFLWVGWFGFNAGSALSANLRGVMAAIVTNLAACVGGITWCLLDYRLERKFSTVGFCSGVVAGLVCITPGSGYVPPWSAVIFGAVGAAGSNYATKVKFLLGIDDALDIFAVHGIGGLIGNICTAFFATPSIAALDGYSHIKGGWVERHWAQMGYQLADSICGGPYSFVVTCSILFLMNLIPGLRLRVDSDAEVQGIDDAEIGEFAYDYVELTREVVSDIDNESGSRYSADPTAFHHYEKNHIPMIDARMFGGQPAHAPVTFPQ

SEQ ID NO: 67513 - DNA, 1542 bp, Gibberella fujikuroi
  CDS (1)..(1542)
atgtcttatgttatccctgggcccccgactgccttcaatggcaccaatgaagagcttggtggtgattccactaccgagaatctcaaccaatggtaccaatctggcgaccaggccttcatcatcctctccgcctgcctcgtccttctcatggtccctggcattgccttcctgtactctggtcttgcccgaagaaaatcagccctctccatgctctgggttgttatgatgtccttctccgtcattgtcttccagtggtacttctggggcttctctctcgccttctctacaacttccaacaaccccttcatcggtgatctcaagcatttcggtctcatgaaggtctggggtgctccctcagtcggatctcctcttatccctgctctgctttactctttctatcagatgatgttctgcgctgtcactggcgctcttacagtcggcgctgtcgcagagcgaggccgcgttgtgccaagcatggtgttcatcttcttctgggccactcttgtctactgccctctcgcgtactgggtctggaaccctaatggttggggcttcgttaacggcgttctcgactacgctggtggtgttcccgtcgagattggctccggcatgtccgcattcgcctactcttgggttctgggccgccgcaacgagaagatgatgatgaacttccgtcctcacaacatctccctcatcactctcggtaccatgttcctctggttcggctggctcggcttcaatggtggctcttctttcggtgctaacttccgtgctgttatggcttgctggaactcctgcctcactgccatgtttgctgctatgacttggtgcgttctcgatttccgcctggctcgtaagtggtccatggtcggctggtgctctggcactatctctggccttgttgctgctactcctgcttccggtttcctcgacccttgggctagcatcatcctgggtgttgtcgctggtgtcgcttgcaattttgccacaaagatcaagttccttgttcgaattgacgactctctcgatgtgtttgccgagcacggtgtcggtggtatcgttggtctcatcttcaatgcttttttcgcccgtggctctatcattggcctcgacggtgtcaacactggtgcttcaggtggcttcatggatggcaactacgtcatcattggctggcaaatcgctgccattgtcgctgcctccgcttatgccttcgtcatgtctgccatcatcgccaagattatcgacttcattcctggactgaagctccgtgcctctgaagaggctgagctccttggtatggatgatgaccagcacggcgagttctcttacgactacgttgaggttcgccgagacttccttgcttggagccctcaccgtggtgagcccgctgaagatggtgatgtgcttgagcctacccatggcattcaggagcaccagtctatgatgaacccaagcgaatccgatgatgtccgcaagactccttctcttaacacgcccgatgtcgttgcacccgacgcggtgattaacgagaagcatgcttaa

SEQ ID NO: 67514 - protein, 513 aa, Gibberella fujikuroi
MSYVIPGPPTAFNGTNEELGGDSTTENLNQWYQSGDQAFIILSACLVLLMVPGIAFLYSGLARRKSALSMLWVVMMSFSVIVFQWYFWGFSLAFSTTSNNPFIGDLKHFGLMKVWGAPSVGSPLIPALLYSFYQMMFCAVTGALTVGAVAERGRVVPSMVFIFFWATLVYCPLAYWVWNPNGWGFVNGVLDYAGGVPVEIGSGMSAFAYSWVLGRRNEKMMMNFRPHNISLITLGTMFLWFGWLGFNGGSSFGANFRAVMACWNSCLTAMFAAMTWCVLDFRLARKWSMVGWCSGTISGLVAATPASGFLDPWASIILGVVAGVACNFATKIKFLVRIDDSLDVFAEHGVGGIVGLIFNAFFARGSIIGLDGVNTGASGGFMDGNYVIIGWQIAAIVAASAYAFVMSAIIAKIIDFIPGLKLRASEEAELLGMDDDQHGEFSYDYVEVRRDFLAWSPHRGEPAEDGDVLEPTHGIQEHQSMMNPSESDDVRKTPSLNTPDVVAPDAVINEKHA

SEQ ID NO: 67515 - DNA, 1440 bp, Glomus intraradices
  CDS (1)..(1440)
atgtctgctcccgctgctgctcctgctgcagaacctaatccattcgatggtgttaatataacagaactcattgcaaatgtgtcagcattgtcttcagttaacgatattgatcaaggacatacagcatggattatgatgtcaactgctttggtatttattatgattccaggtgtcggatacttttacagtggtatggctagaagtaaaaatgcattatcccttataatgttaagtgttttatccttggctgtagtatcaattcagtggtgggctatcggtttcagtttagcattcggcccaggcacaagtggttatatcggaaacttaaattatgctttctttatgggtgtcggtactgaacctcttaatggtgctgtaaaaattccaggaatagtttttgccatgtatcagtgtatgtttgctgctattacacccgcacttgccatcgggtctgcagctgaacgtggtagaattttcccaagcatagtcttcatttttatttggtcaactattgtatatgatccaattgcttactggacatggaatcttaatggttggtccgcaaaaatgggtggtctcgatttcgctggtggtactcccgtacacatttcttctggtgctgctgctcttgcttactgtttaatcttgggtaaaagaactagtcatggaactgatgaatttaaacctcataatattgctaatgttgtacttggaaccgttttactttggttcggttggtttggtttcaacggtggttcagctcttaattctacttctcgtgctgctatggctatcgctgtaaccaatttatcagctgctgttggtggtcttacttggtgtttattggattatcgacttgaaaagaaattgtcagctctagctttctgttccggtgctgttgcaggacttgttgctatcaccccaggttctggttatgttggtaccccagctgctgttgcttttggtttcattgctggaatttgttgtaatttggccgttaaattgaagcacatctttgattttgatgacgctttggatgttttcgctgttcatggagtcggtggtgttattggtaatattttaactgctatttttgctgaacagaaaattgttgcccttgacgaaactgttttacctggaggttggcttaatcaacattggatacaaatgggtcatcaactcgctgattcagttactggtgtagcttattcatttgttgttacatatttaatcttatttattatggataaaattcccggactttcactcagagctgatcctgaatctgaagctaaaggtttagatgaaactgaattaggagaattggcttattatcatgtcgatagacttgtagcagtaaatacacgaaccggtgagacaaaacccgtaaaagaagaaacaattccccaacaaaatgacgcaaatgcaacaattgtataa

SEQ ID NO: 67516 - protein, 479 aa, Glomus intraradices
MSAPAAAPAAEPNPFDGVNITELIANVSALSSVNDIDQGHTAWIMMSTALVFIMIPGVGYFYSGMARSKNALSLIMLSVLSLAVVSIQWWAIGFSLAFGPGTSGYIGNLNYAFFMGVGTEPLNGAVKIPGIVFAMYQCMFAAITPALAIGSAAERGRIFPSIVFIFIWSTIVYDPIAYWTWNLNGWSAKMGGLDFAGGTPVHISSGAAALAYCLILGKRTSHGTDEFKPHNIANVVLGTVLLWFGWFGFNGGSALNSTSRAAMAIAVTNLSAAVGGLTWCLLDYRLEKKLSALAFCSGAVAGLVAITPGSGYVGTPAAVAFGFIAGICCNLAVKLKHIFDFDDALDVFAVHGVGGVIGNILTAIFAEQKIVALDETVLPGGWLNQHWIQMGHQLADSVTGVAYSFVVTYLILFIMDKIPGLSLRADPESEAKGLDETELGELAYYHVDRLVAVNTRTGETKPVKEETIPQQNDANATIV

SEQ ID NO: 67517 - DNA, 1449 bp, Vitis vinifera
  CDS (1)..(1449)
  misc_feature (499)..(499): m is a or c
  misc_feature (1194)..(1194): r is g or a
atggctgatacttcttttcctcccaacttactgcccgacgaggcgagccctgaatggatgaacaaaggcgacaatgcctggcaactcactgccgccactctcgtcggtctccagactgttccggggctgatcatcctttatggaggtgcagtgaagaagaaatgggctgtgaattcagctttcatggcgttctacgccttcgcctgtgtccttatctgctgggtggggtggggatatagaatgtcgtttgggacgaagcttgttccattttgggggagggctaatgttgccttggaccaagtttatctcctggacccggcctttattgggaagttcccacaggcgacgatggtgttttttcaattcgtttttgcagcgatcactgtggttttgattgcgggagccttgttggggcggatgaatttttacgcgtggatgttgtttgtgcccttgtggctgacgttttcgtacacctttgtagcatttagtatatggtgtmcatcaggttttctcgctaaggctgggattatagactactctggtggatatgtgatccatttgtcttctggggttgctggcttcactgcagcatattgggttggtcctcggctaaccaaggacagagaaaggttccctcctaacaacatccttcttatgatggctggggcaggattgctgtggatgggttggacagggttcaatggtggggatccttatgtagtgagtgtcgatgcttcgttggccgttttgaacacgcatgtgtgcactgccactagcctgctcacatggctaatcctcgacattgcggtctttggaaaagcttctataattggtgcagtgcaaggcatgatcactggcttggtttgcatcacacctgcagctggggttgtacaaggatgggcagccataatcatggggattttctcaggctccattccctggttcaccatgatggttgtccacaaaaaatctgagctccttcagaaagtggacgacacaatggctgttctgcatactcacgccattgctggaagcctcggaggaatcctgaccggtctatttgcttccccaaagcttaaccgtttgttctatggctacggagttgatgtagattccacttatgttggcctattttatggtcttcacatgggagaagtcagtaagggattcaggcaaattggaattcagcttctrgggattgtgtttgtgcttgtgtttaacgtcatagccacaagcctaatatgtcttgtggtgcaactcatcgtgcccctgagaatgtctgatgaagatatggagattggggatgaagcagctcatggggaggaggcctatgctatctggggtcaaggtgacaagcttgagaactcaaggtatgggagttcagtctacggtgatgttgaattgcctatgcccaagcccaggggagctggccaagttgagatgacatga

SEQ ID NO: 67518 - protein, 482 aa, Vitis vinifera
  misc_feature (167)..(167): The Xaa at location 167 stands for Pro, or Thr.
MADTSFPPNLLPDEASPEWMNKGDNAWQLTAATLVGLQTVPGLIILYGGAVKKKWAVNSAFMAFYAFACVLICWVGWGYRMSFGTKLVPFWGRANVALDQVYLLDPAFIGKFPQATMVFFQFVFAAITVVLIAGALLGRMNFYAWMLFVPLWLTFSYTFVAFSIWCXSGFLAKAGIIDYSGGYVIHLSSGVAGFTAAYWVGPRLTKDRERFPPNNILLMMAGAGLLWMGWTGFNGGDPYVVSVDASLAVLNTHVCTATSLLTWLILDIAVFGKASIIGAVQGMITGLVCITPAAGVVQGWAAIIMGIFSGSIPWFTMMVVHKKSELLQKVDDTMAVLHTHAIAGSLGGILTGLFASPKLNRLFYGYGVDVDSTYVGLFYGLHMGEVSKGFRQIGIQLLGIVFVLVFNVIATSLICLVVQLIVPLRMSDEDMEIGDEAAHGEEAYAIWGQGDKLENSRYGSSVYGDVELPMPKPRGAGQVEMT

SEQ ID NO: 67519 - DNA, 1410 bp, Vitis vinifera
  CDS (1)..(1410)
  misc_feature (21)..(21): r is g or a
  misc_feature (43)..(43): y is t or c
  misc_feature (297)..(297): y is t or c
  misc_feature (325)..(325): r is g or a
  misc_feature (330)..(330): r is g or a
  misc_feature (332)..(332): m is a or c
  misc_feature (334)..(334): r is g or a
  misc_feature (492)..(492): w is a or t
  misc_feature (591)..(591): r is g or a
  misc_feature (1071)..(1071): r is g or a
  misc_feature (1103)..(1103): m is a or c
  misc_feature (1112)..(1112): m is a or c
  misc_feature (1114)..(1114): y is t or c
  misc_feature (1153)..(1153): w is a or t
  misc_feature (1210)..(1210): k is g or t
atgagttcgccgcaacttgargggcctcttccttcgggacttyggccggatgaggggtctccggaatggatgaacaaaggggacaatgcatgggagctgacagcagcagctttggtggccatacagagcgttcctgggcttgttatcttgtatggtagcatggtgaagaagaaatgggcagtgaattcttccttcatggccctttacgcctttgcggtggtgctcatatgttgggtgctctgggcccatgagatgtccttcggggaaaggatgtgtcctatcctgggaaagcccaaytttgcattgggccagaagtatctgctgragagrgmaraaaattggtacatcccgaccgccacttacgtgttctatcaatttgcatttgctgccatcactgtcatattgcttggtgggtcggtgcttgggcggatgaatttctatgcttggatgtcctttgttcctctgtggctcaccttttcttacaccattggwgcctttaacatttggggcagtgggcttcttcaaaaccgtatcatagatttctcgggtggttatgtcattcatctttcgtccggggtggctggtttcacrgcggcttattgggtaggaccaaggctttcacatgacaggcaacactttccaccaaacaacataattcacatgttgggaggagcaggcttcctatgggtgggttggacaggtttcaacggcgggtctccatttgcagcgaatgagatcacttcactagctattctcaacacccatatctgcacagccaccagcctcttcgtgtggctgtcaatggacatgttggtttataagaaaagctctgccattggggctgtgcaggggatgatcactggtctcgtctgcatcactcctgctgcagggataggattggaaccatgggcagcagggttgatgggagcaatgtctggttcaataccctggtacaccatgatggttttgcacaggaaatcagctttcttccagaaggttgatgacaccttgggtgccttccacacacacgcagtggctggcactttgggaggactcctctctggaatattrgccaaacccagccttttgaagctatactacamggagacaamgyatggaccaggcttattttatggtctaattcagggtagawtaatggacagtctaaaacaaatgggcttccagattctaggagctgtttttgtggctkcatggaatgtggttgtgacaagcttgatctgtatattcttaagccgctttcttaatctcagaatggacgaaagagaccttgagataggtgatgatgcagcgcatggagaggaagcgtatgccctatggggagacggagagaggaggccaacacacccacatcgtcgcctcacaattccttccatgtgccgtcattgttaa

SEQ ID NO: 67520 - protein, 469 aa, Vitis vinifera
  misc_feature (15)..(15): The Xaa at location 15 stands for Arg, or Trp.
  misc_feature (109)..(109): The Xaa at location 109 stands for Glu, or Lys.
  misc_feature (111)..(111): The Xaa at location 111 stands for Ala, or Glu.
  misc_feature (112)..(112): The Xaa at location 112 stands for Glu, or Lys.
  misc_feature (368)..(368): The Xaa at location 368 stands for Lys, or Thr.
  misc_feature (371)..(371): The Xaa at location 371 stands for Lys, or Thr.
  misc_feature (372)..(372): The Xaa at location 372 stands for His, or Tyr.
  misc_feature (385)..(385): The Xaa at location 385 stands for Ile, or Leu.
  misc_feature (404)..(404): The Xaa at location 404 stands for Ala, or Ser.
MSSPQLEGPLPSGLXPDEGSPEWMNKGDNAWELTAAALVAIQSVPGLVILYGSMVKKKWAVNSSFMALYAFAVVLICWVLWAHEMSFGERMCPILGKPNFALGQKYLLXRXXNWYIPTATYVFYQFAFAAITVILLGGSVLGRMNFYAWMSFVPLWLTFSYTIGAFNIWGSGLLQNRIIDFSGGYVIHLSSGVAGFTAAYWVGPRLSHDRQHFPPNNIIHMLGGAGFLWVGWTGFNGGSPFAANEITSLAILNTHICTATSLFVWLSMDMLVYKKSSAIGAVQGMITGLVCITPAAGIGLEPWAAGLMGAMSGSIPWYTMMVLHRKSAFFQKVDDTLGAFHTHAVAGTLGGLLSGILAKPSLLKLYYXETXXGPGLFYGLIQGRXMDSLKQMGFQILGAVFVAXWNVVVTSLICIFLSRFLNLRMDERDLEIGDDAAHGEEAYALWGDGERRPTHPHRRLTIPSMCRHC

SEQ ID NO: 67521 - DNA, 1488 bp, Vitis vinifera
  CDS (1)..(1488)
atgaaaaagcttagtgggaaaacagactactctaggaatctgggacctactcagcaatggcagctgcatctgttgttcccggtagcataccagacatcgctccccactgtacctgactggctaaacaagggtgataacacatggcagatgatctctgccgccctggtggccatgcaaggcatgcctggactggtaatcctgtatgctggccttgtcaagaagaaatgggcactcaactcagccttcatggccctctatgcctttgccgcagtcatgccttgttgggtcctctgggcttacaagatgtcgtttggccatcgccttctacctttctggggcaaagcaggccttgccgtttcccaagatttcttaatcccccgagctactctcccctcgacacgttatgtaaatggggattttatagcgcaagcagctagtccattgtaccccatggctaccatggttttcttccagtttgcttttgctgctgtgactgtgatactccttgctgggtctgtgctgggtcgaatgagcatcaaagcttggatggcctttgtaccactatggattactttttcttacagcattggcgctttcagtatatggggcggcggtttcctctttcaatggggcatcatggactattccggtggttatgtcgtccatttagcttctggtgctgcaggattcacagcagcttattgggtgggaccgagattgcaggtagaccgggaacaattcccaccaaacaatcttctactggcactggctggtgctggtattctttggatggggtggacaggtttcaatggaggtgacccttttgctgcaaatgtcgattcctcccttgcagttctcaatactcatatatgcgcaacaaccagtctccttgtatggactttctgggatacgtttttcttcaagaagccctcagcaattggcgccatccagggaatgataactgggttggtctgcatcacccctggtgcaggtcttgttcagggatgggctgcattgataatgggcattgcatctggaagtgtcccctggtacaccatgatgtgtcttagtaagaaactccccttcctgcagaagattgatgacaccctcggtgtcttccatactcatgctgtggctggaaccttgggtggggctcttacgggactctttgctcatccagatctctctgccttattcatagtggtacccaattccagaggggccttctatggtggtcggggcggtgtccaatttctgaagcagttggttggtgcaagcttcataataggttggaatgtaatagttacatccatcatcctcctggtgattagcaagtttataccccttcgtatgtctgaggaagagctcataataggggatgatgcagcgcatggagaagaagcttatgctcttgctggacaaggagcaagagaaaaatctacatacaataatatgcagctgcaaaacgcctcaggctttgagctttga

SEQ ID NO: 67522 - protein, 495 aa, Vitis vinifera
MKKLSGKTDYSRNLGPTQQWQLHLLFPVAYQTSLPTVPDWLNKGDNTWQMISAALVAMQGMPGLVILYAGLVKKKWALNSAFMALYAFAAVMPCWVLWAYKMSFGHRLLPFWGKAGLAVSQDFLIPRATLPSTRYVNGDFIAQAASPLYPMATMVFFQFAFAAVTVILLAGSVLGRMSIKAWMAFVPLWITFSYSIGAFSIWGGGFLFQWGIMDYSGGYVVHLASGAAGFTAAYWVGPRLQVDREQFPPNNLLLALAGAGILWMGWTGFNGGDPFAANVDSSLAVLNTHICATTSLLVWTFWDTFFFKKPSAIGAIQGMITGLVCITPGAGLVQGWAALIMGIASGSVPWYTMMCLSKKLPFLQKIDDTLGVFHTHAVAGTLGGALTGLFAHPDLSALFIVVPNSRGAFYGGRGGVQFLKQLVGASFIIGWNVIVTSIILLVISKFIPLRMSEEELIIGDDAAHGEEAYALAGQGAREKSTYNNMQLQNASGFEL

SEQ ID NO: 67523 - DNA, 1311 bp, Azotobacter vinelandii
  CDS (1)..(1311): transl_table=11
atgacgctgcgcaaaggcgcagggtcttgctgccctttcttccctcttcctgccccgtcatggccagccgcccaggaggctacgctggattcgggcgataccgcctggatgctgaccgccacggcgctggtgctgttcatgaccattcccggcctggcgctgttctacggcggcatggtgcgttcgaagaacctgctctcggtgatgatgcaatgcttcgccatcaccggcctgatcagcgtgctctgggtcctgttcggttatagcttggccttcgacaccgccggcatggaggagggggtgctcaacttcagttccttcgtcggcggtctggacaaggccttcctcagtggcctgaccaccgacagcctggtcggcacctttcccgaaagcgtcttcatcaccttccagatgaccttcgccatcatcactccggcgctgatcaccggtgccttcgccgagcgcatgaagttctcgtcgatgctggtgttcatgtcggcctggttcctgctggtctacgcaccgatcgcccatatggtctggagcggcaacggcgcgctgatgtgggattggggcgtgctcgacttcgccggcggcaccgtggtgcacatcaacgccggtgtcgccggcctggtcgcctgcctggtgctgggcaagcgcaagggctaccccggagtcgccatgaccccgcacaacctcggctacaccctggtcggcgcggccatgctctgggtcggctggttcggcttcaacgccggctcgcgatcgcgcaacggcaccgccggcatggccatgctggtgacccagatcgccaccgccgccgccgcgctggcctggatccccgccgagtggctgacccacggcaagccgagccctgggcatcgcctccggcgtggtcgcgcctggtggcatcaccccggccgcggtaccgtcggcccgatgggcgccctggtgatcggcctggcttccggctcgatctgtttctactgcgccactgccgtgaagcgccgcttcggctatgacgattctctcgacgccttcggcgtgcacggtgtcggcggcatcgtcggcgcggtgctgaccggcctgttcgcggctccggccctgggcggtttcggcgaaatcgacagtatcgccagccaactgtggatccagatcaagggcgtgctcttcaccgtgatctacaccggcgtcgccaccttcgtgatcctcaaggcgatcgagcgggtgataggcctgcgcatcagcgaagaggaagaaaccatgggtctcgacctctccctgcacaacgagcgcggttacaacctctga

SEQ ID NO: 67524 - protein, 436 aa, Azotobacter vinelandii
MTLRKGAGSCCPFFPLPAPSWPAAQEATLDSGDTAWMLTATALVLFMTIPGLALFYGGMVRSKNLLSVMMQCFAITGLISVLWVLFGYSLAFDTAGMEEGVLNFSSFVGGLDKAFLSGLTTDSLVGTFPESVFITFQMTFAIITPALITGAFAERMKFSSMLVFMSAWFLLVYAPIAHMVWSGNGALMWDWGVLDFAGGTVVHINAGVAGLVACLVLGKRKGYPGVAMTPHNLGYTLVGAAMLWVGWFGFNAGSRSRNGTAGMAMLVTQIATAAAALAWIPAEWLTHGKPSPGHRLRRGRAWWHHPGRGTVGPMGALVIGLASGSICFYCATAVKRRFGYDDSLDAFGVHGVGGIVGAVLTGLFAAPALGGFGEIDSIASQLWIQIKGVLFTVIYTGVATFVILKAIERVIGLRISEEEETMGLDLSLHNERGYNL

SEQ ID NO: 67525 - DNA, 1317 bp, Azospirillum brasilense
  CDS (1)..(1317): transl_table=11
atgagccgtctcttcaccctcgccgcgccgacgatggcggcgattctgggcttggccggtctgcctgccgccgccctcgcccaggaaagcgccgccgccgcggccgaacccaccctgagcagcggcgacacggcttggatgctggtcgccacggcgctggttctgttcatgaccatcccgggtctggctctgttctacggcggcatggtccgcaagatgaacgtgctgtcggtcgtgatgcagagctttgcgatctgctgcctggtcagcatcctgtggttcttcgccggttacagcatcgcctttaccgaaggcaccccgtatttcggcagcctgtccaagttcatgctggccggcatcaccaaggacagcctgacgggcgtcattcccgagacgatcttcgtcgtctttcagatgaccttcgccatcatcaccccggccctgatcaccggcgccttcgccgaccgcatgaagttctcctcgatgctggtcttcacgggcctgtggtcgctgatcgtctacgcgccgatcacccactgggtctggggtccgggcggctatctggcgggtgacggcgtgctcgactacgccggcggcaccgtggtgcacatcaacgcgggcgtggccggtctggtcgccgccatcgtgctgggcaagcgcaagggctatccgaacgagaacttcgctccgcacaacctggtgctcagcctgatcggcgcctcgatgctgtgggtcggctggttcggcttcaacgcgggttccgccgtggccgccgacggccgtgcgggcatggccatgctggtcacgcagatcgccgccgccaccgccgccatgtcctggctgctggtcgagtgggccaccaagggcaagggttcggttctcggcatcatctccggcgccatcgccggtctggtcgccatcaccccggcctcgggcttcgtcggtccgaccggcgccctggtcatcggtctggccgccggcgtgatctgctactggggcgccaccggcctgaagcgcgccctcggctatgacgactcgctggacgccttcggggtgcacggcgtgggcggcatcgtcggcgccatcctgaccggcgtcttcgcccaggaagccatcggcggcaccgccggcgccctggaaggcaacgtcggccagatctggacgcaggtctacggcattctcgccaccatcgtctactcggcggtcggctccttcatcatcctgaaggtcatcgacgtggtgatgggcctgcgcgtcgacgaggacgtcgagcgcgacggcctggacctcgccctgcacggcgagaccatccactaa

SEQ ID NO: 67526 - protein, 438 aa, Azospirillum brasilense
MSRLFTLAAPTMAAILGLAGLPAAALAQESAAAAAEPTLSSGDTAWMLVATALVLFMTIPGLALFYGGMVRKMNVLSVVMQSFAICCLVSILWFFAGYSIAFTEGTPYFGSLSKFMLAGITKDSLTGVIPETIFVVFQMTFAIITPALITGAFADRMKFSSMLVFTGLWSLIVYAPITHWVWGPGGYLAGDGVLDYAGGTVVHINAGVAGLVAAIVLGKRKGYPNENFAPHNLVLSLIGASMLWVGWFGFNAGSAVAADGRAGMAMLVTQIAAATAAMSWLLVEWATKGKGSVLGIISGAIAGLVAITPASGFVGPTGALVIGLAAGVICYWGATGLKRALGYDDSLDAFGVHGVGGIVGAILTGVFAQEAIGGTAGALEGNVGQIWTQVYGILATIVYSAVGSFIILKVIDVVMGLRVDEDVERDGLDLALHGETIH

SEQ ID NO: 67527 - DNA, 1365 bp, Ostreococcus tauri
  CDS (1)..(1365)
atgtcgactgcggtggaggaaaggtcgacggcgagtaagctgcgagcgccgctcgcggcgggcgcgctcggattggccgcggtgacgctcggtggaccggcgagcgcggcggcggccgcggtgccggcgatcgtcgccgcggacacgtgctggattttgatttccagcgcattggtgctcttcatgaccattccgggtctcgcggcgttctacgccggtctggtgcgacgcacgaacacgctcagcgttctgattcagtgcttcgcactcactgcgcacatgtctgcgctgtggttcctgtgtggatattccctgtccttcagcacggtcgggatgaaggagggcgttgttggtttggcgtccttcatcggcggtctagacaaagtggcgctcgccggggtatccatgtcctccgtcgcgggtacgatcccggaagcgctctgggttttgtatcaaatgacgtttgcgattatcacgccggcactcatgatcggctcgctcgttgagcgcatgaagtttaactctgtgatgtggttctccacgctttggatgttcgccgtttacttcccggcgtgccatatggtttggggcggcgccggcggatatttcgcggacatgggcgtccttgacttcgccggtggcattgtcgtacacattaccgccggtatcggtgcgctcgttgccgccatgtaccttggaccgcgcaaggaggcgaagatccatcaaggcaacttggtgctcacattcctcggtaccgccatgttgtgggtgggctggttcggtttcaacggtggttccgccggtgcggcgtctgccggtgccgctttcgcttgcctcgcgacgcagctctctgcgtccgttgccgccatcgcttggacggctctcgacgtgattgagaacggcaaggtgtccgtcctcggtacgtgcacggcgtccattgccggtcttgcggccatcaccccggccgccggtttcatcggccctgtcggtgcttgcttgatgggtcttgcctctgctatcgtgtgccgattcttctccaccaatgtcaaggagtacttcggctatgatgatgcccttgatgtcttcggagttcacggtatcggcggctttttgggcaccgtcatgctcggtatcctctgccacccgttcttcggcggattcaacgacgttccgatgatgaagcaaaccgccgtgcaaatgttcgccgccgttgctactgcagtgtacaccgctggcgcctcttgggcatgcctcaaggcgacggacattatcacgaacggcatccgcgtcccggctgaagcggaagagatgggcctcgacgtgtattctcacggcgagaccgcgtactctccgatgccgcgataa

SEQ ID NO: 67528 - protein, 454 aa, Ostreococcus tauri
MSTAVEERSTASKLRAPLAAGALGLAAVTLGGPASAAAAAVPAIVAADTCWILISSALVLFMTIPGLAAFYAGLVRRTNTLSVLIQCFALTAHMSALWFLCGYSLSFSTVGMKEGVVGLASFIGGLDKVALAGVSMSSVAGTIPEALWVLYQMTFAIITPALMIGSLVERMKFNSVMWFSTLWMFAVYFPACHMVWGGAGGYFADMGVLDFAGGIVVHITAGIGALVAAMYLGPRKEAKIHQGNLVLTFLGTAMLWVGWFGFNGGSAGAASAGAAFACLATQLSASVAAIAWTALDVIENGKVSVLGTCTASIAGLAAITPAAGFIGPVGACLMGLASAIVCRFFSTNVKEYFGYDDALDVFGVHGIGGFLGTVMLGILCHPFFGGFNDVPMMKQTAVQMFAAVATAVYTAGASWACLKATDIITNGIRVPAEAEEMGLDVYSHGETAYSPMPR

SEQ ID NO: 67529 - DNA, 1497 bp, Oryza sativa
  CDS (1)..(1497)
atggcgacgtgcgcggcggacctggcgccgctgctggggccggtggcggcgaacgcgacggactacctgtgcaaccggttcgccgacacgacgtcggcggtggacgcgacgtacctgctcttctcggcgtacctcgtgttcgccatgcagctcgggttcgcgatgctctgcgccgggtcggtgcgggccaagaacacgatgaacatcatgctcaccaacgtgctcgacgccgcggccggggcgctcttctactacctcttcggcttcgccttcgccttcggcacgccgtccaacggcttcatcgggaagcagttcttcggcctcaagcacatgccgcagaccgggttcgactacgacttcttcctcttccagtgggccttcgccatcgccgccgccgggatcacgtcgggctccatcgccgagaggacgcagttcgtcgcctacctcatctactccgccttcctcaccgggttcgtctacccggtggtgtcccactggatctggtccgccgatgggtgggcctctgcctcccgcacgtccggacctctgctgttcggctccggtgtcatcgacttcgccggctccggcgtcgtccacatggtcggcggtgtcgccgggctctggggcgcgctcatcgagggcccccgcatcgggaggttcgaccacgccggccgatcggtggcgctcaagggccacagcgcgtcgctcgtcgtgcttggcaccttcctgctgtggttcggctggtacggattcaaccccgggtcgttcaccaccatcctcaagacgtacggcccggccggcggcatcaacgggcagtggtccggagtcggccgcaccgccgtgacgacgaccctggccgccagcgtggcggcgctcaccacgctgttcgggaagcggctccagacggggcactggaacgtggtcgacgtctgcaacggcctcctcggcgggttcgccgccatcaccgccgggtgcagcgtcgtcgacccgtgggccgcgatcatctgcgggttcgtctcggcgtgggtgctcatcggcctcaacgcgctcgccgcgcgcctcaagttcgacgacccgctcgaggccgcccagctccacggcgggtgcggcgcgtgggggatcctcttcaccgcgctcttcgcgaggcagaagtacgtcgaggagatctacggcgccggccggccgtacggcctgttcatgggcggcggcggcaagctgctcgccgcgcacgtcatccagatcctggtcatcttcgggtgggtcagctgcaccatgggacctctcttctacgggctcaagaagctcggcctgctccgcatctccgccgaggacgagacgtccggcatggacctgacacggcacggcgggttcgcgtacgtctaccacgacgaggacgagcacgacaagtctggggttggtgggttcatgctccggtccgcgcagacccgcgtcgagccggcggcggcggctgcctccaacagcaacaaccaagtgtaa

SEQ ID NO: 67530 - protein, 498 aa, Oryza sativa
MATCAADLAPLLGPVAANATDYLCNRFADTTSAVDATYLLFSAYLVFAMQLGFAMLCAGSVRAKNTMNIMLTNVLDAAAGALFYYLFGFAFAFGTPSNGFIGKQFFGLKHMPQTGFDYDFFLFQWAFAIAAAGITSGSIAERTQFVAYLIYSAFLTGFVYPVVSHWIWSADGWASASRTSGPLLFGSGVIDFAGSGVVHMVGGVAGLWGALIEGPRIGRFDHAGRSVALKGHSASLVVLGTFLLWFGWYGFNPGSFTTILKTYGPAGGINGQWSGVGRTAVTTTLAASVAALTTLFGKRLQTGHWNVVDVCNGLLGGFAAITAGCSVVDPWAAIICGFVSAWVLIGLNALAARLKFDDPLEAAQLHGGCGAWGILFTALFARQKYVEEIYGAGRPYGLFMGGGGKLLAAHVIQILVIFGWVSCTMGPLFYGLKKLGLLRISAEDETSGMDLTRHGGFAYVYHDEDEHDKSGVGGFMLRSAQTRVEPAAAAASNSNNQV

SEQ ID NO: 67531 - DNA, 1464 bp, Taxodium distichum
  CDS (1)..(1464)
atggctaccacagttccccttgcgtaccagaacgccacgggaataccaaattggcttaacaaaggagacaatgcatggcaaatggtagctgcaactgttgttggattgcaaagcatgccaggccttgttatcctctatggaagcattgtaaagaagaaatgggctgttaattctgcattcatggctctctatgcatttgcagctgttctgatctgttgggtgacttgggcttataaaatgtcatttggggatgaactccttccattctggggtaaggcgggacctgcacttggccaaaagtttctcatcaagcaagccaaagttcctgaaacagagcataagtacaataatggaaccatcgagacagaagctctggagccctttttccctatggctacccttgtgttttttcagttcgtctttgcagccataacaatgattctcttggctggttctttgcttgcaagaatgaatatcaaagcatggatggcgtttgtgccactctggctcactttttcttatactgtaggagcttatagtttatggggaggaggattccttttccagtggggggtcattgatttctcaggtggttatgtgatccatctatcttctggaattgcagggtttacggcagcttattgggtaggacctaggttacaaaaggaccgtgaaagatttcctccaaacaatgtgctgctaatgctcgctggagctggttttttgtggttgggttggtgtggttttaatggaggcggcccttactctgccaatgttgtttcatccatggcagttttgaataccaacatatgtgcagccaccagtcttcttgtatggacttgcttggacgttatattctttaagaagccttcagtcattggagccgtgcagggaatgataactggacttgtctgtattaccccaggcgcaggtgttgtgcaaggatgggctgccattgtaatgggtgtgctctctggtagtattccatggtggaccatgatgatagttcacaaaaagtcggccttgctacagaaagttgatgatacattggctgtattccatacccacgcagttgcaggattactgggtggagcacttacaggccttcttgcagagcctactctctgtggcctcttcctcgcaataaaaaattccaagggagcattttatggagatggcatgcaatttgtcaagcaaatagtgggagctacttttatcattggctggaacattgttgtcacaagcataatcatgctagccatccagtttttcattccactgaggatgccagacgaggaacttttgataggagatgatgcagtacacggggaggaagcatatgctctgtggggtgatggggagaaatatgaccatacaaaacatgggtattctgatgagaggcaacattttaaagggaatggagttgggcatggtgcaggaggaggactaactatagagttgtga

SEQ ID NO: 67532 - protein, 487 aa, Taxodium distichum
MATTVPLAYQNATGIPNWLNKGDNAWQMVAATVVGLQSMPGLVILYGSIVKKKWAVNSAFMALYAFAAVLICWVTWAYKMSFGDELLPFWGKAGPALGQKFLIKQAKVPETEHKYNNGTIETEALEPFFPMATLVFFQFVFAAITMILLAGSLLARMNIKAWMAFVPLWLTFSYTVGAYSLWGGGFLFQWGVIDFSGGYVIHLSSGIAGFTAAYWVGPRLQKDRERFPPNNVLLMLAGAGFLWLGWCGFNGGGPYSANVVSSMAVLNTNICAATSLLVWTCLDVIFFKKPSVIGAVQGMITGLVCITPGAGVVQGWAAIVMGVLSGSIPWWTMMIVHKKSALLQKVDDTLAVFHTHAVAGLLGGALTGLLAEPTLCGLFLAIKNSKGAFYGDGMQFVKQIVGATFIIGWNIVVTSIIMLAIQFFIPLRMPDEELLIGDDAVHGEEAYALWGDGEKYDHTKHGYSDERQHFKGNGVGHGAGGGLTIEL

SEQ ID NO: 67533 - DNA, 1467 bp, Cryptomeria japonica
  CDS (1)..(1467)
atggctaccacagttccacttgcgtaccagaatgccacgggaataccaaattggcttaacaaaggagacaatgcatggcaaatggtagctgcaactgttgttggattgcaaagcatgccaggccttgttatcctctatggaagcattgtaaagaagaaatgggctgttaattctgcattcatggctctctatgcatttgcagctgttctgatctgttgggtgacttgggcttataaaatgtcatttggggatgaactccttccattctggggtaaggcgggacctgcacttggccaaaagtttctcatcaagcaagccaaagttcccgaaacagagcataagtacaataatggaaccatcgagacagaagctctcgagccctttttccctatggctacccttgtgttttttcagttcgtttttgcagccataacaatgattctcttggctggttctttgcttggaagaatgaatatcaaagcatggatggcatttgtgccactctggctcactttttcttatactgtaggagcgtatagtttatggggaggaggattccttttccagtggggggtcattgatttctcaggtggttatgtgattcatctatcttctggaattgcagggtttacagcagcttattgggtaggacctaggttacaaaaggaccgtgaaagatttcctccaaacaatgtgctgctaatgctcgctggagctggttttctgtggttgggctggtgtggttttaatggaggcggcccttactctgccaatgttgtttcatccatggcagttttgaataccaacatatgtgcagccaccagtcttcttgtatggacttgcttagacgttatattctttaagaagccttcagtcattggagccgttcagggaatgataactggacttgtctgtattaccccaggcgcaggtgtcgtgcaaggatgggctgccattgtaatgggtgtgctctctggtagtattccatggtggaccatgatgatagttcacaaaaagtcggccttgctacagaaagttgatgatacattggctgtattccatacccacgcagttgcaggattactgggtggagcacttacaggccttcttgcagagcctactctctgtggcctcttcctcgcagtaaaaaattccaagggagcattttatggggatggcatgcaatttgtcaagcaaatagtgggagctacttttatcattggctggaacattgttgtcacaaccataatcatgctagccatccagtttttcattccactgaggatgccagacgatgaacttttgataggagatgatgcagtacatggggaggaagcatatgctctgtgggctgatggggagaaatatgaccatacaaaacatggctcgtattctgatgagaggcaacattttaaagggaatggagttgggcagggtgcagctggaggactaactatggagttgtga

SEQ ID NO: 67534 - protein, 488 aa, Cryptomeria japonica
MATTVPLAYQNATGIPNWLNKGDNAWQMVAATVVGLQSMPGLVILYGSIVKKKWAVNSAFMALYAFAAVLICWVTWAYKMSFGDELLPFWGKAGPALGQKFLIKQAKVPETEHKYNNGTIETEALEPFFPMATLVFFQFVFAAITMILLAGSLLGRMNIKAWMAFVPLWLTFSYTVGAYSLWGGGFLFQWGVIDFSGGYVIHLSSGIAGFTAAYWVGPRLQKDRERFPPNNVLLMLAGAGFLWLGWCGFNGGGPYSANVVSSMAVLNTNICAATSLLVWTCLDVIFFKKPSVIGAVQGMITGLVCITPGAGVVQGWAAIVMGVLSGSIPWWTMMIVHKKSALLQKVDDTLAVFHTHAVAGLLGGALTGLLAEPTLCGLFLAVKNSKGAFYGDGMQFVKQIVGATFIIGWNIVVTTIIMLAIQFFIPLRMPDDELLIGDDAVHGEEAYALWADGEKYDHTKHGSYSDERQHFKGNGVGQGAAGGLTMEL

SEQ ID NO: 67535 - DNA, 1437 bp, Aspergillus oryzae
  CDS (1)..(1437)
atggcagaataccctgtggcctacaatgggtcggcgaccgggaccggaggtgactctctgacggaagatctcaacatctactacagctctggtgacatcgcatgggttattgtttcgacggctcttgtcttgttgatgattccaggagtcggattcttctattccggtcttgcccgtcggaagtcggcactttcgctactatggctctcgataatgtctgtcggaatagtctccttccagtggttcttctgggggtactctctcgctttctctcataccgccggaaaatatattggtgacttgagcaactttgggttcaaaggggtcctgggtgcgccatctgttggcagcgccaaggtcccagatctcttgtttgctgtcttccaaggcatgttcgcctgtattacagtggcactcgcggttggtgctgtcgcagagcgtggccgcatgcttccctgcatggtttttagctttgtctggtccaccatcatctacgaccctatcgcatgctggacctggaactcgagcggttgggtggcaaaccttggtggtcttgattatgcgggtggtacacccgttcacatcgcctctggttgtaccgcattggcatactcgctgatgcttggaaagcgtcgtggacacggcacccacgagctcaactatcgcccgcacaacgtaacacatgtggtcatcggtacggtattcctttgggttggatggttcggattcaatgccggctccgccttgagcgccaatcttcgtgccgtcatggcagccgtggtcaccaacctcgccgccgccgtggggggagttacctggtgtatcctggactaccggcttgagaggaagtggtctactgttggtttctgctccggtgtgattgccggcttggtggccatcacccccgcatcgggctttgtcactccctgggcttcattcattttcggtgttgtgggagctgtcgcttgcaactatgccaccaaactcaagtacgtgatcaaggttgacgacgcgcttgatatcttcgctgtccacggtattggaggtctggtgggcaaccttttgactggacttttcgctgctgattacatcgcccaccttgatggctctaccacaatcgatggcggctggatcaaccacaactacatccagctagcttatcagctcgccgactccgtcaccggaatggcatactctttcttcggaagctgcattatcctcttcatcatcaacctgattcctggcctcagcttgcgtgccccggaagaagacgagatcatgggcattgacgacgccgaaattggcgagtttgcttatgactacgtcgagattacccgcgacgtgatcagtgccgccaacagtgagagcggcgagaatgcttccaagcgtagcttgactccaaccggcaacgaaacgaccatagaggccaaggcttag

SEQ ID NO: 67536 - protein, 478 aa, Aspergillus oryzae
MAEYPVAYNGSATGTGGDSLTEDLNIYYSSGDIAWVIVSTALVLLMIPGVGFFYSGLARRKSALSLLWLSIMSVGIVSFQWFFWGYSLAFSHTAGKYIGDLSNFGFKGVLGAPSVGSAKVPDLLFAVFQGMFACITVALAVGAVAERGRMLPCMVFSFVWSTIIYDPIACWTWNSSGWVANLGGLDYAGGTPVHIASGCTALAYSLMLGKRRGHGTHELNYRPHNVTHVVIGTVFLWVGWFGFNAGSALSANLRAVMAAVVTNLAAAVGGVTWCILDYRLERKWSTVGFCSGVIAGLVAITPASGFVTPWASFIFGVVGAVACNYATKLKYVIKVDDALDIFAVHGIGGLVGNLLTGLFAADYIAHLDGSTTIDGGWINHNYIQLAYQLADSVTGMAYSFFGSCIILFIINLIPGLSLRAPEEDEIMGIDDAEIGEFAYDYVEITRDVISAANSESGENASKRSLTPTGNETTIEAKA

SEQ ID NO: 67537 - DNA, 1422 bp, Aspergillus oryzae
  CDS (1)..(1422)
atggtcgcgcagccggtgtacaatgcttctatgccggaagggggcgatccaacaagagtcgacgtcaatgcacaatatgcgggattggagtacaattatatctatatcaccgcctgcacctttattgtcttcttaatcctgcctgggatcgccttcctctacagtggattaacacggcggaagtccgcattggccctcctcttccaaggctttatgatccttgcggttgtcacattccaatggttgttctgggggtattctctagcgtattccagagatggaggaccatttatcggcacgctgcagaattttggactgatgaacgtcatggtggcaccctctcccggttccgccgtgcttccggagatcgtcttctgcctattccagcttcttttctgcgcttgcacggtaatgatccttgcgggcggcgcctttgaacgaggcaacattttgccgtctctgatcttcagcttcttctgggccacgatcgtctattgccccttagccaggtggacatggagcagcaacggttggctttacaaattcggggctatagacttcgctggtggtggtcccgtccatatagcttcgggctgtgccgctttagcatacgcgctggttctcgggaagcggttacaccatggagaagcctcgccgcgcaaaccccacaacacaacgttggtatttctcggaacagttctcatctggacaggatggcttgggttcaacggtggatcgagtcttaatgccagtatgcgtgctatggtggccgtcttcaacaccaatacggcgggatgcacggggatcctggggtgggtcctagtcgatatgatcaaacacaggggtagattctctgtggttggggcctgcgaaggcgccattgccggtctcgtagggatcacaccagctgccggctgtgtttctctttggctggcggcttgtattgggttcattaccggcatcgtctgttcatcactccagaatattaatgattggctcagggttgacgagggcatggatgtcttcaagcttcacggagttggtggcatagtaggcgccttcttgacggggcttttcgcaagtgaatccatttcagccctggatggggccagtcttactggcggcgctattgatggcaacggaattcaggtcggcagacagcttgctgagatctgtgctatcgccggatactcctttactgtgtcctacatcttgctcttcattctcaagtacatccctgggatgcgtctacgggtggatgaggagtcggagatgatgggtctcgaccgggcacagttctttgacgaacagatcggtgactggtcaatagcacatggcacgagcagtccgatgttgatgggggtgtccaaagagccatctgcgtcaaaagatgagcaaacagtgaaaacaccaggagtctag

SEQ ID NO: 67538 - protein, 473 aa, Aspergillus oryzae
MVAQPVYNASMPEGGDPTRVDVNAQYAGLEYNYIYITACTFIVFLILPGIAFLYSGLTRRKSALALLFQGFMILAVVTFQWLFWGYSLAYSRDGGPFIGTLQNFGLMNVMVAPSPGSAVLPEIVFCLFQLLFCACTVMILAGGAFERGNILPSLIFSFFWATIVYCPLARWTWSSNGWLYKFGAIDFAGGGPVHIASGCAALAYALVLGKRLHHGEASPRKPHNTTLVFLGTVLIWTGWLGFNGGSSLNASMRAMVAVFNTNTAGCTGILGWVLVDMIKHRGRFSVVGACEGAIAGLVGITPAAGCVSLWLAACIGFITGIVCSSLQNINDWLRVDEGMDVFKLHGVGGIVGAFLTGLFASESISALDGASLTGGAIDGNGIQVGRQLAEICAIAGYSFTVSYILLFILKYIPGMRLRVDEESEMMGLDRAQFFDEQIGDWSIAHGTSSPMLMGVSKEPSASKDEQTVKTPGV

SEQ ID NO: 67539 - DNA, 1350 bp, Aspergillus oryzae
  CDS (1)..(1350)
atgtctgtccaggctgcctgggaggcctgctcgaaaacagacactctcttcattttagtatgtagtgttttctgttggctgattatcccggcagtcggtctcgcctactcgggctattcgacgcgttacaacagcctggcctcattctacccaggcctcctagcagtagccgtctgttctattcaatggtggatgctcggatactcactagcctacggtgagggcaacagtgtattcggcggtttcagtaaaatcttccatattggcgtccttgctgaaccggtcggatcgatccccgagatcctcttctccgaattccaactaatcttctgcgccacggtctgcgcaatcgccatcggaggagcgtgcgagcgcggcagactgcttccactaatcccgttcatcttcctgtggtgcaccttcatctatgccccattagcccacatggtctggtcagagaatggcttcctggccaatctcggcgccctcgactttgccggcggcacaccagtgcacatctgtagcggcgcaacagcaacagccatgagcctctacctctcctacccactcttccgctccaaacgatccccaatccgcaccccccaacacctcatcctccacaaaccccacaacaccctctgccaactcctcgccctaatcatcatctggaacgcctggctcgccttcgacgccggcaccaccctcgccctcaacttcaaatccgtcatggccgcctgcgtcaccaacctctgcgccgcctccggcgccctcacctgggccagcctcacatactacgaaaccggtaaatggagcctagacagcaccttccttggcgcgatcgcaggactcgtcctcatcacgcccagcgcgggattcatcgacatgaccaccgcggtcgggttcggggttctcggcgcctctctcggtcgccaggcgctgcggattaagttcacgaagcgggctgcgctactgcgatgggtggataacggggatacatttgctacgcattgtctcgggggatttctggggactattgtgacgggtctgtttgctagacgggaggttgcggcgtatgatgggtcgacgattattaaggggggtgtggtgtttgatgggaattggggacagctttggattcagattgtcgaggctgttattgggtttgtgtggagttttggggggagctatgtgctgtatgctttggtggactgtgttcctgggtttgaggttttagggacggatgaggatattattgccgggatggatgcgtcgcagatgggggagtcattatatgctgcgcagtgggagggagaggaggattatcatccttttgagggtgttcggctttag

SEQ ID NO: 67540 - protein, 449 aa, Aspergillus oryzae
MSVQAAWEACSKTDTLFILVCSVFCWLIIPAVGLAYSGYSTRYNSLASFYPGLLAVAVCSIQWWMLGYSLAYGEGNSVFGGFSKIFHIGVLAEPVGSIPEILFSEFQLIFCATVCAIAIGGACERGRLLPLIPFIFLWCTFIYAPLAHMVWSENGFLANLGALDFAGGTPVHICSGATATAMSLYLSYPLFRSKRSPIRTPQHLILHKPHNTLCQLLALIIIWNAWLAFDAGTTLALNFKSVMAACVTNLCAASGALTWASLTYYETGKWSLDSTFLGAIAGLVLITPSAGFIDMTTAVGFGVLGASLGRQALRIKFTKRAALLRWVDNGDTFATHCLGGFLGTIVTGLFARREVAAYDGSTIIKGGVVFDGNWGQLWIQIVEAVIGFVWSFGGSYVLYALVDCVPGFEVLGTDEDIIAGMDASQMGESLYAAQWEGEEDYHPFEGVRL

SEQ ID NO: 67541 - DNA, 1686 bp, Aspergillus oryzae
  CDS (1)..(1686)
atgtcggacatcaaggcgcccttcgtccctgactatgcgtcttacaactggactggagccccatctaactatgactcgctggcgaccaatgagctgggtggtgactccagggtggagaacgtgaacaagtggtttcaatccggtgatcaagcgtatatcatcgtggcttccgccatggtcatggtcatgattcccggtctcggtttcctttattccggtcttgctcgccgtaaatcagccctgagtatgatttgggcctgtatggcttctttctctgtcgtcacgttccaatggtatttctggggctattcgcttgcattctcgcccacggccaccaacggatacatcggaaaccttcgtaacttcggcctgatgaagaccttggccgatccaagtcctggctctgttcttgtgcccaatctcctctatgccttctatcagatgcaattctgtggtgtcacggctgcgattatcatgggagctgttgctgaacgtggacgcttgctccccgccatggtgtttgtgttcgtctgggctacgatcgtatactgtcccttggcttgttgggtgtggaatgtgaatggctgggcaatgaactacggtgtattggattatgcgggtggtggtccggtcgagattggctccggtttttccgcactcgcctattcaatggttcttggtcgtcgccaggagcgcatgatgttgaacttccgccctcacaacgtctctctcattctccttggaaccgttttcttgtggtttggatggcttggcttcaacggtggctcagcctttggagccaatcttcgtgccaccatggcgtgctggaataccaacctgactgcggcttttggggccattagctgggtccttctcgattggcgcttagcgaggaaatggtccatggttggttggtgctctggcaccatctcgggcctggttgcagctaccccggcatcaggattcattaccccttgggctagtgtgattctgggtatagtcactggtattgtttgcaactactccaccaaggtgaaatactggattcgtatcgacgattccatggatgtgttagctgagcacggtatcgcgggtattgtcggtcttatcttcaacgcgcttttcgccgacgacgcgatcgtaggactggacggagtcaacactggtagcaaaatgggtggatggctgatccacaactacaagcaactctacattcaaatcgccttcattgtcgcctcagccgcctatgctttcgttgtgtctgccatcattgcctacgccatcaatgcaatccccggcctgaagctgcgcgcttctgaggaagccgaattgctcggtatggacgatgatcagcttggcgagttcgcctacgactacgtcgaagtccgtcgtgactatcttgcatggacccctcagaaacacgaccagctcgaagacggccaccatatccctgccgccgcacggtacggcatcggggagcacagcgaaatgatgcttgacggccatacccccatcggtattgacagtcgcggttgcagcgaaggcgactccggcatccaggaaatcaagatgtccccggcacctgcgccggcaatggcacccgccccacgtcaagttgccgaacaacatcccgctcacgagggatcaataccacccagtgtcgaggaggatgagaaaacacagtaa

SEQ ID NO: 67542 - protein, 561 aa, Aspergillus oryzae
MSDIKAPFVPDYASYNWTGAPSNYDSLATNELGGDSRVENVNKWFQSGDQAYIIVASAMVMVMIPGLGFLYSGLARRKSALSMIWACMASFSVVTFQWYFWGYSLAFSPTATNGYIGNLRNFGLMKTLADPSPGSVLVPNLLYAFYQMQFCGVTAAIIMGAVAERGRLLPAMVFVFVWATIVYCPLACWVWNVNGWAMNYGVLDYAGGGPVEIGSGFSALAYSMVLGRRQERMMLNFRPHNVSLILLGTVFLWFGWLGFNGGSAFGANLRATMACWNTNLTAAFGAISWVLLDWRLARKWSMVGWCSGTISGLVAATPASGFITPWASVILGIVTGIVCNYSTKVKYWIRIDDSMDVLAEHGIAGIVGLIFNALFADDAIVGLDGVNTGSKMGGWLIHNYKQLYIQIAFIVASAAYAFVVSAIIAYAINAIPGLKLRASEEAELLGMDDDQLGEFAYDYVEVRRDYLAWTPQKHDQLEDGHHIPAAARYGIGEHSEMMLDGHTPIGIDSRGCSEGDSGIQEIKMSPAPAPAMAPAPRQVAEQHPAHEGSIPPSVEEDEKTQ

SEQ ID NO: 67543 - DNA, 1533 bp, Herbaspirillum seropedicae
  CDS (1)..(1533): transl_table=11
atgagcatgaagaaaatgttttccggcgcgctcgccattggcgcgctgctgtttgcagtcagttttactgctccggcccaggcgcaggatgcgcccaagcctgaagctgcagcggctgccgcagcggccccggctgctgctcccgctgcacccaaggcggaagctgccgctcctgcggccgctgccccggccgcaccggctgccgctgccgccgctcccgcaccggtccccaacaagggcgataccgcctggatgctggtctgcaccgccttcgtcatcctcatgaccttgccgggcctgggcctgttctacggcggcctggtgcgcagcaagaacatgctgtcggtgctgatgcagtgcttcatgatcttctcgctgatctacatcctgtggttcgtctacggctacagcatcgcgttcaccgagggcaatgccttcttcggtggcttcgatcgcctgttcctgcacggtctgacgggtgactccaacaccggcaccttcagcaagggcgtggtcattccggagctggtcttcgtcgccttccagggtgcgttcgcggccatcactgtggcgctgatcattggcgccttcgccgaacgcgtgaagttctcggccgtgatcctgttctccatcctgtggttcaccttctcctacctgccgatggcccacatggtctggttctggccgggtccggacgccttcaccgacgctgccgctggtgaaaaggccaccgccatctcgggctggctgttccagaagggcgcgctggactacgcaggcggcacggtggtgcacatcaacgccgctatcgccggcctggtcggttcctatgtgatcggcaagcgtatcggtttcggcaaggaagccttcaagccgcatagcctgaccctgaccatggtcggcgcctcgctgctgtggttcggctggttcggcttcaacgccggctcgggtctggaagccaacggcactgctgccctggccttcgtcaacaccatcctggcaacggcggctgctgtgctgtcctggagcttcggcgaatggatcggcaagggcaagccctcgatgctgggcgccgcttccggcgcggtggctggtctggtggcgatcaccccggcggctggtttcgtgggcgtcatcggcgccgtggtcatgggcctgatcgctggcctgctgtgcctgtggggcgtgagcggcctgaagaagatcctgggttccgacgatgcgctggacgtgttcggcgtgcacggcgtgggcggcatcctgggcgccatcctgaccggcgtgttcgcagcccccagcctgggcggcaccggcatctacgactacgtggccaacgctgttgcgcctgactactccatcggcggccaggtctggatccagttccagggcgtgctgaccaccgtggtcctgtcgggtgtggtctccttcatcgcctacaagatcgttgacgtcgtcatcggcctgcgtgtgaccgaggaagaagaacgcgaaggcctggatatctccagccacggcgaatcggcttaccactaa

SEQ ID NO: 67544 - protein, 510 aa, Herbaspirillum seropedicae
MSMKKMFSGALAIGALLFAVSFTAPAQAQDAPKPEAAAAAAAAPAAAPAAPKAEAAAPAAAAPAAPAAAAAAPAPVPNKGDTAWMLVCTAFVILMTLPGLGLFYGGLVRSKNMLSVLMQCFMIFSLIYILWFVYGYSIAFTEGNAFFGGFDRLFLHGLTGDSNTGTFSKGVVIPELVFVAFQGAFAAITVALIIGAFAERVKFSAVILFSILWFTFSYLPMAHMVWFWPGPDAFTDAAAGEKATAISGWLFQKGALDYAGGTVVHINAAIAGLVGSYVIGKRIGFGKEAFKPHSLTLTMVGASLLWFGWFGFNAGSGLEANGTAALAFVNTILATAAAVLSWSFGEWIGKGKPSMLGAASGAVAGLVAITPAAGFVGVIGAVVMGLIAGLLCLWGVSGLKKILGSDDALDVFGVHGVGGILGAILTGVFAAPSLGGTGIYDYVANAVAPDYSIGGQVWIQFQGVLTTVVLSGVVSFIAYKIVDVVIGLRVTEEEEREGLDISSHGESAYH

SEQ ID NO: 67545 - DNA, 1596 bp, Ciona intestinalis
  CDS (1)..(1596)
atgaacgaaaacgaagcaatgcagcttgaattgctaagaaagcaaatggcaatcttgcaggaaaacttggaccagttcttcatgataataaacggcatgttcatattcttcatgcaatgtgggttcgcttttctggaagcaggatcagtaagaagtagtaacacagtcaatattcttatgaagaacacacttgacgttttcgttggttctttatcatttttcgcgttcggttatccatttgcatatggtcgtccgggcaactcgttcatcggccacaacaactttttcggggcaaatgtgcaatactttgagaaatcggtcatagcaaacaaccaaactttgggcggatatgaaaccagtagttcgtattttgcaaacttttttttccaatatgtgtttgcggccactgcagcgactgtggtatcgggcgctgtggcggaaagggccgacttctcatgttatataatctacagcttcactattacagggtttatatatccagtaggtgcgcactgggtttggtcgcccgatggatggcttaatacaggagcaggtactgggttaagcatgcaggactacgctggtagttgtgtggttcatgtatgtggaggcatggctgctttagccggagcaaaaatactcggtccgaggctaggaaggttttccgatgatggtttagataaaccaatacctggacacagcgtacctctcgtatcactaggggcattcattctattagttggtttcttatgttttaatggtggctctattcaacgcatatccaagaacggagatggccttgaagtatcactgtctgtaactaatacaatactgagtggctccgctgcaggtctatcgtctatgttaacgcatcgagtacacagtatggtgaaagggaaggggaagtattggtctttactaatgactaccaacggtggattgactggcatggtggcgtcgtgtgctggctgtaacgacattgctccttgggctgcactgctcaccggatctgtggctggggtggtttttgtgttcgctcgacaatttgttctatggttgaagatagacgacccactggatgcgatttccgttcatttgtttggaggaactgtcgggacacttgcggctccaattctcgctattcgtggtcaaacaattaacggggtttcggtgggaggtccaatatacggaggtggtgtggacgcatggaggggggttgggtggagcttggttggcttgttctctattgggttgtggtcggggttgtgctgtttcacgttattcacgacgttggacatggtgggtttaatgagaattccaaaatcggttgaagaaagtgggatcgatatgcagaagcatggggagcatgcttatccggaaacatttgtgagaatcatagacgacagaccagaaactccacggaaaaacaaagtggtcaaacggaatgtggcatctgcgctcgttgataaatccctgccagcgatcaccacgtcagcatgggatggtcaacatccatctgaagcaggctcctccacaaacggatgtatagaagatccaacaaggttatcaccaagcaccgcgtacaatcgcaaatag

SEQ ID NO: 67546 - protein, 531 aa, Ciona intestinalis
MNENEAMQLELLRKQMAILQENLDQFFMIINGMFIFFMQCGFAFLEAGSVRSSNTVNILMKNTLDVFVGSLSFFAFGYPFAYGRPGNSFIGHNNFFGANVQYFEKSVIANNQTLGGYETSSSYFANFFFQYVFAATAATVVSGAVAERADFSCYIIYSFTITGFIYPVGAHWVWSPDGWLNTGAGTGLSMQDYAGSCVVHVCGGMAALAGAKILGPRLGRFSDDGLDKPIPGHSVPLVSLGAFILLVGFLCFNGGSIQRISKNGDGLEVSLSVTNTILSGSAAGLSSMLTHRVHSMVKGKGKYWSLLMTTNGGLTGMVASCAGCNDIAPWAALLTGSVAGVVFVFARQFVLWLKIDDPLDAISVHLFGGTVGTLAAPILAIRGQTINGVSVGGPIYGGGVDAWRGVGWSLVGLFSIGLWSGLCCFTLFTTLDMVGLMRIPKSVEESGIDMQKHGEHAYPETFVRIIDDRPETPRKNKVVKRNVASALVDKSLPAITTSAWDGQHPSEAGSSTNGCIEDPTRLSPSTAYNRK

SEQ ID NO: 67547 - DNA, 1503 bp, Pichia angusta
  CDS (1)..(1503)
atgcctagacaatggacccgcttttttgaatataaatatctcgagatgcgcagattttctcgtctaatcaatactaattcattttttgcaacgatgaaagactcaatgactgaggacctcgctgcagactatgacaaggccgacatggtctgggtcatggtcagtggtgtgctggtctggattatgattcctggtgttggacttctgtactctgggctatctagaaagaaacatgctctttctctgttgtgggcatcgctcatggctatctgtttgatttccttccaatggttcttctgggggtactcgcttactttcggtaccaactcatctgtgtttttaggatcattggacaatttttgcctgatgaaagttcttggagattctaacgcactgtctactgtgccggacattgttttctgctttttccagggaatgtttgccatgatcaccggatgcattatgctcggtggtgcgtgcgagagagctagactgggcccaatgatggtgttcttgtttctctggatgactgtcgtttactgcccttgtgccatgtggacatggaacgctaacggctggcttgcaaccctcggtgcttacgactttgccggtggaggaccagtccaccaggcttctggtttcggagccttggcctacgctttgatctgtggtaagagacacgacccggttgctggttccaacttgcctaagtacagacctcattctgtcacaagtgtcgttctgggtactgttttcctgtggttcggatggtttggattcaacggaggatcttccggagatgcctccatcagaggattttacgcctgtgttaacaccaaccttgctgctgcttgcggtggccttgcttggatgttcctcgactacttcagatgcggccgtaaatggaccaccgtcggaatgtgctctggtgctgttgctggtcttgttggtatcactccggcagctggtttcgtgcctgtttactttgccgttccaatcggtgctctcactgcaattgcttgcaactactcggttgacatcaagaacatgattggaattgacgacggtctggatgtttggtgtcttcacggtgttggtggatttaccggttctgtgctgaccggtctgtttgctgcagactacatcattgctactgactatggtgtctctggtgagggaggatggctcaaccaccactacaagcagctcggctaccagctggcagccagtgtctccatcgacgcatggtcttttgttgtcacttccatcctcctgctggttcttaacagaattccattcctcaagatcagattgagcgaggaggaagaggagctgggtactgatgctgctcaaatcggcgaatttacttaccaggagtccagggtctatatcccagagccagtgagatctgtcaaaagtattccaggtaccaaggccaccaagtccaacgaactcgacgctgacgccgttccgcttccaaaagacgaaaaagttgacgtttaa

SEQ ID NO: 67548 - protein, 500 aa, Pichia angusta
MPRQWTRFFEYKYLEMRRFSRLINTNSFFATMKDSMTEDLAADYDKADMVWVMVSGVLVWIMIPGVGLLYSGLSRKKHALSLLWASLMAICLISFQWFFWGYSLTFGTNSSVFLGSLDNFCLMKVLGDSNALSTVPDIVFCFFQGMFAMITGCIMLGGACERARLGPMMVFLFLWMTVVYCPCAMWTWNANGWLATLGAYDFAGGGPVHQASGFGALAYALICGKRHDPVAGSNLPKYRPHSVTSVVLGTVFLWFGWFGFNGGSSGDASIRGFYACVNTNLAAACGGLAWMFLDYFRCGRKWTTVGMCSGAVAGLVGITPAAGFVPVYFAVPIGALTAIACNYSVDIKNMIGIDDGLDVWCLHGVGGFTGSVLTGLFAADYIIATDYGVSGEGGWLNHHYKQLGYQLAASVSIDAWSFVVTSILLLVLNRIPFLKIRLSEEEEELGTDAAQIGEFTYQESRVYIPEPVRSVKSIPGTKATKSNELDADAVPLPKDEKVDV

SEQ ID NO: 67549 - DNA, 1542 bp, Camellia sinensis
  CDS (1)..(1542)
atggcttccactttgggctgctcagccacagacctcgtcccccacctcaccggcgtcaacaacgccaccgcggtcgcagacttcatctgcggccgcttagacgccgtctccaccaagctctccgacaccacctacgccgtcgacaccacctacctcctcttctcagcctacctagtcttcgccatgcagctcggcttcgccatgctctgcgccggctccgtccgcgccaaaaacaccatgaacatcatgctcaccaacgtcctcgacgctgccgccggcggcctctcctactacctcttcggcttcgctttcgctttcggctccggctcccgctccaacgccttcatcggccactactccttcgccctcactggcgtcccatcagctacccacgactacagcttctttctctaccaatgggctttcgctatagccgccgccggaatcactagcggttccatagccgagcgaactcagttcgtggcttacctcatctactcctccttcttaaccgcctttgtctaccccatcgtctcccactgggtctggtctggcgacggctggctcagcgccagccgtacctccggcgccctcttgttcagctccggcgccatcgacttcgccggctcaggcgtcgtccacatggtcggcggcatcgccggtctctggggagccctaatcgaaggcccgagaatcggccgattcgaccggtccggcaggtccgtcgcgttgcgaggtcacagcgcttcgctcgttgttctcggctcgttcctcctctggttcggctggtacgggttcaaccccggttcgtttttaaccatcctgaaatcgtacggtactgccgggacttattacgggcaatggagcgccgtagggaggacagctgtgactacaacattggctgggtgcacagccgcacttacgaccttgtttggcaagagattattggatggacactggaatgtcgttgatgtgtgtaacggtttgttagggggttttgctgcgatcacctcagggtgttcggtggtagagccgtgggctgcaatcgtgtgtgggttcgtgtcagcttgggttttgatcgggtgtaacaaggttgcagagaagttgaagtacgatgatccactggaggcggcgcaactccacgggggttgtgggtcgtgggggattttattcaccgggttgttcgcgaagaagaagtatgtcgacgaggtgtattcggcggggcggccgtacgggttgtttatgggtggcggaggaaagcttctggcggcgcagcttattgagatcttagttattttcgggtgggtgtcggtgacaatgggcccactattttatggattgaaaaaattgaagttgttgcggatctcgagggaggatgagatggcggggatggatctgaccaggcatggtgggtttgcatacatctatcgtgatgaagatgatctcgctaatagacctgggtttatgatgaggaaggtcgagcctcagaactcaagtcccacacctgatcacaactcatcatcaccagctgaagctgtgtag

SEQ ID NO: 67550 - protein, 513 aa, Camellia sinensis
MASTLGCSATDLVPHLTGVNNATAVADFICGRLDAVSTKLSDTTYAVDTTYLLFSAYLVFAMQLGFAMLCAGSVRAKNTMNIMLTNVLDAAAGGLSYYLFGFAFAFGSGSRSNAFIGHYSFALTGVPSATHDYSFFLYQWAFAIAAAGITSGSIAERTQFVAYLIYSSFLTAFVYPIVSHWVWSGDGWLSASRTSGALLFSSGAIDFAGSGVVHMVGGIAGLWGALIEGPRIGRFDRSGRSVALRGHSASLVVLGSFLLWFGWYGFNPGSFLTILKSYGTAGTYYGQWSAVGRTAVTTTLAGCTAALTTLFGKRLLDGHWNVVDVCNGLLGGFAAITSGCSVVEPWAAIVCGFVSAWVLIGCNKVAEKLKYDDPLEAAQLHGGCGSWGILFTGLFAKKKYVDEVYSAGRPYGLFMGGGGKLLAAQLIEILVIFGWVSVTMGPLFYGLKKLKLLRISREDEMAGMDLTRHGGFAYIYRDEDDLANRPGFMMRKVEPQNSSPTPDHNSSSPAEAV

SEQ ID NO: 67551 - DNA, 1464 bp, Chlamydomonas reinhardtii
  CDS (1)..(1464)
atgcctctggcggagctatggcgcttgaccaagcttgtcccattagcctgcacggtgctgctgctctcggtccgggccctggctgtcgactctggggggctaaacgactcagccgacaatagcagccgctccttgttgcaagagagcgggcaagcaagtggaacaagtcaaccttacacctattcttcatcggacttcgtgttgttgaatgggttccttattttctttatgcaaattggcttcgtgtcagcggagagcgggcaagggagggcgaaaaatgtgcggaacatcctcctcaagaactcggtcaacatcatgctgtgcgccatctgctggtgggcggttggctacgccttcgcctacggcaacagcggcggcggctttataggcacgtcgcggtttttcagcgacggggaaagcttcggcagtaagccctggttcttcacgtggaccttctgcttatcctgcgtgaccatagcatctggctgcctggcggagcggacgcaccttttcgtgtaccccgtgtacacggcggtggtcagcatcgcggtgcaccccgttatcgcccactgggtgtgggcgccggattcgtggctcaactccatgacggggtcgccctgccgcttcctggacttcgcgggcggggcggtggtgcacacagtcggcgggctcaccggcctgattggcgccatgttgtgcggcccgcgcctgggccgctttgaggatggagtgggcaaggacatccccggccatgacgtgtcgtccgtcagcctggggtcgctcatgctgtggtttggctggtatggcttcaactgcggctccacctacatctacatggcacagggcggctccgaggccagcgcggcagtcagccgcgtggcgctcaacatgacgctgtgcgcctccgtggcgggcatgacgtcactggtggtgtccagcatacagacaggtacatttgacctggcggtgtgctgcaacggcctgatggcgggcctgtccgcctccacctccaacgtgggcttcctcacgccttgggccgcctgcatcaccggcgccctggcggggctgctgtatgtgggcatctcccgactgctggtgcgcatgggggtggacgacccgttagacagcagtgcgatccactgcggcagcggcatactgggggtgctggtcagcggctttctggcgcggcccagctacgtgatgcagatggtgggctgcaactgcggcggcgtcgtgtacgccaccaacggcggcatgcagctgggcatgcagctgctaggcctgagctgctccatggtgtggacagccatgtgggcgctccttacgtttggcatcctcaagaagctgcagctgctgcgtgtggatcagcagacagagcttgcgggcattgataacatggagcacggcgggccggcctatcccgagttcctgcagcgagtgcaaagcacccggcctgggtactaa

SEQ ID NO: 67552 - protein, 487 aa, Chlamydomonas reinhardtii
MPLAELWRLTKLVPLACTVLLLSVRALAVDSGGLNDSADNSSRSLLQESGQASGTSQPYTYSSSDFVLLNGFLIFFMQIGFVSAESGQGRAKNVRNILLKNSVNIMLCAICWWAVGYAFAYGNSGGGFIGTSRFFSDGESFGSKPWFFTWTFCLSCVTIASGCLAERTHLFVYPVYTAVVSIAVHPVIAHWVWAPDSWLNSMTGSPCRFLDFAGGAVVHTVGGLTGLIGAMLCGPRLGRFEDGVGKDIPGHDVSSVSLGSLMLWFGWYGFNCGSTYIYMAQGGSEASAAVSRVALNMTLCASVAGMTSLVVSSIQTGTFDLAVCCNGLMAGLSASTSNVGFLTPWAACITGALAGLLYVGISRLLVRMGVDDPLDSSAIHCGSGILGVLVSGFLARPSYVMQMVGCNCGGVVYATNGGMQLGMQLLGLSCSMVWTAMWALLTFGILKKLQLLRVDQQTELAGIDNMEHGGPAYPEFLQRVQSTRPGY

SEQ ID NO: 67553 - DNA, 1446 bp, Chlamydomonas reinhardtii
  CDS (1)..(1446)
atgtcgtcgacgccctcggcgacggcgattgaccatggagctacctacagcgacctgctaatcatccagggggccattgtattctttctacaggtcggcttcgtgtccttagaagtgggatacggccgctctaagaacgtcaagaacattttgctcaaaaacacggtcaacatcttgctctgcgccatctgctggtgggccgttggatatgcttttagttatggatcgtcgacagacggcttcattggcacctcgggcttcttccacgacggcgggttgggcgccgccaagctgtggttctacagctggaccttttgcctgtccaccgtgaccatcgtgtcgggctgcttggcggagcgcaccagcctggtggcctaccccgtgttcacggtgctcatggcctcctgggtgcaccccgtggtggtgcactgggcctggagccgcgactcgtggctgctgggcatcagcagcgagtgccgcttcctggactttgcgggcgggactgtggtgcacatatgcggcgggatgatgggcctggtgggcgcggcgctggtggggccgcgcatcgggcggttcgaggaggggcgagccaaggagctgccggggcacgacgtgtcgtccgtggccattggcacgctcttcctgtggttcggctggttcggctttaactgcggctcggcctatgtgtacatgggcaacatggcggcggcggcagcggaggcggcggccagtgcggtggcgtcaggcgacacgtcagcagacgtgtacgcaagcgcggcggcggcggtgtcggcggctgtgacgtcgggggccaacgccacgttgcatcctggcagcacgccggcggaccgtgtggcgctcaacatgaccctgtgcgcctcggtgtcgggcctcacggcgctgctgctgagcagcctgcgtagcggcacagtggacctgtgtgtgtgctgcaactcgctgctggcgggactggtcatgtccacccccgcctgcggcttcatcacctcctgggcggctgtgatctacggcctggtggcggcggcgctgtacatgggcggcacacgcatgctggtccgcttccatgtggacgacccgcttgaatcgtccgccatccacttcggctgcggcggcgtgggcactctgctgctggcgctgctggcgcgccccacctacgtgcaggaactcaccggctacgactgcggtggcctcgtgtacggcggccgcaagggcgccatcctgctggggctgcagctgctaggcattgcggccatcactgcctggacggcgttcttctcggtgctggtgttctacctgctgcggcggctggggcggctgcgagtggaccaggtcacggagctggcggggctggacaacatggagcacggcggcccagcataccccgagttcaacctggtgccctacaacaccggcagcgcggagcggtag

SEQ ID NO: 67554 - protein, 481 aa, Chlamydomonas reinhardtii
MSSTPSATAIDHGATYSDLLIIQGAIVFFLQVGFVSLEVGYGRSKNVKNILLKNTVNILLCAICWWAVGYAFSYGSSTDGFIGTSGFFHDGGLGAAKLWFYSWTFCLSTVTIVSGCLAERTSLVAYPVFTVLMASWVHPVVVHWAWSRDSWLLGISSECRFLDFAGGTVVHICGGMMGLVGAALVGPRIGRFEEGRAKELPGHDVSSVAIGTLFLWFGWFGFNCGSAYVYMGNMAAAAAEAAASAVASGDTSADVYASAAAAVSAAVTSGANATLHPGSTPADRVALNMTLCASVSGLTALLLSSLRSGTVDLCVCCNSLLAGLVMSTPACGFITSWAAVIYGLVAAALYMGGTRMLVRFHVDDPLESSAIHFGCGGVGTLLLALLARPTYVQELTGYDCGGLVYGGRKGAILLGLQLLGIAAITAWTAFFSVLVFYLLRRLGRLRVDQVTELAGLDNMEHGGPAYPEFNLVPYNTGSAER

SEQ ID NO: 67555 - DNA, 1497 bp, Chlamydomonas reinhardtii
  CDS (1)..(1497)
atggcggacgagatggatcccatgacggcctgcatcaccgcccttacggatgctgctatgacaactgcgcaagcgacggcgctgtgcgggcagttcgcgtttgccgcggacaacagtgacctgagcgaccggctcgatcagacgaaccagggcctgaacaccctctacctggtatcatgtggtgctctggtgttcgtcatgcacgctggctttgcgatgctctgtgccggtgctatccgctccaagaataccatgaacatcctgctccagactgtcatggacgccgccgtgtccgccgtcgccttctacatcctgggctacggcttcgcttatggcattggcaacaaccccaacggctttatcggtgactctctgttcggcctgtctcgctgggtgtcccacagctcgagctccgacgccggcgccaactggcaggcctggttcttccagtgggccttcgctgccaccgccaccaccatccccgccggcgccgtggctgagcgcctcaacttcaacgcctacctcatctactcgttcttcatctccgccttcgtctaccccgtcgtcgtgcactgggtgtgggctgccgagggctggctgggctacgcgcgcttcggcggctacagccacctcttccgctccggcatgatcgacttcgccggctcgggcgtcgtgcacatgactggtggcctggccggcctggctggctgcatcatggtgggcccccgcatgggccgcttcgactccaacggccagcccgtggagatgcccggccactccgccaccctggtcgtgctgggcaccgtgctgctgtggttcggctggtacggcttcaaccccggctcccagctgatcatcaactacaccgcctccgccgccgtcgtcggccgcgccgccgtcaccaccacgctctccggcgccgccggctgcctgtcctgcctgctcaccgccttcctccgccacaaggcctgggacctggtgtccggctgcaacggcgcgctggtcggcttcgtctccatcaccgcctccgccaacgtcgtcgagccctgggccgcgctcatcgccggccttgtgggcggctgggtgttcgacgccgtgtgcctgctcttcctgaagctgcgcatcgacgacccgctgtcggcggcgcccatgcacgccttctgcggcgcctggggcgtgttctttgccggcctgctggccaagaaggagtacatttgcgagtcctacggccgcgactgcgagggctacgtcgccgacggcctgttctatgtgggcgacggccgcctgctggcgcaggtgatcggcatcatctccatcttcgcctgggtgttcggcctgatgctgctgctgttcggaggcctcaaggccgtgggcctgctgcgcatcagcgccgaggaggagcaggccggcctggacgtgtccaagcacggcggctccgcctacaactacgaccacgggctcggcaagcccgagaaggcccaggctctgggcctgtaa

SEQ ID NO: 67556 - protein, 498 aa, Chlamydomonas reinhardtii
MADEMDPMTACITALTDAAMTTAQATALCGQFAFAADNSDLSDRLDQTNQGLNTLYLVSCGALVFVMHAGFAMLCAGAIRSKNTMNILLQTVMDAAVSAVAFYILGYGFAYGIGNNPNGFIGDSLFGLSRWVSHSSSSDAGANWQAWFFQWAFAATATTIPAGAVAERLNFNAYLIYSFFISAFVYPVVVHWVWAAEGWLGYARFGGYSHLFRSGMIDFAGSGVVHMTGGLAGLAGCIMVGPRMGRFDSNGQPVEMPGHSATLVVLGTVLLWFGWYGFNPGSQLIINYTASAAVVGRAAVTTTLSGAAGCLSCLLTAFLRHKAWDLVSGCNGALVGFVSITASANVVEPWAALIAGLVGGWVFDAVCLLFLKLRIDDPLSAAPMHAFCGAWGVFFAGLLAKKEYICESYGRDCEGYVADGLFYVGDGRLLAQVIGIISIFAWVFGLMLLLFGGLKAVGLLRISAEEEQAGLDVSKHGGSAYNYDHGLGKPEKAQALGL

SEQ ID NO: 67557 - DNA, 1413 bp, Triticum aestivum
  CDS (1)..(1413)
atgtcggtgccggtggcgtaccaggggaacacgtcggcggcggtggccgactggctgaacaagggcgacaacgcgtggcagctgacggcgtccacgctggtgggcctcatgagcgtgccgggcatggtggtgctgtacggcggcgtggtgaagaagaagtgggcggtcaactccgccttcatggcgctctacgccttcgccgccgtctggatctgctgggtcgtctgggcctacaacatgtccttcggcgaggagctgctcccgttctggggcaaggccggcccggcgctcgaccaggccttcctcgtcggccgcgcctcgctcccggccaccgcgcactaccgcgcagacggcacgctcgagacggccatggtggagccctacttccccatggccaccgtcgtctacttccagtgcgtgttcgccgccatcacgctcatcctggtggccgggtcgctgctgggccgcatgagcttcctggcgtggatgctcttcgtgccgctctggctcaccttctcctacaccgtcggcgccttctccgtgtggggcggcggcttcctcttccactggggcgtcatcgactactgcggcggctacgtcatccacatccccgccggcgtcgccggcttcaccgccgcgtactgggtcgggccaaggaccaagaaggacagggagagcttcccgcccaacaacatcctgttcgcgctcaccggcgccgggctgctgtggatggggtgggccgggttcaacggcggcgggccgtacgcggccaatgtcgactcgtccatggccatcctgaacaccaacatctgcacggcggcgagcctcatcgtctggacctgcctcgatgccgtcttcttcaagaagccctccgtggtcggcgccgtccaggccgtgatcaccggtctcgtctgcatcacgccaggcgcaggtgtcgtgcagggttgggcggcgctggttatgggcgtgctggccggcagtgtgccgtggtacaccatgatggtgctccacaagcgctccaagctccttcaacgcgtcgacgacacccttggcgtcatccacacccacggcgtcgccggcctgctgggcggcgtcctcacgggcctcttcgccgagccgaacctctgcaatctattccttccggtcaccaactcccggggcgccttctacggtggtaacggtggggcgcagctcgggaagcagatcgccggagcgctcttcgtgatcgggtggaacgtggtcgtcacgtccattatctgcgtcgtcatccgccttgtcgtcccgctgcgcatgtccgaggagaagctcgccattggcgacgacgccgtgcacggcgaggaggcctacgcgttgtggggcgatggcgagcactacgatgacaccaagcacggcgccgccgtcgtgccggtgtga

SEQ ID NO: 67558 - protein, 470 aa, Triticum aestivum
MSVPVAYQGNTSAAVADWLNKGDNAWQLTASTLVGLMSVPGMVVLYGGVVKKKWAVNSAFMALYAFAAVWICWVVWAYNMSFGEELLPFWGKAGPALDQAFLVGRASLPATAHYRADGTLETAMVEPYFPMATVVYFQCVFAAITLILVAGSLLGRMSFLAWMLFVPLWLTFSYTVGAFSVWGGGFLFHWGVIDYCGGYVIHIPAGVAGFTAAYWVGPRTKKDRESFPPNNILFALTGAGLLWMGWAGFNGGGPYAANVDSSMAILNTNICTAASLIVWTCLDAVFFKKPSVVGAVQAVITGLVCITPGAGVVQGWAALVMGVLAGSVPWYTMMVLHKRSKLLQRVDDTLGVIHTHGVAGLLGGVLTGLFAEPNLCNLFLPVTNSRGAFYGGNGGAQLGKQIAGALFVIGWNVVVTSIICVVIRLVVPLRMSEEKLAIGDDAVHGEEAYALWGDGEHYDDTKHGAAVVPV

SEQ ID NO: 67559 - DNA, 1392 bp, Acetobacter diazotrophicus
  CDS (1)..(1392): transl_table=11
gtgagtctcccccgcactattcggactttctcacctcgcggcaccaccatcgccctggccacgctggccggggcggcgctgccggccatggccgcgcccgccatggccgccgatccggccccgcccgccatcaacaccggcgataccgcctggatgctggtcagcaccgcgctggtgctgatgatgaccgtaccgggcctggccctgttctatggcggcatggtccgcaagaagaacgtgctggccacgctgatgcagtccttcgccatctgctgcatcgtcacgattgtctggatggtcgcgggctacagcctggcgttcggcaccgggtcgccctacatcggcgatctgtcccgcttcatgctgaacggcatcggcgcgcagatttccaaggggtccgatgtcggcttcacgctggggctggggtcggccaacgccacggtgatgacgatccccgagagcgtcttcatgatgttccagatgacgttcgcgatcatcaccccggcgctgatcaccggcgccttcgccgagcgcatgaagttcagcgcgctgtgcgtgttcaccatcctgtggtcgctgctggtctatgcgccggtcgcccactgggtctggagcccgcttggctgggtcgcggggttcggcgccatcgatttcgccggcggcaccgtggtgcacatcaatgccggcgtcgccggcctggtcacggcgctggtggtgggcaagcggcagggctacggccaggacgatatgtcgcccttcaacctgacctatgccgtcatcggcgcgtcgctgctgtgggtcggctggttcggcttcaatgccgggtcggcggtaggggccaacggccgcgccggcatggcgatggcgacgacgcagatcgccagcgccgccgccggggtggcctggatgctggccgaatgggcccgcaccggcaagccgacggtgctgggcatcatttccggcgccgtcggcggactggtcgcgatcacgcccgccgccggcttcgtgctgccgggcggggccctgatcatcggcctgctggccggcgcggtctgccactggaccgccaccaccatgaagcacatgctgggctatgacgacagcctggacgccttcggcgtgcatggcatcggcggcatcctgggcgcgctgctgaccggcgtgctggcctatggcccgctttcggccaccgacgccaatcccgccggggtcgtgggatccttcgcgcagctcgtcacccaggccaaggccgtgggcgtcaccatcgtctggtgcgcggtcgtcaccttcgtcctgctgaagatcgtcgacctcgccatcggcctgcgcgtccggagcgaggacgaaatcgaggggctggacatgacccagcacggcgaacgcatcaactga

SEQ ID NO: 67560 - protein, 463 aa, Acetobacter diazotrophicus
MSLPRTIRTFSPRGTTIALATLAGAALPAMAAPAMAADPAPPAINTGDTAWMLVSTALVLMMTVPGLALFYGGMVRKKNVLATLMQSFAICCIVTIVWMVAGYSLAFGTGSPYIGDLSRFMLNGIGAQISKGSDVGFTLGLGSANATVMTIPESVFMMFQMTFAIITPALITGAFAERMKFSALCVFTILWSLLVYAPVAHWVWSPLGWVAGFGAIDFAGGTVVHINAGVAGLVTALVVGKRQGYGQDDMSPFNLTYAVIGASLLWVGWFGFNAGSAVGANGRAGMAMATTQIASAAAGVAWMLAEWARTGKPTVLGIISGAVGGLVAITPAAGFVLPGGALIIGLLAGAVCHWTATTMKHMLGYDDSLDAFGVHGIGGILGALLTGVLAYGPLSATDANPAGVVGSFAQLVTQAKAVGVTIVWCAVVTFVLLKIVDLAIGLRVRSEDEIEGLDMTQHGERIN

SEQ ID NO: 67561 - DNA, 1629 bp, Chlamydomonas reinhardtii
  CDS (1)..(1629)
atgagcgaagcttgtctcctcgctgcaaagtcggctttggtcggcgtcgccaatggcgatagcctcgcgtccgcaatttgcgcggcgatggaggctgccgcaccagtggctcgccacctgcaagagacaacggtggatctaactacgctccaagagacggtcgacactattgggctgaacttgcaaggcacaatggacggcctgaacacgctgctgctgctctacggaggcgcgctggtgttcctgatgcacggaggctccgctatgctcgaggccggtgccatccgctccaagaacgcgatgaacatcctgctgcagaccgtcctcgacgcctcttgcagcgcgctcatgtggtacttcgtcgggttcgccttcgccttcggcattggcgacaagcccaacaagtttatcggcaacgccatgtttgcgctggtggacattgatacgcacaacaccggctcgggcaccggcaagtggatcgactggttcttccagtgggccttcgccgcaaccgccgtcaccattcccgccggcgctgtggctgagcgtttcaacttcaacgcctacctgggctattccatgttcatcggtggctgggtctaccccatcattgcccactgggtgtggtgcattgagggctggctgggctatggcgtgatcaagcccttcatcaacgccggcatgattgacttcgccggatccggcgtcatccacatgactggcggcctggccggcctcatcggcgccatcatggtgggcccccgcctgggccgcttcgacgccgacggcaagcccgtcgacatgcccggccactccgccatcctggtggtgctgggaaccgtactgctgtggttcggctggtacggattcaaccccgcctccgtgctgctcatcaactccagcacctacgccatcgtgtgcggccgcgcggccgtgtgcaccacgctggccggcgccgcgggcggcgtgagctgcctcatcttcggctttgcgcgccaccgcggctgggacctggtcggcctctgcaacggcatcctgtgcggcttcgtcgcagtcaccgcctgcccccacgtgatctacccctgggccgcaatcatctgcggcctggtcgcgggcctgtggtttgagttcctgtgctggctgttgctcaagctcaagatcgacgacccgttgtcagctgggccgatgcacttcggctgcggcatgtggggcgtcttcttcaccggcctcttcgcgcgccagcaatacatccaggagtactacgtgcacggcccttccgcggccggcgagctgtccaagccctacccctggggcgccttctacaagggctacaatgccgacggcgagctggtcatgtccgatggcaagctgctcgcgtcgcagatcgtgggcatcctggttatcatcggctgggtgattggcatgatggttccgttcttcggcattttccagttctttggcgcgcttcgcattccgcccgaggaggaggagatgggcctggaccgctccaagcacggcggctcggcctacaatggcaccggtgccaacacgctcggcggcctgtcgcccggcaacgacgtgatgcgaaacaactcgcctttgggcaaggttctgcctgtgaccgcgtaa

SEQ ID NO: 67562 - protein, 542 aa, Chlamydomonas reinhardtii
MSEACLLAAKSALVGVANGDSLASAICAAMEAAAPVARHLQETTVDLTTLQETVDTIGLNLQGTMDGLNTLLLLYGGALVFLMHGGSAMLEAGAIRSKNAMNILLQTVLDASCSALMWYFVGFAFAFGIGDKPNKFIGNAMFALVDIDTHNTGSGTGKWIDWFFQWAFAATAVTIPAGAVAERFNFNAYLGYSMFIGGWVYPIIAHWVWCIEGWLGYGVIKPFINAGMIDFAGSGVIHMTGGLAGLIGAIMVGPRLGRFDADGKPVDMPGHSAILVVLGTVLLWFGWYGFNPASVLLINSSTYAIVCGRAAVCTTLAGAAGGVSCLIFGFARHRGWDLVGLCNGILCGFVAVTACPHVIYPWAAIICGLVAGLWFEFLCWLLLKLKIDDPLSAGPMHFGCGMWGVFFTGLFARQQYIQEYYVHGPSAAGELSKPYPWGAFYKGYNADGELVMSDGKLLASQIVGILVIIGWVIGMMVPFFGIFQFFGALRIPPEEEEMGLDRSKHGGSAYNGTGANTLGGLSPGNDVMRNNSPLGKVLPVTA

SEQ ID NO: 67563 - DNA, 1434 bp, Hebeloma cylindrosporum
  CDS (1)..(1434)
atggtcaacgtcacatacgatgattctggcagcttggttgcctacacgcccgatggcactccaatcgtctacaacctcggcgacatggcctggattgctgcctccatggctctcgtctggattatgattccaggcgttggccttttttattctggtttgctacggcggaagaacgcgctgtcgatgatttggacgtctctcgcatccatcgctgttgtttcatttcaatggtttttctgggggtactcccttgcgttcagcgaaacgggaaacgccttcattggcgatcttaaatactttggtctaaagggtgtccttgatcagccttctattggcagcagccgtattcccgccatccttttctgtatctatcagctcatgttcgcggcgatcaccgctgccctcgccgtgggcgctattgctgagcgtggtcgtctcggccctctacttgtctttattttcgtctggtccacaatagtttacgaccctattgccaattggacctggaacaccaacggatggtcattcatcctcggcggtctcgattttgctggaggaacacccgtccatatcagctctggaaccgccgccctcgccatttccatcttcctgggaaagcgccgtggatatggaactgaacgcctcgcttacaagccccataacaccacctacgttatcctcggtaccgttttcctgtggttcggttggtttggtttcaatggtggttcagccctctccgccaacctccgcgcaatccaggcatgcattgtaaccaacctcgctgcttccgttggcggcctgacgtggatgctttgggattatcggattgaaaggaagtggtccgctgttggtttttgctccggagccgtctctggtctcgttgcaatcacccccgcctctggtttcgttggcgctcccgccgcggtcgcctttggcgttcttggtggaacggcctgcaattttgccacccagctaaaattcgttcttggttacgacgatgccctcgacatttttgctactcacgctattgggggaattgttggtaacctcctcaccggccttttcgcccaggccagtgtagctggattcgatggtatcaccgaaatccctggtggctggttggacaggcattacatccagcttgcccatcaactcgctgattccgtcgccggatttgcttactcctttgtcatgacaactatcatactttgggtcatgcatattattcccggtctgacgctccgcaccaccgaggaggcggagatcctcggtgtggatgacgctgagatgggagagttcgcatacgattatgtcggcattgaccaagaaatcggccatactctcgacactggccttaccgcgactggtggaggccgcgagcctgaccatgccaaggcagtgtcgaccagcagcgtagaagagaaatcagcatga

SEQ ID NO: 67564 - protein, 477 aa, Hebeloma cylindrosporum
MVNVTYDDSGSLVAYTPDGTPIVYNLGDMAWIAASMALVWIMIPGVGLFYSGLLRRKNALSMIWTSLASIAVVSFQWFFWGYSLAFSETGNAFIGDLKYFGLKGVLDQPSIGSSRIPAILFCIYQLMFAAITAALAVGAIAERGRLGPLLVFIFVWSTIVYDPIANWTWNTNGWSFILGGLDFAGGTPVHISSGTAALAISIFLGKRRGYGTERLAYKPHNTTYVILGTVFLWFGWFGFNGGSALSANLRAIQACIVTNLAASVGGLTWMLWDYRIERKWSAVGFCSGAVSGLVAITPASGFVGAPAAVAFGVLGGTACNFATQLKFVLGYDDALDIFATHAIGGIVGNLLTGLFAQASVAGFDGITEIPGGWLDRHYIQLAHQLADSVAGFAYSFVMTTIILWVMHIIPGLTLRTTEEAEILGVDDAEMGEFAYDYVGIDQEIGHTLDTGLTATGGGREPDHAKAVSTSSVEEKSA

SEQ ID NO: 67565 - DNA, 1317 bp, Pseudomonas stutzeri
  CDS (1)..(1317): transl_table=11
atgactctgcgaagattcgcagggctaggagcccttttgtctctgttaagcccaggcctggccatggcgcaggaggcaacgctggattcaggcgatacggcatggatgctgacggccactgcgctggtgctgttcatgaccatccccggactggcgctgttctacggcggcatggtccgctcgaagaacatcctctcggtgatgatgcagtgcttcgccatcaccggcctgatgagcatcctctggatggtctatggctacagcctcgcattcgataccaccggtatggaagcgggcgtcaccaacttcaattccttcgtcggtggtctggatcgcgccttcctcagcggcctgactcctgacagcctggtcggcgccttcccggaaagcgtcttcatcacgttccagatgaccttcgccatcatcaccccggcgctcatcgtcggcgccttcgccgagcgcatgaagttctcggcgatgctggtgttcatggacgtgtggttcaccctggtctatgcgccgatcgcgcatatggtctggggcggtgacggtggcctgatgtgggactggggcgtgctggatttcgccggtggcaccgtggtgcacatcaatgccggtatcgccggtctggtggcctgcctggtcctgggcaagcgcaagggcttcccgaccacgccgatggcaccgcacaacctggggctgaccctggtcggcgcggcgatgctgtggattggctggttcggcttcaacgccggttcggccgtggctgccaacggcaccgctggcatggccatgctggtcacccagatcgccaccgccgcagctgcgttgggctggatgttcgccgagtggatcggccacggcaaacccagcgcgctgggcatcgcctcgggcgtggtcgccggtctggtcgccatcaccccggctgccggcaccgtcgggccgatgggcgcgctgatcatcggcctggtctcgggcgtggtctgcttcttctgcgccaccagcctgaaacgcaagctcggctacgacgattcgctggatgcctttggcgtgcacggcgtgggcggcatcgtcggtgcgctgctcaccggcatcttcgccgcacccatgctgggcggtttcggtgaggtggagaacatcggcctgcagctgtggattcagttcaagggcgtgctcttcaccgtcgtctacaccggcatcgtcacctacctgatcctcaaggcgatcgacctggtgatgggcctgcgggtgaacgaggagcaagagaccatcggcctcgacctcagcctgcacaacgagcgcggctacaacctgtaa

SEQ ID NO: 67566 - protein, 438 aa, Pseudomonas stutzeri
MTLRRFAGLGALLSLLSPGLAMAQEATLDSGDTAWMLTATALVLFMTIPGLALFYGGMVRSKNILSVMMQCFAITGLMSILWMVYGYSLAFDTTGMEAGVTNFNSFVGGLDRAFLSGLTPDSLVGAFPESVFITFQMTFAIITPALIVGAFAERMKFSAMLVFMDVWFTLVYAPIAHMVWGGDGGLMWDWGVLDFAGGTVVHINAGIAGLVACLVLGKRKGFPTTPMAPHNLGLTLVGAAMLWIGWFGFNAGSAVAANGTAGMAMLVTQIATAAAALGWMFAEWIGHGKPSALGIASGVVAGLVAITPAAGTVGPMGALIIGLVSGVVCFFCATSLKRKLGYDDSLDAFGVHGVGGIVGALLTGIFAAPMLGGFGEVENIGLQLWIQFKGVLFTVVYTGIVTYLILKAIDLVMGLRVNEEQETIGLDLSLHNERGYNL

SEQ ID NO: 67567 - DNA, 1620 bp, Chlamydomonas reinhardtii
  CDS (1)..(1620)
atgtcaggagactttggctctgagcccctgggctcgtgctcagtggaaaccgttacggccttgctcggctatgggctcgagcaggacagcatcacggcgctttgccagcccgaggggggcgctggttgcaccagcacagataactgcatgttccagtatctgatgggcgcgaccgcggacgcgcagagcacggccagcgatgtgggagtcgggctcgacgtgagcttcctgttgttcagcggctatctggtattcgtgatgcagctcgggttcgctgtgctgtgcgctggaagcatccgctccaagaactgcatgaatatcctgctgaagaacatgctggacgcctgcgtgggcgctatcggcttctatgtcttcggatacgcgttcgcgtacggccgcaagtatggacagaatagcaacggcttcattggcaactggaactttgcgctctcgtacacaactcagacgtcaatgagcggcaccgagttcaccacgtttggatggcaccagttcttcttccagtggagcttctgcgccgccaccaccaccatcgtgtctggcgcggtggccgagcgctgcaccttcatggcctacatgatctacgcgttcttcctctcctccttcgtctaccccgtcatcgtgcactgggtgtgggacggccagggctggctcagtgccttcaacacattccaggacggctacgccctgatcctcaagaccggtgccattgactttgcgggctcgggcgtcgtgcacatgacgggtgggattgcggcactcatgggtgcctggattatgggcccccgtgtcggtcgcttcgctaatgacggcacggtgaatgagatgaggggccactcctccacgctggttgtgatgggcaccttcctgttgtggttcggctggttcggattcaaccccggcagcaacctggtggtcgcctcccaggctgcggccacagtcgtgtcgcgtgtcgcagtgaccaccgctctggcaggtggcgcgggtggaatctccatgctcttctacaagttcctgaccgtcaaggcttgggacgtggtggcgacgtgcaatggcatcctggctggcctcgtggccgtcacggctagctgctccgtcattgagccctgggcggccatcatcactggggccatcggggcaatcatcttttccattgctgattacgtgacgctttacaagctgaaggtggacgaccccgtgagcgcctttgccctgcacggcgccgtgggcgcatggggcgtgttgttccccggcttcctggcggctccccactatgtggtagaggtgtacggtgcctacggattcggaatggatgcacgggagggcaagaggttcggtctgttctacggcggccacggccaggtgctgctggtgcagctcatcgaggtgctggccatctttgggtggactggattcatgatgggcagcttcttcttcatcctcaacaaggctgggctgctgcgtgtgcccctgcaggaggagatggcgggtctggatgcggctaactacagcaagagcgttggcagcaaggacccctccgtccactgcaccgttggtgtggacaagctggaaggcggcgcgctgggggagggcaaggcctga

SEQ ID NO: 67568 - protein, 539 aa, Chlamydomonas reinhardtii
MSGDFGSEPLGSCSVETVTALLGYGLEQDSITALCQPEGGAGCTSTDNCMFQYLMGATADAQSTASDVGVGLDVSFLLFSGYLVFVMQLGFAVLCAGSIRSKNCMNILLKNMLDACVGAIGFYVFGYAFAYGRKYGQNSNGFIGNWNFALSYTTQTSMSGTEFTTFGWHQFFFQWSFCAATTTIVSGAVAERCTFMAYMIYAFFLSSFVYPVIVHWVWDGQGWLSAFNTFQDGYALILKTGAIDFAGSGVVHMTGGIAALMGAWIMGPRVGRFANDGTVNEMRGHSSTLVVMGTFLLWFGWFGFNPGSNLVVASQAAATVVSRVAVTTALAGGAGGISMLFYKFLTVKAWDVVATCNGILAGLVAVTASCSVIEPWAAIITGAIGAIIFSIADYVTLYKLKVDDPVSAFALHGAVGAWGVLFPGFLAAPHYVVEVYGAYGFGMDAREGKRFGLFYGGHGQVLLVQLIEVLAIFGWTGFMMGSFFFILNKAGLLRVPLQEEMAGLDAANYSKSVGSKDPSVHCTVGVDKLEGGALGEGKA

SEQ ID NO: 67569 - DNA, 1494 bp, Oryza sativa subsp
  CDS (1)..(1494)
atggcgtcgccgccgcagcccgggccgtacatgccggacctgccggcggtgccggcgtggctgaacaagggcgacaccgcgtggcagctggtggcggcgacgttcgtcggcatccagtcgatgcctgggctggtggtgatctacggcagcatcgtgaagaagaagtgggccgtcaactccgccttcatggcgctgtacgcctacgcgtccacgcttatcgtgtgggtgctcgtcggcttccgcatggcgttcggcgaccggctgctcccgttctgggccaaggccgggccggcgctgacgcaggacttcctggtgcaacgcgcggtgttcccggcgacggcgcactacggcagcgacggcacgctcgagacgccgcgcaccgagccgttctacgcggaggcggcgctggtgctgttcgagttcgagttcgcggccatcacgctggtgctgctcgccgggtcgctcctggggcggatgaacatcaaggcgtggatggcgttcaccccgctctggctcctcttctcctacaccgtcggcgcgttcagcctctggggcggcggcttcctctaccagtggggcgtcatcgactactccggcggatacgtcatccacctctcctccggcgtcgccggcttcaccgccgcctactgggtgggcccgaggctgaagagcgacagggagcggttctcgccgaacaacatcctgctcatgatcgccggcggcgggctgctgtggttgggctgggccgggttcaacggcggcgcgccgtacgcccccaacgtcaccgccacggtcgccgtgctcaacaccaacgtcagcgccgcgacgagcctcctcacctggacctgcctcgacgtcatcttcttcggcaagccctccgtcatcggcgccgtgcagggtatgatgacggggctcgtctgcatcacgcccggcgccgggctggtgcacacgtggtcagcgatgctgatgggcatgttcgccggcagcgtcccgtggttcacgatgatgatcctgcacaagaaatccaccttcctcatgaaggtcgacgacaccctcgccgtcttccacacccacgccgtcgccggcatcctgggcggcgtcctcacgggcctcctcgccacgccggagctctgcgctctcgattgcccgatcccgaacatgcgcggcgtcttctacggcagcggcatcggccagctcgggaagcagctcggcggcgcgctgttcgtcaccgtctggaacctcatcgtcaccagcgccattctcctctgcatcggcctcttcatcccgctccgcatgtccgacgaccagctcatgatcggcgacgacgcggcgcacggggaggaggcctacgctctgtggggggacggtgagaagttcgacgtgacgcggccggagacgacgaggacgggaggtgcaggcggcgcgggcagggaggacaccatggagcagaggctgaccaacatgggagccaggggtgtcaccattcagttgtag

SEQ ID NO: 67570 - protein, 497 aa, Oryza sativa subsp
MASPPQPGPYMPDLPAVPAWLNKGDTAWQLVAATFVGIQSMPGLVVIYGSIVKKKWAVNSAFMALYAYASTLIVWVLVGFRMAFGDRLLPFWAKAGPALTQDFLVQRAVFPATAHYGSDGTLETPRTEPFYAEAALVLFEFEFAAITLVLLAGSLLGRMNIKAWMAFTPLWLLFSYTVGAFSLWGGGFLYQWGVIDYSGGYVIHLSSGVAGFTAAYWVGPRLKSDRERFSPNNILLMIAGGGLLWLGWAGFNGGAPYAPNVTATVAVLNTNVSAATSLLTWTCLDVIFFGKPSVIGAVQGMMTGLVCITPGAGLVHTWSAMLMGMFAGSVPWFTMMILHKKSTFLMKVDDTLAVFHTHAVAGILGGVLTGLLATPELCALDCPIPNMRGVFYGSGIGQLGKQLGGALFVTVWNLIVTSAILLCIGLFIPLRMSDDQLMIGDDAAHGEEAYALWGDGEKFDVTRPETTRTGGAGGAGREDTMEQRLTNMGARGVTIQL

SEQ ID NO: 67571 - DNA, 1194 bp, Methanosarcina mazei
  CDS (1)..(1194): transl_table=11
atggctataaacgaagcagacactgtatgggtattgctttcatcggcattggtattattaatggttcctgcgctggcactgttctacggagggcttgtccagcgtaaaaacgtcctgagcagcatgatgcattcattcgttgcaatgggcgtcctggctcttgaatggataataataggttactcccttgcgttttcagaaggcaactggtttattggcggccttgagaatgtgtttctgagcgggattgatccttactccgtaacaggtacgattcccacctatgcatttgttgcattccagggaatgttcgcaataattactcctgcacttatatccggtgccatagtagggcgtgtcaagttcaagtcttacatcgcgttcatcctgctctggggccttattgtctatgccccggtatgtcactgggtttggggcggcggattccttaccggagaagcccttgactttgcaggcggtacggttgtccacataactgcaggtatgtcttcacttgcaatactggcatacctcggcaagagaaggggatatggtgttgattccctgaagccgcacaacgttaccctgaccctcctcggagccggacttctctggttcgggtggttcgggttcaacgcaggctcggctcttgctgcaaacgaaatagcagcccttgcattcatgaccacgctcgttgctcccgctgcagcaggttttgtctggatggcgcttgaatgggcgcaccttggacgccccaccgcactcgggtttgcaaccggcatcctggcagggcttgtagggataactcctgctgccggatttgtcactccagtagccgcgattgccataggtgcgattgcaagcttcatatgttaccaggctgtgatgttcaaaaacaggctaggatacgacgattcacttgatgcatttggagttcacggagtcggcggaatagtcggtgcgatattaacaggcgtatatgcaagtgtaggcggagaaggcctacttctcgggaactctgcccagttgatgattcagcttcagggcgtggttatcacaattgtatacgcaatggcctgcaccctgctgataggatttgtactccataaaacgatagggctcaaagtcagtgaaagcgaagaaatcatagggcttgacaaaacccagcatggtgaagcagcatacaacatttga

SEQ ID NO: 67572 - protein, 397 aa, Methanosarcina mazei
MAINEADTVWVLLSSALVLLMVPALALFYGGLVQRKNVLSSMMHSFVAMGVLALEWIIIGYSLAFSEGNWFIGGLENVFLSGIDPYSVTGTIPTYAFVAFQGMFAIITPALISGAIVGRVKFKSYIAFILLWGLIVYAPVCHWVWGGGFLTGEALDFAGGTVVHITAGMSSLAILAYLGKRRGYGVDSLKPHNVTLTLLGAGLLWFGWFGFNAGSALAANEIAALAFMTTLVAPAAAGFVWMALEWAHLGRPTALGFATGILAGLVGITPAAGFVTPVAAIAIGAIASFICYQAVMFKNRLGYDDSLDAFGVHGVGGIVGAILTGVYASVGGEGLLLGNSAQLMIQLQGVVITIVYAMACTLLIGFVLHKTIGLKVSESEEIIGLDKTQHGEAAYNI

SEQ ID NO: 67573 - DNA, 1452 bp, Tuber borchii
  CDS (1)..(1452)
atgaatgacccagatcatctcaattatgtcccacttgttcctttcaatggaactaaaccattcgggggtgattcactgactcaagacctgaacatttggtacgagagcggaaatgttgcctgggtcatgacctcgactgcgcttgttctgctgatgattccgggtgtcggattcttctattcgggactcgcgagaagaaagtcggctctttctctcatctggctgtcaatgatggcaaccgctgtagttagctttcagtggttcctttggggttattctttggctttctcgcatactggtggtagattcattggaaaccttgacaatttcggatttaagggacttctcggttatccttctattggaagtgagaaaattccggacctgctgtttgctctctatcagggaatgttctctgctattacggttgctctggctattggtgccgctgcagagagaggccgtatgttgccttgtgtagtttttatgtttgtctgggctactttgatttacgaccctattgcatgctggacgtggaattcctcgggatggtcgttcaggatgggtggattggattttgctggtggaacgccagttcatatttcatccggatccgccgccttggcctactctctgatgttgggaaagcgacgaggccatggaacacatgagttaaactaccgcccacacaatgtcactcacatcgttctcggaacagttttcctgtgggttggctggtttgggtttaacggaggatccgctctttctggcaacatgagagctgttatggcttgtgtcgtcactaatttggctgcatctgttggaggaattacttggtgtcttctcgattaccgtttggagcagaagtggtctactgtgggattctgttcaggagtcattgccggactggttgctattacccctggatctggatatgttccctcttgggctgctgttatttacggtgttgttggtggtgccgcatgtaactatgctaccaagctcaagtttgttattggcgtagatgatgctttggatatcttcgcggagcacggtgtcgggggtattgtaggaaatatcctgacagccttctttgcggctgattacattgcgcatcttgacggctctaccgagattaatggaggttggttgaacggacactataagcaacttggatatcaagttgcggactctgttgcgggttttgcatactccttcggaggcacttgtatcatcctcttcatcatgaatcttatccctggtttgagtcttcgtgctactgaggaggccgagattcttggtattgatgatgccgagctcggagagttcgcctatgactatgttgagcttactcgcgaagttatctctgacgatgacactgtacctaaaatgtcatcggagaacaatgcgagtgtagaactacctgctgaaagggctgagaagtctgcttaa

SEQ ID NO: 67574 - protein, 483 aa, Tuber borchii
MNDPDHLNYVPLVPFNGTKPFGGDSLTQDLNIWYESGNVAWVMTSTALVLLMIPGVGFFYSGLARRKSALSLIWLSMMATAVVSFQWFLWGYSLAFSHTGGRFIGNLDNFGFKGLLGYPSIGSEKIPDLLFALYQGMFSAITVALAIGAAAERGRMLPCVVFMFVWATLIYDPIACWTWNSSGWSFRMGGLDFAGGTPVHISSGSAALAYSLMLGKRRGHGTHELNYRPHNVTHIVLGTVFLWVGWFGFNGGSALSGNMRAVMACVVTNLAASVGGITWCLLDYRLEQKWSTVGFCSGVIAGLVAITPGSGYVPSWAAVIYGVVGGAACNYATKLKFVIGVDDALDIFAEHGVGGIVGNILTAFFAADYIAHLDGSTEINGGWLNGHYKQLGYQVADSVAGFAYSFGGTCIILFIMNLIPGLSLRATEEAEILGIDDAELGEFAYDYVELTREVISDDDTVPKMSSENNASVELPAERAEKSA

SEQ ID NO: 67575 - DNA, 1479 bp, Hebeloma cylindrosporum
  CDS (1)..(1479)
atgagtaatttagctaccggccagttcgaccgtggtgacatatctttcatcgtcgtcgcgggcgccatggtgttcttcatggtgcccggtctggctttcctttattccggcctttctcgtcgcaaaagtgcactgtctcttatatgggccgttgcagcgagcaacgccgtcgtgatattccagtggtatttcgtcggctactctctggcgttctccagcacggcgacaaacggctacattggaaacctgagaaattttgggctcatgaaggttgaggctgatccctctccgggctcccctctcattcccgagattctttacagtttcttccagatggaattcgcatgcgtaaccgccggtattctaatgggcggtctcgccgaacgtggtcgcgttttcccggccatgattttcatatttttttggatgaccttcgtctactgccctcttgcttgttgggcatggagcacgcatggctgggcttttaaatggggtgttcttgattttgcaggcggtggtcccgttgagattggaagcggtgttggtggcctggcctatgcctgggtccttggtcgcaggaacgaacgagaattgcttaacttccgtcctcataacgttggcctggttggcttgggaaccttcatgctatggtttggatggatcgggttcaacggaggaagtgcttttggtgcaaatctccgcgccatctttgccatttggaataccatgattgctgcgtcattcgggggcatggtttggtgccttctcgatttccgcatcgagcgtcggtggagtatggtcggattttgctccggtacgatcgccggtcttgttgcagctacaccttcctctggctacttgagaccatggtcgtcagttgtggtcggagttcttgcgggcaccttgtgtaattttgctaccaaagtcaagtttttgttgcgaatcgatgacgcgctcgatctattcgcggaacacgctgtaggtggcgttgttggtttgatgttgaacgcattctttgccgaaactgccgttattgccatggacgatgttaccatcggagttcgtggtggttgggtcgatcacaattggaagcaactttatattcagtttacctatgtggttgcgacttgcgcctactcttttgtcatgactgctctggtggcaaaaaccgtcgatctgatccctggcctgaaactcagaagtagtccagaaggcgagatgcttggtatggacgaggttgagatcggagaattcgcaactgattacattgaattgcgccgggacgttgcggactgttcgactttcggtttcacaagaggttctaatggatacatcccacatgctgcgacgaatgaaacacacgctcaagatactagttctaacgacgacccgcatcatcgtatcgatgaacccacggcgcctgaacgtttggaacccctcaccgaaaaaaatgaatgtgggaccgtgactccatcataa

SEQ ID NO: 67576 - protein, 492 aa, Hebeloma cylindrosporum
MSNLATGQFDRGDISFIVVAGAMVFFMVPGLAFLYSGLSRRKSALSLIWAVAASNAVVIFQWYFVGYSLAFSSTATNGYIGNLRNFGLMKVEADPSPGSPLIPEILYSFFQMEFACVTAGILMGGLAERGRVFPAMIFIFFWMTFVYCPLACWAWSTHGWAFKWGVLDFAGGGPVEIGSGVGGLAYAWVLGRRNERELLNFRPHNVGLVGLGTFMLWFGWIGFNGGSAFGANLRAIFAIWNTMIAASFGGMVWCLLDFRIERRWSMVGFCSGTIAGLVAATPSSGYLRPWSSVVVGVLAGTLCNFATKVKFLLRIDDALDLFAEHAVGGVVGLMLNAFFAETAVIAMDDVTIGVRGGWVDHNWKQLYIQFTYVVATCAYSFVMTALVAKTVDLIPGLKLRSSPEGEMLGMDEVEIGEFATDYIELRRDVADCSTFGFTRGSNGYIPHAATNETHAQDTSSNDDPHHRIDEPTAPERLEPLTEKNECGTVTPS

SEQ ID NO: 67577 - DNA, 1416 bp, Hebeloma cylindrosporum
  CDS (1)..(1416)
atggtgaatgtcacctacgacgcctctcagccactcgtatggactgacgctgccggaaacactggtgtctatagcccaggagatatcgcctgggtcctagcttcaactgcgttggtatggataatggtccccggtgttggattcttctattctggattgcttcggcggaagaatgctctgtctatgatatacctgagcatgatgacagtagccgtggtgtctttccaatggttcttctggggtttctcgcttgcttttagcgacggtgctagtctgttcatcggagacctaaaatatttcggcatgaaaggcgtcctcgaagagccttccattggaagtacacgtataccggccatcgttttcagtgtctatcagctcatgttcgcggctattacaccaatgatcgcggtcggtggtttcgccgaacgcgcgcaccttggacccctgcttttcttcgtttttgtgtggtcaaccctcgtttatgaccccattgcatgctggacatggaactccaaaggctggtctttcgtccacggaagctacgacttcgccggtggaacacctgtccacatctcttctggcacggccgccctcgctatttccatctacctcggaaaacgacgcggatacggcactgaagtgcttacatataagcctcacaacactacctacgttatccttggaactattttcctttggtttggatggttcggattcaacggaggctccgcccttgcagctaacttgcgagcggcccaggcttgtatcgttaccaatttggccgcgagtgttggtggactgacctggatgctttgggactatcgtattgaaaaaaaatggtcggctgtcggcttttgctcaggcgctatcgcaggcctcgtcgccattactcccggctctggtttcgtgggttcccctgctgccgttttattcgggttcatggccggtacagtgtgcaatttcgcgacccaactcaagttctttgctggatatgacgactccctcgatatcttcgcttcccatgccgtcggaggtgtcgtcggtaatctgctaacggcgctcttcgcacaagccagcgtcgctggtttcgatggcttcaccgtcatccctggaggttggttggaccgccactacatccagctcgcatggcacgtcgccgactcggctgcgggcctcagttattcatttgtggtgactactatcatcctctgggtcatgcactttatccccggtctccgccttcgcgtcccagaagaaaccgaaataataggtatcgacgaagccgacatgggcgaattcgcctacgactacgtaggcctggagaccgagctcaagccacatgtatacgtgcgctcaacaggaacagcttatgactccggccggaactccgagctcaaggaacgctcaagtgcctag

SEQ ID NO: 67578 - protein, 471 aa, Hebeloma cylindrosporum
MVNVTYDASQPLVWTDAAGNTGVYSPGDIAWVLASTALVWIMVPGVGFFYSGLLRRKNALSMIYLSMMTVAVVSFQWFFWGFSLAFSDGASLFIGDLKYFGMKGVLEEPSIGSTRIPAIVFSVYQLMFAAITPMIAVGGFAERAHLGPLLFFVFVWSTLVYDPIACWTWNSKGWSFVHGSYDFAGGTPVHISSGTAALAISIYLGKRRGYGTEVLTYKPHNTTYVILGTIFLWFGWFGFNGGSALAANLRAAQACIVTNLAASVGGLTWMLWDYRIEKKWSAVGFCSGAIAGLVAITPGSGFVGSPAAVLFGFMAGTVCNFATQLKFFAGYDDSLDIFASHAVGGVVGNLLTALFAQASVAGFDGFTVIPGGWLDRHYIQLAWHVADSAAGLSYSFVVTTIILWVMHFIPGLRLRVPEETEIIGIDEADMGEFAYDYVGLETELKPHVYVRSTGTAYDSGRNSELKERSSA

SEQ ID NO: 67579 - DNA, 1587 bp, Ustilago maydis
  CDS (1)..(1587)
atggtcaacatcacttacggtgtgcttcaagcacccgatggctcctcggctacctcgagcgccatcgccaagggaactgacattatcgtttcttacggcccaaatggcgagagcgtcgcttcctattcgcccggtgacatttcctgggttctcacatgtaccgctctcgtatggctcatgattcccggtctcggttacctctactctggtcttgctcgcagaaagaacgcgcctcacctccttttgctcactttggccgctctcgccgttgtctcgttccagtggttcttttggggctactcgctcaccttttctcaaacctcaggcgctttcctcggcaatctgcgcaactttggctacatgggtgttctcgaaaatcccgtgcctcaggcatacaacaaagtgcccgaaattgtatacgccatctaccagtgcatgttcgccaaccttgtccccgccatcgccatcggtgccgcttgtgagcgtggccgtgtctggcctttcctcgtctttacctttgtctggaccacgctcgtctacgatgtgatcgcctgctgggtctggaaccccaccggttgggcgttcaagtggggtgttcttgactacgccggtggtggacccgtcgagattaactcgggtatcactggtctcgtcatctcttactatcttggccctcgtaccggttatggcaccgagcgtctactcttcaagccacacaacgtttcctacatcttcctgggcaccgccttcctctggttcggctggatcggcttcaacggtggttcggtctttgctgccaacctccgtgcggctatggccatcagcaccaccaacctcgccgcttcgtccgccggtctcacctggatgttcctcgactggcgtctcgaacgcaagtggtccgtcgttggcttctgcacgggtgccattgctggtctcgtcgccatcactcccgctgctggctttgtcggcatgcccgctgctttgctcgtcggagtcgtttcctcggccgtttccaactttgccaccgttctcaagggccccatgcgcgttgacgatgtcatggacattttctcggtccacgctctcgccggtattgttggcacccttctcaccggtatcttcgcccaggcttccgtagccaacaacgacggcaacacggtcatcgccggtggctggctcgactcaaactggatccagctcgcctatcaactcgcctactgtgtcgctgtcacctgttggtgtggtggcgtcacgtttgctatcatgtttgttattgaccacattccttacatcggtcccttccgttcgagcgagatgggtgaagtggtgggtatggatgaggaccagtgtggcgagtgggcttacgactacgcctttatcaaccgtgatcttgagggcaactacaagcccgaccacggtcagacgctcgacatcaacgaaaagatgcccaacgttcatcaaaccgactcgctgcgctccgaaacgcacgccgactcgagccaagacaaccccaactcgcagctcgccgctgccgaacaccagtctccatccaccgctgaaccagccgtggaaatgaagcaggcttaa

SEQ ID NO: 67580 - protein, 528 aa, Ustilago maydis
MVNITYGVLQAPDGSSATSSAIAKGTDIIVSYGPNGESVASYSPGDISWVLTCTALVWLMIPGLGYLYSGLARRKNAPHLLLLTLAALAVVSFQWFFWGYSLTFSQTSGAFLGNLRNFGYMGVLENPVPQAYNKVPEIVYAIYQCMFANLVPAIAIGAACERGRVWPFLVFTFVWTTLVYDVIACWVWNPTGWAFKWGVLDYAGGGPVEINSGITGLVISYYLGPRTGYGTERLLFKPHNVSYIFLGTAFLWFGWIGFNGGSVFAANLRAAMAISTTNLAASSAGLTWMFLDWRLERKWSVVGFCTGAIAGLVAITPAAGFVGMPAALLVGVVSSAVSNFATVLKGPMRVDDVMDIFSVHALAGIVGTLLTGIFAQASVANNDGNTVIAGGWLDSNWIQLAYQLAYCVAVTCWCGGVTFAIMFVIDHIPYIGPFRSSEMGEVVGMDEDQCGEWAYDYAFINRDLEGNYKPDHGQTLDINEKMPNVHQTDSLRSETHADSSQDNPNSQLAAAEHQSPSTAEPAVEMKQA

SEQ ID NO: 67581 - DNA, 1482 bp, Ustilago violacea
  CDS (1)..(1482)
atggtcaacgttgcgtacgatacgacagggactcttgttgccaatgtagatggcactcagaccgtgtacaatggcggtgacatggcatgggtgcttgtcgccggtgttctcgtcatgatcatgtcccccggagttggtttcctctattctggtcttttgcgtaggaagaatgctttgtctatgatgatgctcggtgtccttgtctatgcggttattacaattcaatggtttttttggggctactcgttggcttttagcagcaccggcagtgccttcatcggcgacttgaagcactttggcctcatgaacgtcacgctcgaaccatccgccgggtcctccaagattcctgctctgttgtattacttctaccaatccatgttcgccactgtgactgtggttattcttgttggaggtattgcagaacgtgcacgtattctaccgcttctcattttctgcttctgttgggccaccatcgtgtacgaccctattgccaactgggtctggaaccccaacggatggctctacaagctcggtgagctcgactttgccggcggaggacccgtccatatcacttcgggaaccgctggctttgcgtggtcgctctacttgggccgtcgtcgcggttatggtacagccaagctcgcttaccgcccccactcggtcttccaaatcatcctcggcaccgtcttcctctggttcggctggttcggatttaacggtggatccgaactggcgatgaacttgcgcgcagtccaggcctcgactgtcaccaacatcgctgccgctatgggtggaatcacctggttcgcgatggattggttctacaccaagaagtggtctgctgtctcgatgtgctccggtatcctcgctggtctcgtcggcatcacccctgcggctggttatattggctctcccgcggcgttggccattggtttcctcaccgcaattgcatgcaactttggcactggcctcaaagttctgctcggaatcgatgatgccgtcgactcgttcgcgctccacgccattgggggctactgcggatccgccttgactgcgctcttcgccgatagccgcgtcgctggatttgatggctacaccgagattcctggcggctggatcaaccacaactacatccagcttgggtggcaactcgccggagcgacgacgatcatggcttacaccttcgtcgtcacctacctgctcctctttgtcatcgaccacattcctggcctcaaactccgagctactgaggacatggagattcttggtatcgacgagaccgagctcggcgagaacgcctacgactttgtcttccgcaaccgtgatcttgagaaccctgaggaattctccgaattgcacaaccgagcaactggcgaagaccttagccgccaagtgagccatcactcgtcgtcgagccacaacaaggacatcaagtcgcctcactccgctgtccccgtgacggaggagaaattgagcgtttga

SEQ ID NO: 67582 - protein, 493 aa, Ustilago violacea
MVNVAYDTTGTLVANVDGTQTVYNGGDMAWVLVAGVLVMIMSPGVGFLYSGLLRRKNALSMMMLGVLVYAVITIQWFFWGYSLAFSSTGSAFIGDLKHFGLMNVTLEPSAGSSKIPALLYYFYQSMFATVTVVILVGGIAERARILPLLIFCFCWATIVYDPIANWVWNPNGWLYKLGELDFAGGGPVHITSGTAGFAWSLYLGRRRGYGTAKLAYRPHSVFQIILGTVFLWFGWFGFNGGSELAMNLRAVQASTVTNIAAAMGGITWFAMDWFYTKKWSAVSMCSGILAGLVGITPAAGYIGSPAALAIGFLTAIACNFGTGLKVLLGIDDAVDSFALHAIGGYCGSALTALFADSRVAGFDGYTEIPGGWINHNYIQLGWQLAGATTIMAYTFVVTYLLLFVIDHIPGLKLRATEDMEILGIDETELGENAYDFVFRNRDLENPEEFSELHNRATGEDLSRQVSHHSSSSHNKDIKSPHSAVPVTEEKLSV

SEQ ID NO: 67583 - DNA, 1545 bp, Arabidopsis thaliana
  CDS (1)..(1545)
atggacaccgcaaccaccacatgctctgccgtagatctatctgccctcctatcctcttcttctaactcaacatcttccctcgccgcggcaacctttttatgttcccaaatttcaaacatctccaacaaactctccgacacaacttatgccgtcgacaacacgtatctcctcttctccgcctaccttgtctttgccatgcagctcggtttcgctatgctttgtgctggatcagtccgagccaagaacactatgaacatcatgcttaccaatgtccttgatgctgccgctggagccatctcttactacctcttcggattcgcattcgcctttggtacaccttccaacggattcatcggtcgccaccatagcttcttcgctttaagctcttaccctgaacgccccggctccgacttcagctttttcctctaccaatgggcttttgccatagccgcggccggaatcactagcggttccatcgccgagcgaacgcaattcgttgcttaccttatctactctactttcttgaccggttttgtttacccgacagtctcgcactggttctggtcaagtgatggatgggctagcgcgtcccggtctgacaacaatctcttgtttggctcaggtgctattgatttcgcaggttcaggagttgttcacatggtaggtggaattgccggtttatgtggagcgttagttgaaggaccaagaataggtagatttgaccggtcaggccggtccgtggctttacgtggtcacagtgcatcccttgtcgtgcttggtaccttcttgttgtggtttggatggtatgggtttaaccctggttcctttttaaccattcttaaaggctacgacaagtctcggccatattatggtcaatggagcgctgtaggtcgcaccgcggtcaccacaacgctttctggctgcaccgctgcgttgactactctattcagtaaacggcttttagcaggtcattggaacgttattgacgtatgcaacggacttctaggcggctttgcagctataacctccggatgtgccgtggtggagccgtgggctgctatagtatgtggctttgtggcatcatgggttttaatcggatttaacttgcttgccaagaaacttaaatatgatgacccactcgaggctgctcagctccacggtggatgtggagcatggggattaatctttaccgggctgttcgcaaggaaagaatacgttaacgagatttactccggtgataggccttacggactgttcatgggcgggggaggaaaactgctcgccgcgcagatcgttcagattattgtgatcgttgggtgggtgacggtaactatgggaccgttgttttatgggttacataagatgaatcttttgaggatatcagcagaagatgagatggcaggaatggacatgacacgtcatggaggatttgcttacgcatacaatgacgaagacgacgtgtcgactaaaccatggggtcatttcgctggaagagtggagcctacaagccggagctcgactcctacaccgaccttgactgtttga

SEQ ID NO: 67584 - protein, 514 aa, Arabidopsis thaliana
MDTATTTCSAVDLSALLSSSSNSTSSLAAATFLCSQISNISNKLSDTTYAVDNTYLLFSAYLVFAMQLGFAMLCAGSVRAKNTMNIMLTNVLDAAAGAISYYLFGFAFAFGTPSNGFIGRHHSFFALSSYPERPGSDFSFFLYQWAFAIAAAGITSGSIAERTQFVAYLIYSTFLTGFVYPTVSHWFWSSDGWASASRSDNNLLFGSGAIDFAGSGVVHMVGGIAGLCGALVEGPRIGRFDRSGRSVALRGHSASLVVLGTFLLWFGWYGFNPGSFLTILKGYDKSRPYYGQWSAVGRTAVTTTLSGCTAALTTLFSKRLLAGHWNVIDVCNGLLGGFAAITSGCAVVEPWAAIVCGFVASWVLIGFNLLAKKLKYDDPLEAAQLHGGCGAWGLIFTGLFARKEYVNEIYSGDRPYGLFMGGGGKLLAAQIVQIIVIVGWVTVTMGPLFYGLHKMNLLRISAEDEMAGMDMTRHGGFAYAYNDEDDVSTKPWGHFAGRVEPTSRSSTPTPTLTV

SEQ ID NO: 67585 - DNA, 1545 bp, Solanum lycopersicum
  CDS (1)..(1545)
atggcctccgccatgacttgctcagctgccgagctcttccctcatctcggcagctcagcaaatgccacagcggccgcagaattcatctgcagccgcttctcagctgtctcagagtacctcacaaacaccacctacgcggtggacaccacatacctcctcttctcggcttacctcgtcttcgccatgcaattgggatttgccatgttgtgcgcgggctctgtccgcgccaaaaacacgatgaatataatgcttacaaacgtgcttgatgctgctgctggtggattttcttattatctctttggttttgcctttgcctttggagctccttctaatggtttcattggaaaacatttttttggattaaaagagtttccttcacaagcttttgactatagctattttctttatcaatgggcctttgcaatagctgcagcaggtatcacaagtgggtccatagctgaaagaacacaatttgtggcttatctcatttactcttcatttttgactggttttgtgtacccaattgtctcacattggttctggtccggtgatggttgggccagtgcatcaaaaaccgatggtaacttattattgcggttcggtgttatcgattttgccgggtccggtgttgttcatatggttggtggcattgccggtctatggggcgctttcatcgaaggaccacgaatcggtcggtttgatcggtccggtcggtctgttgccctaagaggccatagtgcctcattagttgtattaggtacttttttactatggttcggttggtacggatttaatcctggttcattcttaactattcttaaatcatacgatcataccataagaggtacttattatggtcagtggagcgcgatcggtagaacagctgtcacgactacattggctggttgtaccgccgctctgacaactttgttttgtaagaggcttttagtggcacattggaatgtagttgatgtatgtaacggtttactaggtggatttgcagcaatcacgtcaggttgtgcagttgttgagccatgggcagctatagtttgtggatttatcgcagcttgggttttaattggatttaacgcattggcagctaaattaaaatacgacgatccattagaagcagcacaacttcatggtggttgcggttcatgggggataatatttactggattattcgcgaaaaaagaatatgtcaacgaagtatatccaggatttcctaatagaccatatggattgtttatgggaggtggtggaaaactattaggtgcacaagtaattcaagttgttgtgattattggatgggtgagtgtcacaatgggaccattgttttatttgttacataagtttaagctattgaggatatcgcgagacgatgaaacagcagggatggatttaacaagacatggaggatttgcatatatatatcatgatgaagatgaaggttcatctatgcctggatttaaaatgacaagagttgaaccgactaatacttctacaccagatcatcaaaatagatctgttaatgtggttgtataa

SEQ ID NO: 67586 - protein, 514 aa, Solanum lycopersicum
MASAMTCSAAELFPHLGSSANATAAAEFICSRFSAVSEYLTNTTYAVDTTYLLFSAYLVFAMQLGFAMLCAGSVRAKNTMNIMLTNVLDAAAGGFSYYLFGFAFAFGAPSNGFIGKHFFGLKEFPSQAFDYSYFLYQWAFAIAAAGITSGSIAERTQFVAYLIYSSFLTGFVYPIVSHWFWSGDGWASASKTDGNLLLRFGVIDFAGSGVVHMVGGIAGLWGAFIEGPRIGRFDRSGRSVALRGHSASLVVLGTFLLWFGWYGFNPGSFLTILKSYDHTIRGTYYGQWSAIGRTAVTTTLAGCTAALTTLFCKRLLVAHWNVVDVCNGLLGGFAAITSGCAVVEPWAAIVCGFIAAWVLIGFNALAAKLKYDDPLEAAQLHGGCGSWGIIFTGLFAKKEYVNEVYPGFPNRPYGLFMGGGGKLLGAQVIQVVVIIGWVSVTMGPLFYLLHKFKLLRISRDDETAGMDLTRHGGFAYIYHDEDEGSSMPGFKMTRVEPTNTSTPDHQNRSVNVVV

SEQ ID NO: 67587 - DNA, 1515 bp, Arabidopsis thaliana
  CDS (1)..(1515)
atggcgtcggctctctcttgctctgcctctgatctgattccattactatcaggtggagccaacgccaccgcagcagcagccgccgctgaatacatctgcgggagattcgacacagtcgccgggaaattcactgatgcggcttacgcaatcgacaacacttaccttctcttctctgcttacctcgttttcgcgatgcagctcggtttcgccatgctctgtgccggatccgtacgtgcaaaaaacacgatgaacattatgctcacgaacgtcatcgacgctgcagccggaggtctcttctattatctcttcggtttcgcttttgcttttggatctccttctaatggattcatcggaaaacatttctttggaatgtatgattttcctcaacctacgtttgattatccttattttctatatcaatggactttcgctatcgccgccgctggaatcacgagtggttcgatagcggagaggactcagttcgttgcgtatttgatctattcttctttcttgacgggtcttgtttacccgattgtgtcgcattggttttggtcttctgatggttgggcgtctccggctagatctgagaaccttctgtttcaatcaggtgtgattgatttcgctggctctggtgttgttcatatggttggtggtattgctggtttatggggagctttaattgaaggacctaggattggtcggtttggagttgggggtaaaccggttacgttgcgtggtcatagtgctacgttggttgttcttggaacgtttttgttatggttcggatggtacgggtttaacccgggctcgtttgcaactatttttaaggcgtatggggagactccagggagctcgttttacggacaatggagcgcagttgggagaaccgcggtaacaactacgttagctggttgcacggcggcgttaacgactctgtttgggaaaagacttattgatgggtattggaatgtaactgatgtttgcaatggtttgttaggcgggtttgcggctataactagcggatgttcggttgtggaaccgtgggctgcgcttgtatgtgggtttgtagccgcatgggtgctgatgggatgcaatagactagcggaaaagctccaatttgatgatccgttggaagcggctcagcttcacggtggttgtggtgcgtgggggattattttcaccgggttgttcgcggagaaaagatacattgccgagatctttggaggcgacccgaataggcctttcggattgctaatgggaggaggaggtaggttgcttgcggcgcacgtcgttcagattttggtgattacgggttgggttagtgtgacaatggggactctgttttttattttgcataagctgaaactgttgaggataccggcggaggatgagatagctggggtggatccgacgagtcacggagggttggcttatatgtacacagaagatgagattaggaatgggatcatggttaggagagtgggtggtgataatgatcccaatgtaggtgtttga

SEQ ID NO: 67588 - protein, 504 aa, Arabidopsis thaliana
MASALSCSASDLIPLLSGGANATAAAAAAEYICGRFDTVAGKFTDAAYAIDNTYLLFSAYLVFAMQLGFAMLCAGSVRAKNTMNIMLTNVIDAAAGGLFYYLFGFAFAFGSPSNGFIGKHFFGMYDFPQPTFDYPYFLYQWTFAIAAAGITSGSIAERTQFVAYLIYSSFLTGLVYPIVSHWFWSSDGWASPARSENLLFQSGVIDFAGSGVVHMVGGIAGLWGALIEGPRIGRFGVGGKPVTLRGHSATLVVLGTFLLWFGWYGFNPGSFATIFKAYGETPGSSFYGQWSAVGRTAVTTTLAGCTAALTTLFGKRLIDGYWNVTDVCNGLLGGFAAITSGCSVVEPWAALVCGFVAAWVLMGCNRLAEKLQFDDPLEAAQLHGGCGAWGIIFTGLFAEKRYIAEIFGGDPNRPFGLLMGGGGRLLAAHVVQILVITGWVSVTMGTLFFILHKLKLLRIPAEDEIAGVDPTSHGGLAYMYTEDEIRNGIMVRRVGGDNDPNVGV

SEQ ID NO: 67589 - DNA, 1494 bp, Schizosaccharomyces pombe
  CDS (1)..(1494)
atgtcttccactaccgatgccactcccaccccttcgggtgtcaatggcggtgattccatgaccgtcaatcttaatcaattttacaataatggtgatgttgcctggattctcacaagtaccgctttggtgtttatcatgattcccggtgtcggtttcttttactccggcttggctcgtcgtagaagtgccatttctatgctgtttttgtcaatgatgtctgtcgccattgttgcctttcagtggttcttttggggttattcgcttactttctctcacgagggtggtccatacatcggatccctcgccaatttcggtcttcgccaaacgttgggtagaccttcttccggtgcttccagtgtacccgacatcttgttttgcgtgttccaaggtatgtttgccgccattactcccgctttggctatcggtgctgccgctgatcgcggtcgcatgtttccctgtatggtcttcatgtttctctggacttccatcgtctacgacccaatcgccttttggacttggaatcctaatggttggttgaacaagttgggctcttacgatttcgctggtggctctcccgttcacatctcctccggtatggctgctttggcttattccatcgtaattggaaagcgttgtgaccatggtactaccaaatatcgcccacacaacgttccccacgtcgttcttggcaccgtatttttgtggtttggttggttcggctttaacggtggttcttccgctgctgccaacatgcgtggtgtcatggctgtcgtcgttacacatcttgctgcttctgttggtggtattgtttggtgtgttatcgattttgccaagaaccgtcactggtctgtcgtcggcttctgtgaaggtgccgtcgctggtttggtcgccattactcctggctccggtttcgttcctccatgggctgccgtcgtcattggtgctttaggcgctgtcttctgctatgctgctacttaccttaagaaaatcatccgtgtcgatgatgccttggatatctttgctgaacatggtgttggtggtatggttggcaatatccttaccgctctttttgccgctgattacattgaagctttggatggtagtggtactgcttacactggtggttggattactcaccattacattcaacttggttatcagcttgcagacactgtctcttgtgccgcatattcattcgctgtctcatgtgcactcttgtttgttatgaattacattccaggactttcacttcgtgtttcacgcgaggatgaggttctcggtttggataagattgaacttggtgaaagtgcatattattacaaagactctactgacgagcctcccccaatcactacaagtggcgttcaatacacttctccaactgttagcgattccgcatccaacgaaaaggagcaagaacacagagctcaaaatgaggctcaaaaggaagaggagtatagagctgaatctgaggctcaagctccggctatttag

SEQ ID NO: 67590 - protein, 497 aa, Schizosaccharomyces pombe
MSSTTDATPTPSGVNGGDSMTVNLNQFYNNGDVAWILTSTALVFIMIPGVGFFYSGLARRRSAISMLFLSMMSVAIVAFQWFFWGYSLTFSHEGGPYIGSLANFGLRQTLGRPSSGASSVPDILFCVFQGMFAAITPALAIGAAADRGRMFPCMVFMFLWTSIVYDPIAFWTWNPNGWLNKLGSYDFAGGSPVHISSGMAALAYSIVIGKRCDHGTTKYRPHNVPHVVLGTVFLWFGWFGFNGGSSAAANMRGVMAVVVTHLAASVGGIVWCVIDFAKNRHWSVVGFCEGAVAGLVAITPGSGFVPPWAAVVIGALGAVFCYAATYLKKIIRVDDALDIFAEHGVGGMVGNILTALFAADYIEALDGSGTAYTGGWITHHYIQLGYQLADTVSCAAYSFAVSCALLFVMNYIPGLSLRVSREDEVLGLDKIELGESAYYYKDSTDEPPPITTSGVQYTSPTVSDSASNEKEQEHRAQNEAQKEEEYRAESEAQAPAI

SEQ ID NO: 67591 - DNA, 1428 bp, Arabidopsis thaliana
  CDS (1)..(1428)
atggccggagcttacgatccaagcttgccggaggttcctgaatggctcaacaaaggagacaacgcgtggcagctcacggcagcgactctggttggtctacagagtatgccaggtcttgttatcctctatgcctccatcgtcaagaagaaatgggctgtgaattcagcttttatggctctttacgctttcgccgccgttcttctctgttgggttctcctctgttacaaaatggcttttggagaagagcttttgccgttttggggcaaaggtggtccagctttcgaccaaggataccttaagggacaagcaaagatcccaaatagtaatgtggcggcgccgtattttccgatggcgacgttggtgtattttcagttcacattcgcggcgataacgacgatacttgtggcgggatctgtgttggggaggatgaatattaaagcatggatggcttttgtgccattgtggttgatctttagctacacagttggagcttatagtatatggggaggtgggtttctgtatcagtggggagttattgattattccggcggttatgttattcatctctcctccggtgttgccggtttcgtcgctgcttactgggtaggaccaaggcctaaggctgacagagagagattcccaccgaacaatgttcttctaatgcttgctggagctggacttttatggatgggatggtccggttttaacggtggtgctccttacgcggccaacttaacctcctctatcgccgtgttaaacaccaacctctcggccgccacaagcctccttgtatggactacacttgatgtcatcttctttggcaaaccttctgtcatcggagcaattcaaggcatggttactggcttagccggcgtcactcccggagcaggtttgatccaaacatgggcagctataataattggagtagtctcaggaacagctccatgggcctctatgatgatcattcacaagaaatccgctctccttcaaaaggtggatgatacattagcggtgttttacacacacgccgtggctggtttacttggtggaataatgacagggttgtttgcacaccctgatctctgcgttttggtacttcctctcccagcgaccagaggagctttctacggtggcaatggcggcaaacagcttttgaaacagttggctggagctgccttcattgccgtctggaatgtggtgtcgactactatcattctactcgctattagggtgttcataccattgagaatggctgaggaagagctcgggattggagacgacgcagcacatggggaagaagcttatgctctttggggagatggagagaagtttgatgctacaaggcatgtgcaacagtttgagagagatcaagaagctgctcatccttcttatgttcatggtgctagaggtgtcaccattgttctatga

SEQ ID NO: 67592 - protein, 475 aa, Arabidopsis thaliana
MAGAYDPSLPEVPEWLNKGDNAWQLTAATLVGLQSMPGLVILYASIVKKKWAVNSAFMALYAFAAVLLCWVLLCYKMAFGEELLPFWGKGGPAFDQGYLKGQAKIPNSNVAAPYFPMATLVYFQFTFAAITTILVAGSVLGRMNIKAWMAFVPLWLIFSYTVGAYSIWGGGFLYQWGVIDYSGGYVIHLSSGVAGFVAAYWVGPRPKADRERFPPNNVLLMLAGAGLLWMGWSGFNGGAPYAANLTSSIAVLNTNLSAATSLLVWTTLDVIFFGKPSVIGAIQGMVTGLAGVTPGAGLIQTWAAIIIGVVSGTAPWASMMIIHKKSALLQKVDDTLAVFYTHAVAGLLGGIMTGLFAHPDLCVLVLPLPATRGAFYGGNGGKQLLKQLAGAAFIAVWNVVSTTIILLAIRVFIPLRMAEEELGIGDDAAHGEEAYALWGDGEKFDATRHVQQFERDQEAAHPSYVHGARGVTIVL

SEQ ID NO: 67593 - DNA, 1539 bp, Schizosaccharomyces pombe
  CDS (1)..(1539)
atgtcgtcagtgaattcaattcccacagcaacttctactgtttatatttcagtactgccagctacagctacacctagtggtggtagtggtggaaatgttttgcacgaagatcttaataaattttatgattatggaaacactagttggattttagcttgtactccattgtgtcttattatggtgcctggtgtggcttttttctactctggcttagcaagaaggaaaaatacattggctcttatcatgctctctatgcttggtttatgtgttagttttttccaatggtatttctggggttattctcttgctttttctcaaactggaacctctggttatattggcaatcttcgtcattttgcctttattcgcacacttgccgattactctcctggtagcaataatattcccgagcttgtatttgcaaattttcaaggaatgttcgccgcaattactgtagccctcttcactggtgccgccgctgaaagaggtcgtattggtccaatgctcatcatcacatttgtgtggctcactgtcgtttattgtcccatagcgtgttggatttggaatccaaatggttgggcttttaaatttggtgtatacgatttcgctggcggaggacctgtagaagttggatcaggatttgcagctttggcgtatacggtttgtttaggacgtcgatccaaatttgttgaggaacaatttcgccctcattctgtgctcaatgttgtattgggaacatctctgctatggtttggttggcttggtttcaacggtggtagtgcttacggctccaatctgcgagccgctatggcaatcaccaacacaaacttagcaggtgctgtagctggtttagtatgggttatttacgactacatttttcgcactaggaaatggtcaaccataggtttttgttccggggttgttgccggtttggtggctgcaacgccttgtgctggttttgtgagtcctcatgcctctttggcaattggtgctattactggcttatgttgcaattgggccattaagttaaagtcacatatgcgcattgatgatgcgatggatattttcgctatccacggtgttgcgggttttgtgggtacctttttgaatggtttgtttgccgttgattatatcgcagcaatggatggtatttatgttggtgaaaacaaaatcagaggtggttggtttgatcaccattggcgccaactaggcttgcaaatggcctatatttgtgctgttggtgcatacgactttgttgtcacgtttatcattttattcattacggacaaaattccctaccttcaacttcgagtgagccctgatgctgaagaaattggtgtggatgctgatcaaataggtgaatacgcgtttgattatattgaagaacgtcgtgaatataagcattggaagatttcccctgccggtgtacctgaagaaatcattatttccaatggcgttgctcaacctactggaaatgtggctgctcccggcaagattctagaatcaacaaacccattggagcttggacttacgatctaa

SEQ ID NO: 67594 - protein, 512 aa, Schizosaccharomyces pombe
MSSVNSIPTATSTVYISVLPATATPSGGSGGNVLHEDLNKFYDYGNTSWILACTPLCLIMVPGVAFFYSGLARRKNTLALIMLSMLGLCVSFFQWYFWGYSLAFSQTGTSGYIGNLRHFAFIRTLADYSPGSNNIPELVFANFQGMFAAITVALFTGAAAERGRIGPMLIITFVWLTVVYCPIACWIWNPNGWAFKFGVYDFAGGGPVEVGSGFAALAYTVCLGRRSKFVEEQFRPHSVLNVVLGTSLLWFGWLGFNGGSAYGSNLRAAMAITNTNLAGAVAGLVWVIYDYIFRTRKWSTIGFCSGVVAGLVAATPCAGFVSPHASLAIGAITGLCCNWAIKLKSHMRIDDAMDIFAIHGVAGFVGTFLNGLFAVDYIAAMDGIYVGENKIRGGWFDHHWRQLGLQMAYICAVGAYDFVVTFIILFITDKIPYLQLRVSPDAEEIGVDADQIGEYAFDYIEERREYKHWKISPAGVPEEIIISNGVAQPTGNVAAPGKILESTNPLELGLTI

SEQ ID NO: 67595 - DNA, 1554 bp, Schizosaccharomyces pombe
  CDS (1)..(1554)
atgcttaacgagccgaatgcgctattacgtcgcgacgcaaactccactatcgcgactgtaacagaactgtttcccaacgaatactcaaatgctgatatagcgtacgtacttttgagtacagtggtagtatttaccgtaacccccggtatagctctttattatgctgggatggttagaaagaattcggctctctcaatattgactcagtcgtttttggttacagcagtggtgtttattcaatggtatctgtttggatactctcttgcttgctcatcggggtcctctttttatggaacgttgtggcaaggagggatgaaccatctttggttagaaccatatataccagggtccacaattccagcaattgtttactttccatttggtggtctctttgctgtagcgacagctcaattgtttgccggggcaatggctgagcgcggtaggctaattccctctctcgtaatatcttttttatacattacgctggtttattgtccacaggcatactggacatgggcacccaatggctggctctacacattgggtgcccttgactttgcaggcggcggtcccgtacatatttcatctggttttgctgcgctcgcttattccttatgtttaggtcgtcgcattgttgtcgacgagccagacagacccgattcaattcggtcgaccgataatgcagatttaccgtcgtcttcccaaaacaactgcaaagctaattggaagcggtggtttgggttcaaatctgtttcctggaagaattccttcggcagaggaaagatagctcataatcctccgcatgatgctggtatggtttacattggcgttgttttgatttggtttgcatggctctgcttcaattctggtactctattgactgttaatattcgtacagcttatatcatgaccaacacgctcatttcctcgtcatttggtgctttgacatgggcgattattgattacatccgttatagaaagttttccactataggtatttgcgaaggtgccattgcagggttagtgggtatcacaccagcctgtggatttgtatttccatggggagccgctgctgggggtatcgtaccggcattggtatgtaactttcttcatgacctcaatgaatggattggcgttgatgaaacgcttcgtgtctttaacttacacggtatcggcggcattgttggctccatcgtgctcggtgtagtagcgcatcccgatgtcgctgcctcagatggcgctacagttatagacgggggctgggccgttcatcactggaaacaaatgggttatcaatttgcaggttttacctctgttgctgcatggtctttcgtcataacagctatcatatgtctgttagtagatctagtaccgggccttcatattcgtgcatcttttgaagaagagttacgaggaatggattttgttgagttagaagagcaacttccaggccaaactttagagtcaaaacctatgattatatacgctcaggaaatggacgaacctgtaactcagggttcaaatataaaacaggaaaagcaggatgagttttga

SEQ ID NO: 67596 - protein, 517 aa, Schizosaccharomyces pombe
MLNEPNALLRRDANSTIATVTELFPNEYSNADIAYVLLSTVVVFTVTPGIALYYAGMVRKNSALSILTQSFLVTAVVFIQWYLFGYSLACSSGSSFYGTLWQGGMNHLWLEPYIPGSTIPAIVYFPFGGLFAVATAQLFAGAMAERGRLIPSLVISFLYITLVYCPQAYWTWAPNGWLYTLGALDFAGGGPVHISSGFAALAYSLCLGRRIVVDEPDRPDSIRSTDNADLPSSSQNNCKANWKRWFGFKSVSWKNSFGRGKIAHNPPHDAGMVYIGVVLIWFAWLCFNSGTLLTVNIRTAYIMTNTLISSSFGALTWAIIDYIRYRKFSTIGICEGAIAGLVGITPACGFVFPWGAAAGGIVPALVCNFLHDLNEWIGVDETLRVFNLHGIGGIVGSIVLGVVAHPDVAASDGATVIDGGWAVHHWKQMGYQFAGFTSVAAWSFVITAIICLLVDLVPGLHIRASFEEELRGMDFVELEEQLPGQTLESKPMIIYAQEMDEPVTQGSNIKQEKQDEF

SEQ ID NO: 67597 - DNA, 1287 bp, Escherichia coli O157
  CDS (1)..(1287): transl_table=11
  misc_feature (1152)..(1152): r is g or a
atgaagatagcgacgataaaaactgggcttgcttcactggcgatgctgccgggactggtaatggctgcacctgcggtggccgataaagccgacaatgcgtttatgatgatttgtactgcactggtgctgtttatgactattccggggattgccctgttttacggtgggttgattcgcggcaaaaacgtgctgtcgatgctgacgcaggtgacggtgacgtttgcactggtctgtattctctgggtggtttacggttactcgctggcgtttggtgagggcaacaacttcttcggcaacattaactggttgatgctgaaaaacatcgaactgacggcggtgatgggcagcatttatcagtatatccacgtagcgtttcagggatcgtttgcctgcattaccgtaggcttgatagttggggcgctggcggaacgaatccgcttctcagctgtgttgattttcgtggtggtatggctgacgctctcttacattcctattgcgcatatggtgtggggcggtggtttgctggcttctcacggtgcgctggatttcgcgggtggcacggtggtgcatattaacgccgcaatcgccggtctggtgggcgcgtatctgataggcaaacgcgtgggcttcggtaaagaggcgtttaaaccgcacaacctgccgatggtcttcaccgggactgccattctctatatcggttggtttggctttaacgccgggtcagcgggcacggcgaatgaaatcgcggcactggcatttgtgaatactgtggtcgcaacggcggcggcaattcttggctggatcttcggtgaatgggcgctgcgtggtaagccttcactgctgggagcgtgttctggcgcgattgccggtctggtcggcgtgacgccagcgtgtggctacattggtgttggcggcgcgttgattatcggcgtggtagctggtctggcgggcttgtggggcgttaccatgctcaaacgcttgctgcgggtggatgatccctgcgatgtcttcggtgtgcacggcgtttgtggcattgtcggctgtatcatgactgggatttttgccgccagctcgctgggcggcgtgggcttcgctgaaggtgtgacgatgggccatcagttgctggtacagttggaaagcattgccattacrattgtgtggtctggtgtggtggcatttatcggctacaaactggcggatctgacggttggtctgcgtgtgccggaagaacaagagcgagaagggctggacgtcaacagtcacggcgagaatgcctataacgcataa

SEQ ID NO: 67598 - protein, 428 aa, Escherichia coli O157
MKIATIKTGLASLAMLPGLVMAAPAVADKADNAFMMICTALVLFMTIPGIALFYGGLIRGKNVLSMLTQVTVTFALVCILWVVYGYSLAFGEGNNFFGNINWLMLKNIELTAVMGSIYQYIHVAFQGSFACITVGLIVGALAERIRFSAVLIFVVVWLTLSYIPIAHMVWGGGLLASHGALDFAGGTVVHINAAIAGLVGAYLIGKRVGFGKEAFKPHNLPMVFTGTAILYIGWFGFNAGSAGTANEIAALAFVNTVVATAAAILGWIFGEWALRGKPSLLGACSGAIAGLVGVTPACGYIGVGGALIIGVVAGLAGLWGVTMLKRLLRVDDPCDVFGVHGVCGIVGCIMTGIFAASSLGGVGFAEGVTMGHQLLVQLESIAITIVWSGVVAFIGYKLADLTVGLRVPEEQEREGLDVNSHGENAYNA

SEQ ID NO: 67599 - DNA, 1272 bp, Aquifex aeolicus
  CDS (1)..(1272): transl_table=11
atgagagcgctaggatttatagggattattctatcaattttttcctcttttgcgtatgcatctgaagccaagttagacactggtaacacagcttggatgctcgtagcttcagcccttgtggtgtttatgacagttcccgggctcgctcttttctatggaggtttagacaaatcaaagagcatcctaaacacgatagcgatgtccttttcagcctttgcggttgtaacactaacgtggatattcgtaggttactcagtagcctacggagacgatatttttggttttataggaaatccattccagtacgtattaggtaagggtataagcgggataaattccgataccggataccctgcacttctggatctgatgttccagctcactttcgcaacaataactaccgctttaatttcgggttccttcgtaggaaggatgaagttttcagcctggatattgtttgcaatactctggagcgtatttgtttatccgcctgtagcccactgggtatggggaggcggatttctggctaacgacggagcccttgactttgcaggaggaacggtagtccacattaacgcgggtatagcgggtttagtaggtgcgttgatcctcggaagaaggaaagacacatctcttattcccaacaacgttccactggtagccctcggtgcgggaatactgtggttcgggtggtttggattcaacgccggttctgctctcggagctaatgagagcgcagcttgggcaatgataaataccacggttgcaacttcaacggcagcactcgcatggatgtttaccgaatggcttcacgtcggtaaacctacagttgtgggaatatcttcaggtatcgttgcaggacttgtcgcaataactcccgcggcaggttttgtaaaccttatcggttcaatttttataggagctatagcatccgtgtgtgcttactttatggttgctcttgtaaaaccaaaattcggatacgacgatgcacttgacgtgttcggaattcacggagtacgcggaatagtgggagcagttttaacgggagtatttgcggatccgaacgtgggaggaactcctggactgctctacggcaatccaaaacaggttcttatacaaatagaaggcgttatcgctactatactctactccgctatcctcacagccgttatactgctggttctgaaagcagtagtaggtctaagagtttccgaagaagaggagctcgaactggacagctccctacacggtgaaaaggcttacaacctataa

SEQ ID NO: 67600 - protein, 423 aa, Aquifex aeolicus
MRALGFIGIILSIFSSFAYASEAKLDTGNTAWMLVASALVVFMTVPGLALFYGGLDKSKSILNTIAMSFSAFAVVTLTWIFVGYSVAYGDDIFGFIGNPFQYVLGKGISGINSDTGYPALLDLMFQLTFATITTALISGSFVGRMKFSAWILFAILWSVFVYPPVAHWVWGGGFLANDGALDFAGGTVVHINAGIAGLVGALILGRRKDTSLIPNNVPLVALGAGILWFGWFGFNAGSALGANESAAWAMINTTVATSTAALAWMFTEWLHVGKPTVVGISSGIVAGLVAITPAAGFVNLIGSIFIGAIASVCAYFMVALVKPKFGYDDALDVFGIHGVRGIVGAVLTGVFADPNVGGTPGLLYGNPKQVLIQIEGVIATILYSAILTAVILLVLKAVVGLRVSEEEELELDSSLHGEKAYNL

SEQ ID NO: 67601 - DNA, 1359 bp, Corynebacterium glutamicum
  CDS (1)..(1359): transl_table=11
atggacccctcagatctagcctggattctcgcagcttttgcgttggtaagcctgatgttccccggattgtccctgctctacggcggcatgctgggtgggcaacacgttcttaacacgttcatgatggttatgagctcacttggaatcatcagccttgtgtacatcatttatggacacggacttgtcttaggaaactccatcggtgggtggggaattatcggaaatccccttgaatacttcggcttccgcaacattatggaagatgacggcaccggagacctcatgtgggccggcttctacattctgttcgctgcaatctcactcgcacttgtttcatctggtgcagcggggcgcatgcgctttggagcgtggctggtcttcggtgtcctgtggttcacctttgtgtacgcgccactggcacactgggttttcgctatcgatgatcctgagtccggctacgtgggtggctggatgaaaaatgtgcttgagttccacgactttgctggtggaacggcagtgcacatgaatgcgggtgcgtctggactcgcgctggcaatagtgctgggacgccgccactccatggctgtgcgtccacacaaccttccactgattttgattggtgcaggactgatcgttgcgggctggttcggattcaatggtggtaccgcaggtggtgccaacttcctcgcaagctacgtggtcgttacctctctcattgctgcagctggcggaatgatgggcttcatgctcgttgaacgtgtgttcagcggaaaacccactttctttggctcggcaaccggcacaatcgcaggccttgtggctatcaccccggccgcggatgcagtgagcccgctcggagcattcgccgtcggagcgctcggcgcagttgtctccttctgggcaattagctggaagaagggacaccgagtcgatgattccttcgatgtgttcgcagtccacggaatggccggcattgcaggtgcactgtttgtcatgctctttggcgatccactagcaccagcgggagtttccggagtcttcttcggtggcgaactctccctgctgtggagggaaccactggccatcatcgtgacccttacatacgcattcggcgtgacctggttgattgccacgatcttgaacaagttcatgactctgcgcatcacctccgaagccgaatatgaaggcattgaccgcgcagaacacgcagaatctgcctaccacctcaattccaacggaattgggatggcaacccgcaccaatttcggacctgaaatccccgaggaaaccgtgcccgacgccgtgcaggtgggcgtcgataagcaaaaaatcgctgatactcgaaaggcctcaaaatga

SEQ ID NO: 67602 - protein, 452 aa, Corynebacterium glutamicum
MDPSDLAWILAAFALVSLMFPGLSLLYGGMLGGQHVLNTFMMVMSSLGIISLVYIIYGHGLVLGNSIGGWGIIGNPLEYFGFRNIMEDDGTGDLMWAGFYILFAAISLALVSSGAAGRMRFGAWLVFGVLWFTFVYAPLAHWVFAIDDPESGYVGGWMKNVLEFHDFAGGTAVHMNAGASGLALAIVLGRRHSMAVRPHNLPLILIGAGLIVAGWFGFNGGTAGGANFLASYVVVTSLIAAAGGMMGFMLVERVFSGKPTFFGSATGTIAGLVAITPAADAVSPLGAFAVGALGAVVSFWAISWKKGHRVDDSFDVFAVHGMAGIAGALFVMLFGDPLAPAGVSGVFFGGELSLLWREPLAIIVTLTYAFGVTWLIATILNKFMTLRITSEAEYEGIDRAEHAESAYHLNSNGIGMATRTNFGPEIPEETVPDAVQVGVDKQKIADTRKASK

SEQ ID NO: 67603 - DNA, 1434 bp, Mycobacterium bovis
  CDS (1)..(1434): transl_table=11
gtggaccaattccccatcatgggcgttccggatggcggcgacaccgcctggatgctggtgagttccgcgctcgtgctgttgatgacgccgggtctggcatttttctacggcggcatggtgcgttccaagagcgtcctgaacatgatcatgatgagcatcagcgcgatgggtgtcgtgacggtgctctgggcgctttacggctactcgattgcgttcggtgatgacgttggcaacatcgccggcaacccgagccaatactggggtctcaaaggtctcatcggcgtcaatgctgttgctgccgatccgagcacgcagaccgccgcggtgaatattccgctggcgggtaccctgccggcgaccgtgtttgtggcattccagctgatgttcgcgatcatcacggttgcgctgatctccggggcggtggccgaccggttgaagttcggcgcctggctgttgttcgccggtttgtgggcgacgttcgtctatttcccggtcgcacactgggtcttcgcatttgacggtttcgccgctgagcacggcggctggatcgccaacaagctgcacgccatcgacttcgccggcggcaccgcggttcatatcaacgccggtgtggcggccttgatgctggcgatcgtgctgggcaaaagacgcggttggccggcgacgctgtttcgaccgcacaatctgccgtttgtgatgctcggggccgccctgctgtggttcggctggtacgggttcaacgcaggatcggcgacgaccgccaacggtgttgccggggcgacgtttgtcaccaccacgattgcgacggccgcggccatgcttggctggctgctcacggagcgcgtccgagatggcaaggctacgacgctgggcgcggcgtcgggcatcgtcgccggactggtcgccatcacgccgtcctgctcgtcggttaatgtcctgggtgccttggcggtaggcgtgtcggccggggtgctgtgcgcgctggcggtggggctgaaattcaaactgggcttcgatgattcgctcgacgtggtcggggtgcacctggttggtggtctggtgggcacactgctggtgggtctgctggcagctccggaggctccggcaattaatggtgtggccggggtatcgaaggggttgttttacggcggaggcttcgcccagctggaacgacaggcgctcggtgcctgcagtgttctcgtctactctggaatcatcaccctgatcttggcattgatcctgaaattcaccatcgggctcaggcttgacgcggagcaagagagcaccggcatcgacgaggctgagcacgcggaaagcggctacgatttcgccgtcgccagcggctcggttctccccccgcgggtcaccgtggaggatagccgcaacggcattcaggagcgtataggccagaaagtggaggcggagccgaaatga

SEQ ID NO: 67604 - protein, 477 aa, Mycobacterium bovis
MDQFPIMGVPDGGDTAWMLVSSALVLLMTPGLAFFYGGMVRSKSVLNMIMMSISAMGVVTVLWALYGYSIAFGDDVGNIAGNPSQYWGLKGLIGVNAVAADPSTQTAAVNIPLAGTLPATVFVAFQLMFAIITVALISGAVADRLKFGAWLLFAGLWATFVYFPVAHWVFAFDGFAAEHGGWIANKLHAIDFAGGTAVHINAGVAALMLAIVLGKRRGWPATLFRPHNLPFVMLGAALLWFGWYGFNAGSATTANGVAGATFVTTTIATAAAMLGWLLTERVRDGKATTLGAASGIVAGLVAITPSCSSVNVLGALAVGVSAGVLCALAVGLKFKLGFDDSLDVVGVHLVGGLVGTLLVGLLAAPEAPAINGVAGVSKGLFYGGGFAQLERQALGACSVLVYSGIITLILALILKFTIGLRLDAEQESTGIDEAEHAESGYDFAVASGSVLPPRVTVEDSRNGIQERIGQKVEAEPK

SEQ ID NO: 67605 - DNA, 1479 bp, Saccharomyces cerevisiae
  CDS (1)..(1479)
atggagagtcgaactacagggcctttaacgactgaaacctacgatggccccactgtggccttcatgatattaggtgccgccctagtattttttatggtgcccggattgggattcttgtactccggattggcaagaaggaagtctgcactagcactaatctgggttgtattaatggcgactttggtcggtatactgcaatggtatttctggggttactctctagctttttcaaagtccgctccgaataataaattcattgggaatctagattcgtttggctttagaaacgtgtacggaaaaaaattcgatgaagatgcctaccctgagctcgcgtatgcaaccttccaaatgatgttttcgtgcgtcaacttaagtattatcgctggcgccactgccgaaagaggcaggctgctaccgcacatggtttttctctttattctagctaccattggatattgtccagtgacgtattggatttggtcaccaggtggttgggcataccaatggggagtcctcgattgggcaggcggcggcaacattgaaatattaagcgctgtttccgggtttgtttactcttggtttttgggcaaaagaaatgaaaagttactgataaatttcaggcctcataatgtttcattggtcactctaggcacatccatactgtggtttggctggctgctatttaattctgcatcctcattatccccaaatttgaggtcagtttatgcattcatgaatacatgtctcagtgccattactggtgggatgacgtggtgtcttctggattacagatcggagaagaaatggtcgacagttggtctgtgctccggtatcatttctgggctggtggctgcaacgccaagctcaggctgtataaccctttacggttcacttattcaaggcattgtggcgggggtagtgtgtaactttgcgacgaagttgaaatactacgctaaagtagatgatgccatggacattctagctgagcacggggttgcaggcgtaataggactaattttcaatgccctttttggagcagactgggtcattggtatggatggcactacagagcacgagggcggctgggtaactcacaattacaagcaaatgtataagcagatcgcttacattgccgcatccattgggtacactgctgctgtaactgcaataatctgctttgtgctcggctacatacccggtatgaggctaagaatatcagaagaggcagaggaggcgggtatggacgaagatcaaattggcgaatttgcgtacgattatgtggaagtgagaagagattactatctatggggtgtagacgaagattcacaacgctctgatgtaaatcaccgggtgaacaacgctcatttggccgctgaacgtagcagtagcggtactaatagttcctcggatgggaatggagaaatgattcaatccgaaaagatcctaccaattcatcaagaagatcctgccaataggtaa

SEQ ID NO: 67606 - protein, 492 aa, Saccharomyces cerevisiae
MESRTTGPLTTETYDGPTVAFMILGAALVFFMVPGLGFLYSGLARRKSALALIWVVLMATLVGILQWYFWGYSLAFSKSAPNNKFIGNLDSFGFRNVYGKKFDEDAYPELAYATFQMMFSCVNLSIIAGATAERGRLLPHMVFLFILATIGYCPVTYWIWSPGGWAYQWGVLDWAGGGNIEILSAVSGFVYSWFLGKRNEKLLINFRPHNVSLVTLGTSILWFGWLLFNSASSLSPNLRSVYAFMNTCLSAITGGMTWCLLDYRSEKKWSTVGLCSGIISGLVAATPSSGCITLYGSLIQGIVAGVVCNFATKLKYYAKVDDAMDILAEHGVAGVIGLIFNALFGADWVIGMDGTTEHEGGWVTHNYKQMYKQIAYIAASIGYTAAVTAIICFVLGYIPGMRLRISEEAEEAGMDEDQIGEFAYDYVEVRRDYYLWGVDEDSQRSDVNHRVNNAHLAAERSSSGTNSSSDGNGEMIQSEKILPIHQEDPANR

SEQ ID NO: 67607 - DNA, 1470 bp, Saccharomyces cerevisiae
  CDS (1)..(1470)
atggctcggggtgacggacatctatggacagagacatatgatagttccacagtcgcttttatgattttaggtgccgccctggttttcttcatggtaccggggctgggctttctttattccggtttagcaagaagaaaatctgctctggctttgatttgggtagtgataatggctaccttagtaggtatactgcaatggtatttttggggctattctttagcattctctaagactgcgacgaacaacaaatttatcggcaacttggattcatttgggtttagaaacgtctatggcaaaatttcggatgattccacgtatcctgaactgatttatgccattttccaaatgatgttcatgtgtgtcgcattgagtattatagctggtgccactgcggaaagaggtaagctttttccacatatggtttttctttttgtttttgcgactttggtttactgtcccatcacttattggatttgggccccaggtggttgggcctaccaatggggggtattagactgggctggcggtgggaatattgaaatcctaagtgctgtggctggtttcgtttattcttattttctaggaagaagaaaagaaaacctcctgatcaactttagaccacataatgtttccatggtgactttgggtacttctatactttggtttggttggttgcttttcaatgctgcaagctcactgtcaccaaatatgaggtccgtatatgcgttcatgaacacttgtctcagcgccaccacgggtggaatgacgtggtgtttattagattatcgatctgaaaaaaaatggtccactgttgggttatgctccggcattatctgtggtttagttgctgccacgcctagctcgggttgtattactctatatggctctttgatccaaggtataatagcgggtgttgtttgtaattttgcaacaaaaataaagtattatttaaaagtggatgattccttagatctattagctgaacacggtatcgccggtgtggtgggattgatttttaacgctctatttgcagctgattgggttattggaatggacggcacaacaaagcataagggtggttggttgacgcataactggaaacaaatgtatattcaaattgcctatatcggtgcctctgccggctattgtgctgtggtcacggccatcatttgcttcgtattaggtaaaattccgggtgtccatctaagagtcactgaggaagccgaagcattggggttggatgaagatcaaataggcgaattcgcttacgattacgtggaggttaggagagattattaccagtggggtgtagatacagatgcacttcatactacatgcaatggcgctaattctgcgtctgagacaaatcctactgaggacagccaaaactcctcattgtcatcagctacagtaagcggccaaaacgaaaaaagtaataatcctaaattgcatcacgcaaaagaagcatga

SEQ ID NO: 67608 - protein, 489 aa, Saccharomyces cerevisiae
MARGDGHLWTETYDSSTVAFMILGAALVFFMVPGLGFLYSGLARRKSALALIWVVIMATLVGILQWYFWGYSLAFSKTATNNKFIGNLDSFGFRNVYGKISDDSTYPELIYAIFQMMFMCVALSIIAGATAERGKLFPHMVFLFVFATLVYCPITYWIWAPGGWAYQWGVLDWAGGGNIEILSAVAGFVYSYFLGRRKENLLINFRPHNVSMVTLGTSILWFGWLLFNAASSLSPNMRSVYAFMNTCLSATTGGMTWCLLDYRSEKKWSTVGLCSGIICGLVAATPSSGCITLYGSLIQGIIAGVVCNFATKIKYYLKVDDSLDLLAEHGIAGVVGLIFNALFAADWVIGMDGTTKHKGGWLTHNWKQMYIQIAYIGASAGYCAVVTAIICFVLGKIPGVHLRVTEEAEALGLDEDQIGEFAYDYVEVRRDYYQWGVDTDALHTTCNGANSASETNPTEDSQNSSLSSATVSGQNEKSNNPKLHHAKEA

SEQ ID NO: 67609 - DNA, 1215 bp, Bacillus subtilis
  CDS (1)..(1215): transl_table=11
atgcaaatgggcgatacagtttttatgttcttttgcgctttactcgtgtggctgatgaccccgggattagcgttattttatggaggaatggtaaagagcaaaaatgtgctgagcactgccatgcacagtttctcttccattgccatcgtttccatcgtttgggtgctgttcggatatacacttgccttcgcaccaggcaattcaatcatcggcgggctggagtgggcaggcctcaaaggggtcggatttgatccgggagattacagcgataccatcccccactcgttatttatgatgttccaaatgacgttcgccgttctgactacagcgattatttccggggctttcgcagagcggatgcgattcggcgcttttcttttattctcggttttatgggcctctttggtttacacacccgtagcgcactgggtatggggcggcggctggatcggccagcttggagcgctcgatttcgctggcggcaatgttgttcatatttcctccggggtggcaggacttgttcttgccattgtgctcggcaaacggaaagacggtacagcgtcttctccgcataacctcatttacaccttcttaggaggagctttgatttggttcggctggttcggctttaacgtcggcagcgcattgaccttagatggtgtggccatgtacgcgttcatcaacacaaacaccgcggctgcagccgggatcgccggctggatcttagtagaatggatcattaacaaaaaaccgacaatgctcggagcggtatctggggcaatcgccgggcttgtcgccattacgccggctgccggatttgtcacaccgttcgcttccattattatcggcatcatcggcggagctgtttgtttctggggagtattctcgcttaaaaagaaattcggatacgacgacgcgcttgacgcctttggcctgcacgggatcggcggcacatggggcggaatcgcaacaggattattcgcaacaacctctgttaactcagcgggcgcagatgggttattttacggtgatgcaagcttaatctggaaacaaatcgtcgccatcgccgccacttatgtttttgtatttattgtcactttcgttattattaaaattgtaagcctcttccttccccttcgcgcaactgaagaagaagagtcacttgggcttgacttaacgatgcacggggaaaaagcatatcaagattctatgtga

SEQ ID NO: 67610 - protein, 404 aa, Bacillus subtilis
MQMGDTVFMFFCALLVWLMTPGLALFYGGMVKSKNVLSTAMHSFSSIAIVSIVWVLFGYTLAFAPGNSIIGGLEWAGLKGVGFDPGDYSDTIPHSLFMMFQMTFAVLTTAIISGAFAERMRFGAFLLFSVLWASLVYTPVAHWVWGGGWIGQLGALDFAGGNVVHISSGVAGLVLAIVLGKRKDGTASSPHNLIYTFLGGALIWFGWFGFNVGSALTLDGVAMYAFINTNTAAAAGIAGWILVEWIINKKPTMLGAVSGAIAGLVAITPAAGFVTPFASIIIGIIGGAVCFWGVFSLKKKFGYDDALDAFGLHGIGGTWGGIATGLFATTSVNSAGADGLFYGDASLIWKQIVAIAATYVFVFIVTFVIIKIVSLFLPLRATEEEESLGLDLTMHGEKAYQDSM

SEQ ID NO: 67611 - DNA, 1224 bp, Methanobacterium thermoautotrophicum
  CDS (1)..(1224): transl_table=11
atgatgctaaattcaggtgatacagcatggatgttgatctcaactgcactcgtgatactaatgacggtgccaggggttgctatgttctattctggtttaacaaaacgtgagaatgttctgaacaccatctttctatcatttgtttcccttggcattgtgagtctgctctggtttctgtttggatatggtctaatattcggcggggatgtttcagggatcataggatcccatcaggtgggcatcagccttattaatttagggtctgcttcaaaatatgctccaacaatccccgaaggactctttgcaatttttcagatgacctttgctgcaataacagttgccctgatttctggcgctgtggtggaaaggatcaaattctcgtcatggatactgttcatccccctctggtttgcactcgtatatgtacccgtggcccactgggtatggggcggaggattcctgcagaaccttggtgttcatgatttcgcagggggaattgtggtgcacatcaccagtggcatagccgcccttgcccttgcccttgttactggtccaagatatgaccagaaactgatgccacatcaccttggatattctgttataggtaccggtcttctctggtttggctggtttggattcaacgccggttcagccctctctgccggatcccttgcagctaacgccatgatagtgacaaacacctctgcagcggcgggtatgataggatggatcctcatggatagacttaaaaccggaaaaccaacacttcttggcgctctttctggagcagttgcaggcctggcatcaataacacctgcagcaggttttgtggatataggtgcctccattgtcaccggacttgtggcagctgttatatgttatcttgcagtttcatggctgaagccagctgctggatatgatgatgcgcttgatgtatttgggattcacggtgtttcagggatcataggaacccttggagttggtttatttgcagttccagccctaaacccatctttgacctcaggaggtcttttaactggaagcacatcccttcttgtcagtcagctgattggtgttgtcaccgtcactgtctacaccttcgtcgttacatatatccttgcgatgctgctgatgaaatttaaggggctccgtgttgaaagggaagaggaaattcagggacttgacataaatctccatgaggaaacaggttacagactgacatga

SEQ ID NO: 67612 - protein, 407 aa, Methanobacterium thermoautotrophicum
MMLNSGDTAWMLISTALVILMTVPGVAMFYSGLTKRENVLNTIFLSFVSLGIVSLLWFLFGYGLIFGGDVSGIIGSHQVGISLINLGSASKYAPTIPEGLFAIFQMTFAAITVALISGAVVERIKFSSWILFIPLWFALVYVPVAHWVWGGGFLQNLGVHDFAGGIVVHITSGIAALALALVTGPRYDQKLMPHHLGYSVIGTGLLWFGWFGFNAGSALSAGSLAANAMIVTNTSAAAGMIGWILMDRLKTGKPTLLGALSGAVAGLASITPAAGFVDIGASIVTGLVAAVICYLAVSWLKPAAGYDDALDVFGIHGVSGIIGTLGVGLFAVPALNPSLTSGGLLTGSTSLLVSQLIGVVTVTVYTFVVTYILAMLLMKFKGLRVEREEEIQGLDINLHEETGYRLT

SEQ ID NO: 67613 - DNA, 1239 bp, Methanobacterium thermoautotrophicum
  CDS (1)..(1239): transl_table=11
atggagatgactctgatggatgcggtcttaaactccggtgacactgcctggatgctggtatcaacagccctggtaatgctgatgacggttccaggcgtggcactattctacgggggtttaacaaaaaaggaaaacgtgctgaacaccatgttcctatccctgatagccttcgcagtgacgagcataatatgggtactctacggctatcagttcgcctttggagctgacataatggggttcataggaagtccagtgaacctgctgatgaacggggtcggtgttaacactgctgctgcactggcaccaacaataccagacttcctctacatagcattccagttaacattcgcagcaataacggttgcactcatatccggtgccgtcgttgaaaggatgaagttctcagcctggctggcattcattgtgctctgggtgagcctggtctacgtgccggtggcccactgggtatggggcggaggattcctggcgcagctcggtgccctggacttcgcaggcggtactgtggttcacatcaactcaggtgttgcagcactcgcactcgtctacctcctcggtaagagaaaggacacgagacttctgccacacaacctgggatactcagtgataggtgcttcactgctctggttcggctggtttggattcaacgccggttcagcactcacggcaggtggacttgcagcatcagccttcctggtgaccaacactgcggcggctgctggtatggtatcatgggttataatggactacctcaaggtgggtaaacccacagtactcggcggaatatccggtgcagttgctggcctcgtcgccataacacctgcagcaggtttcgtaactgtacctgcagccctcatcataggccttgtcacgagcgtaatatcataccttgcagtatcatacctcaaaccaaggcttggatacgacgatgccctggacgtcttcggaatacacggcatgtcaggtatatggggctcagtggcaacaggcctctttgcagcgccattcatcaacgaactgggaacaggcctcatatacggaaaccctggacagctgacagcacaggtgatagccgtggcagttgtggctgcctactccttcgtggtgacactgatcatcggcaaactcctggacttcaccgttggtctgagggtgagcggtaaggaggagatggagggccttgacacccacctgcatgaggagacaggctacaggatctga

SEQ ID NO: 67614 - protein, 412 aa, Methanobacterium thermoautotrophicum
MEMTLMDAVLNSGDTAWMLVSTALVMLMTVPGVALFYGGLTKKENVLNTMFLSLIAFAVTSIIWVLYGYQFAFGADIMGFIGSPVNLLMNGVGVNTAAALAPTIPDFLYIAFQLTFAAITVALISGAVVERMKFSAWLAFIVLWVSLVYVPVAHWVWGGGFLAQLGALDFAGGTVVHINSGVAALALVYLLGKRKDTRLLPHNLGYSVIGASLLWFGWFGFNAGSALTAGGLAASAFLVTNTAAAAGMVSWVIMDYLKVGKPTVLGGISGAVAGLVAITPAAGFVTVPAALIIGLVTSVISYLAVSYLKPRLGYDDALDVFGIHGMSGIWGSVATGLFAAPFINELGTGLIYGNPGQLTAQVIAVAVVAAYSFVVTLIIGKLLDFTVGLRVSGKEEMEGLDTHLHEETGYRI

SEQ ID NO: 67615 - DNA, 1494 bp, Oryza sativa
  CDS (1)..(1494)
atggcgtcgccgacccggccggggccgtacatgccgcgcccaccggcggtgccggagtggctgaacaccggggacaacgggtggcagctcgcggcggcgacgttcgtcgggctccagtcgatgcctgggctggtggtgctgtacggcagcatcgtgaagaagaagtgggccgtcaactcggccttcatggcgctgtacgcgtacgcgtccacgctcatcgtgtgggtgctggtcggcttccgcatggcgttcggcgaccggctgctcccgttctgggggaaggccggcgcggcgctgacggaggggttcctcgtggcgcgcgcgtcggtcccggccacggcgcactacgggaaggacggcgccctggagtcgccgcgcaccgagccgttctacccggaggcgtccatggtgctgttccagttcgagctcgccgccatcacgctggtgctgctcgccgggtcgctcctcgggaggatgaacatcaaggcgtggatggcgttcactccgctctggctcctcttctcctacaccgtctgcgccttcagcctctggggcggcggcttcctctaccagtggggcgtcatcgactactccggcggatacgtcatccacctctcctccggcatcgccggcttcaccgccgcctactgggtggggccgaggctgaagagcgacagggagcggttctcgccgaacaacatcctcctcatgatcgccggcggcgggctgctgtggctgggctgggccgggttcaacggcggcgcgccgtacgccccaaacatcaccgcgtccatcgccgtgctcaacaccaacgtcagcgccgcggcgagcctcctcacctggacctgcctcgacgtcatcttcttcggcaagccctccgtcatcggcgccgtgcagggcatgatgaccggtctcgtctgcatcacccccggcgcaggtctggtgcacacgtgggcggccatactgatgggcatctgtggcggcagcttgccgtggttctccatgatgatcctccacaagagatcggcgctgctccagaaggtggacgacaccctcgccgtcttccacacccacgccgtcgcgggcctcctcggcggcttcctcacgggcctgttcgccttgccggacctcaccgccgtccacacccacatccctggcgcgcgcggcgcgttctacggcggcggcatcgcccaggtggggaagcagatcgccggcgcgctcttcgtcgtcgtgtggaacgtcgtggccaccaccgtcatcctgctcggcgtcggcctcgtcgtcccgctccgcatgcccgacgagcagctcaagatcggcgacgacgcggcgcacggggaggaggcctacgcgctatggggagacggcgagaggttcgacgtgacgcgccatgagggggcgaggggcggcgcgtggggcgccgcggtcgtggacgaggcgatggatcaccggctggccggaatgggagcgagaggagtcacgattcagctgtag

SEQ ID NO: 67616 - protein, 497 aa, Oryza sativa
MASPTRPGPYMPRPPAVPEWLNTGDNGWQLAAATFVGLQSMPGLVVLYGSIVKKKWAVNSAFMALYAYASTLIVWVLVGFRMAFGDRLLPFWGKAGAALTEGFLVARASVPATAHYGKDGALESPRTEPFYPEASMVLFQFELAAITLVLLAGSLLGRMNIKAWMAFTPLWLLFSYTVCAFSLWGGGFLYQWGVIDYSGGYVIHLSSGIAGFTAAYWVGPRLKSDRERFSPNNILLMIAGGGLLWLGWAGFNGGAPYAPNITASIAVLNTNVSAAASLLTWTCLDVIFFGKPSVIGAVQGMMTGLVCITPGAGLVHTWAAILMGICGGSLPWFSMMILHKRSALLQKVDDTLAVFHTHAVAGLLGGFLTGLFALPDLTAVHTHIPGARGAFYGGGIAQVGKQIAGALFVVVWNVVATTVILLGVGLVVPLRMPDEQLKIGDDAAHGEEAYALWGDGERFDVTRHEGARGGAWGAAVVDEAMDHRLAGMGARGVTIQL

SEQ ID NO: 67617 - DNA, 1506 bp, Oryza sativa
  CDS (1)..(1506)
atgcacctaaggatggcgtcgccgccgcagcccgggccgtacatgccggacctgccggcggtgccggcgtggctgaacaagggcgacaccgcgtggcagctggtggcggcgacgttcgtcggcatccagtcgatgcctgggctggtggtgatctacggcagcatcgtgaagaagaagtgggccgtcaactccgccttcatggcgctgtacgcctacgcgtccacgcttatcgtgtgggtgctcgtcggcttccgcatggcgttcggcgaccggctgctcccgttctgggccaaggccgggccggcgctgacgcaggacttcctggtgcaacgcgcggtgttcccggcgacggcgcactacggcagcgacggcacgctcgagacgccgcgcaccgagccgttctacgcggaggcggcgctggtgctgttcgagttcgagttcgcggccatcacgctggtgctgctcgccgggtcgctcctggggcggatgaacatcaaggcgtggatggcgttcaccccgctctggctcctcttctcctacaccgtcggcgcgttcagcctctggggcggcggcttcctctaccagtggggcgtcatcgactactccggcggatacgtcatccacctctcctccggcgtcgccggcttcaccgccgcctactgggtgggcccgaggctgaagagcgacagggagcggttctcgccgaacaacatcctgctcatgatcgccggcggcgggctgctgtggttgggctgggccgggttcaacggcggcgcgccgtacgcccccaacgtcaccgccacggtcgccgtgctcaacaccaacgtcagcgccgcgacgagcctcctcacctggacctgcctcgacgtcatcttcttcggcaagccctccgtcatcggcgccgtgcagggtatgatgacggggctcgtctgcatcacgcccggcgccgggctggtgcacacgtggtcagcgatgctgatgggcatgttcgccggcagcgtcccgtggttcacgatgatgatcctgcacaagaaatccaccttcctcatgaaggtcgacgacaccctcgccgtcttccacacccacgccgtcgccggcatcctgggcggcgtcctcacgggcctcctcgccacgccggagctctgcgctctcgattgcccgatcccgaacatgcgcggcgtcttctacggcagcggcatcggccagctcgggaagcagctcggcggcgcgctgttcgtcaccgtctggaacctcatcgtcaccagcgccattctcctctgcatcggcctcttcatcccgctccgcatgtccgacgaccagctcatgatcggcgacgacgcggcgcacggggaggaggcctacgctctgtggggggacggtgagaagttcgacgtgacgcggccggagacgacgaggacgggaggtgcaggcggcgcgggcagggaggacaccatggagcagaggctgaccaacatgggagccaggggtgtcaccattcagttgtag

SEQ ID NO: 67618 - protein, 501 aa, Oryza sativa
MHLRMASPPQPGPYMPDLPAVPAWLNKGDTAWQLVAATFVGIQSMPGLVVIYGSIVKKKWAVNSAFMALYAYASTLIVWVLVGFRMAFGDRLLPFWAKAGPALTQDFLVQRAVFPATAHYGSDGTLETPRTEPFYAEAALVLFEFEFAAITLVLLAGSLLGRMNIKAWMAFTPLWLLFSYTVGAFSLWGGGFLYQWGVIDYSGGYVIHLSSGVAGFTAAYWVGPRLKSDRERFSPNNILLMIAGGGLLWLGWAGFNGGAPYAPNVTATVAVLNTNVSAATSLLTWTCLDVIFFGKPSVIGAVQGMMTGLVCITPGAGLVHTWSAMLMGMFAGSVPWFTMMILHKKSTFLMKVDDTLAVFHTHAVAGILGGVLTGLLATPELCALDCPIPNMRGVFYGSGIGQLGKQLGGALFVTVWNLIVTSAILLCIGLFIPLRMSDDQLMIGDDAAHGEEAYALWGDGEKFDVTRPETTRTGGAGGAGREDTMEQRLTNMGARGVTIQL

SEQ ID NO: 67619 - DNA, 1497 bp, Oryza sativa
  CDS (1)..(1497)
atgtcgggggacgcgttcaacatgtcggtggcgtaccagccgtcggggatggcggtgccggagtggctgaacaagggcgacaacgcgtggcagatgatctcggcgacgctggtggggatgcagagcgtgccggggctggtgatcctgtacggcagcatcgtgaagaagaagtgggcggtgaactcggcgttcatggcgctctacgccttcgccgccgtgtggctgtgctgggtcacctggggctacaacatgtcgttcggccacaagctcctcccgttctggggcaaggcgcggccggcgctgggccagagcttcctcctcgcccaggccgtgctcccgcagacgacgcagttctacaagggcggcggcggcgccgacgccgtggtggagacgccatgggtgaacccgctctacccgatggccaccatggtgtacttccagtgcgtgttcgccgccatcacgctcatcctcctcgccggctcgctgctggggcggatgaacatcaaggcgtggatgctgttcgtcccgctctggctcaccttctcctacaccgtcggcgccttctcgctgtggggcggcggcttcctcttccactggggggtcatggactactccggcggctacgtcatccacctctcgtcgggtgtcgccggcttcaccgcggcgtactgggtggggcccaggtcgaccaaggacagggagaggttcccgccaaacaacgtgctgctcatgctcaccggcgccggcatactgtggatggggtgggcggggttcaacggcggcgacccgtactccgccaacatcgactcctcgctcgccgtgctcaacaccaacatctgcgccgccaccagcctcctcgtctggacttgcctcgacgtcatcttcttcaagaagccgtccgtcatcggcgccgtccagggcatgatcaccggcctcgtctgcatcactcccggcgcaggcctggtgcagggttgggcggcgatcgtgatgggcatcctctccggcagcatcccgtggttcacgatgatggtggtgcacaagcggtcgcgcctcctgcagcaggtggacgacaccctgggcgtcttccacacccacgccgtcgccggattcctcggcggcgccaccacgggcctcttcgccgagcccgtcctctgctccctcttcctccccgtcaccaactcccgcggcgccttctaccccggccgcggcggcggcctccagttcgtccgccaggtggccggcgccctcttcatcatctgctggaacgtggtggtcaccagcctcgtctgcctcgccgtccgcgccgtggttcccctccggatgcccgaggaggagctcgccatcggcgacgacgccgtgcacggggaggaggcgtacgcgctgtggggcgacggcgagaagtacgactccaccaagcacggatggtactccgacaacaacgacacgcaccacaacaacaacaaggccgcgcccagcggcgtcacgcagaacgtctga

SEQ ID NO: 67620 - protein, 498 aa, Oryza sativa
MSGDAFNMSVAYQPSGMAVPEWLNKGDNAWQMISATLVGMQSVPGLVILYGSIVKKKWAVNSAFMALYAFAAVWLCWVTWGYNMSFGHKLLPFWGKARPALGQSFLLAQAVLPQTTQFYKGGGGADAVVETPWVNPLYPMATMVYFQCVFAAITLILLAGSLLGRMNIKAWMLFVPLWLTFSYTVGAFSLWGGGFLFHWGVMDYSGGYVIHLSSGVAGFTAAYWVGPRSTKDRERFPPNNVLLMLTGAGILWMGWAGFNGGDPYSANIDSSLAVLNTNICAATSLLVWTCLDVIFFKKPSVIGAVQGMITGLVCITPGAGLVQGWAAIVMGILSGSIPWFTMMVVHKRSRLLQQVDDTLGVFHTHAVAGFLGGATTGLFAEPVLCSLFLPVTNSRGAFYPGRGGGLQFVRQVAGALFIICWNVVVTSLVCLAVRAVVPLRMPEEELAIGDDAVHGEEAYALWGDGEKYDSTKHGWYSDNNDTHHNNNKAAPSGVTQNV

SEQ ID NO: 67621 - DNA, 1443 bp, Oryza sativa
  CDS (1)..(1443)
atggcggctggagcgattccaatggcgtaccagaccactccgtcatcgccagactggctgaacaagggcgacaacgcatggcagatgacatcggcgaccctcgtcggcctgcagagcatgccagggctggtgatcctgtacggcagcattgtcaagaagaagtgggctatcaactcggcgttcatggcgctgtatgccttcgctgctgtctggatctgctgggttgtctgggcatacaacatgtcgttcggcgaccgcctcctgccattctggggtaaggcacggccagcgctcgggcagagcttcctcgtggcgcagtctgagctcactgctaccgctattcgctaccacaatgggtcagctgaggcgcccatgctcaagccgttgtacccagtcgccaccatggtgtacttccagtgcatgtttgcgagcatcaccatcatcatcctcgcaggctcactgcttgggcgcatgaacatcaaggcgtggatggcctttgtgccgctctggatcaccttctcttacacggtctgcgccttctcgctctggggtggcggtttcctcttccagtggggtgtcatagactactctggtggctatgtcatccatctctcttctggcatcgcaggcctcactgctgcctactgggttggaccaaggtcagcatcagatagggagagattcccgcccaacaacatactgctggtgctagcaggggcggggctgctgtggcttgggtggacaggtttcaatggaggagacccatattcagccaatattgattcatccatggcagtgctcaacacacatatctgcgcatccaccagcctactcgtgtggacaatcctggatgtcttcttcttcgggaagccatcggtaattggcgcggtgcagggcatgatcactggcctggtatgcatcacccctggtgcaggcctggtgcaaggttgggcagctattgtgatgggaattctctctggtagcattccatggtacaccatgatggtgctgcacaagaaatggtcattcatgcagaggattgatgacacgcttggtgtcttccacacccatgcggtggctgggttccttggtggcgccaccactggactcttcgccgagcccatcctatgcagtctcttcctatctatcccagattctaaaggtgcattctacggtggccccggtggatcacagttcgggaagcagattgctggcgcactatttgtcactgcctggaatattgttatcacctccatcatctgtgtcatcatcagcctaatcctgcccctccgtatagctgatcaagaactgcttattggagatgatgctgtacacggtgaggaggcatatgctatctgggcagagggagagctcaatgacatgacccaccacaatgagagcacacatagtggtgtctctgtaggagtgacacagaatgtttga

SEQ ID NO: 67622 - protein, 480 aa, Oryza sativa
MAAGAIPMAYQTTPSSPDWLNKGDNAWQMTSATLVGLQSMPGLVILYGSIVKKKWAINSAFMALYAFAAVWICWVVWAYNMSFGDRLLPFWGKARPALGQSFLVAQSELTATAIRYHNGSAEAPMLKPLYPVATMVYFQCMFASITIIILAGSLLGRMNIKAWMAFVPLWITFSYTVCAFSLWGGGFLFQWGVIDYSGGYVIHLSSGIAGLTAAYWVGPRSASDRERFPPNNILLVLAGAGLLWLGWTGFNGGDPYSANIDSSMAVLNTHICASTSLLVWTILDVFFFGKPSVIGAVQGMITGLVCITPGAGLVQGWAAIVMGILSGSIPWYTMMVLHKKWSFMQRIDDTLGVFHTHAVAGFLGGATTGLFAEPILCSLFLSIPDSKGAFYGGPGGSQFGKQIAGALFVTAWNIVITSIICVIISLILPLRIADQELLIGDDAVHGEEAYAIWAEGELNDMTHHNESTHSGVSVGVTQNV

SEQ ID NO: 67623 - DNA, 1440 bp, Oryza sativa
  CDS (1)..(1440)
atgtcgtcgtcggcgacggtggtgccgctggcgtaccaggggaacacgtcggcgtcggtggcggactggctgaacaagggcgacaacgcgtggcagctggtggcggcgacggtggtggggctgcagagcgtgccgggcttggtggtgctgtacggcggcgtggtgaagaagaagtgggcggtgaactcggcgttcatggcgctctacgccttcgccgccgtgtggatctgctgggtcacctgggcgtacaacatgtcgttcggggagaagctcctcccgatctgggggaaggcgcggccggcgctggaccagggcctcctcgtcggccgcgccgcgctgccggcgacggtccactaccgcgccgacggcagcgtggagacggcggcggtggagccgctgtacccgatggcgacggtggtgtacttccagtgcgtgttcgccgccatcaccctcatcctcgtcgccggctccctcctcggccgcatgagcttcctcgcctggatgatcttcgtcccgctctggctcaccttctcctacaccgtcggcgccttctccctctggggcggcggcttcctcttccactggggcgtcatcgactactgcggcggctacgtcatccacgtctccgccggcatcgccggcttcaccgccgcctactgggtggggccaagggcacagaaggacagggagaggttcccgccgaacaacatactgttcacgctgacgggggcagggttactatggatggggtgggcagggttcaacggcggtggtccgtacgccgccaactccgtcgcctccatggccgtcctcaacaccaacatctgcaccgccatgagcctcatcgtctggacatgcctcgacgtcatcttcttcaagaagccctccgtcgtcggcgccgtccagggcatgatcaccggcctcgtctgcatcacccccgctgcaggggtggtgcaggggtgggcggcgctggtgatgggggtgctcgccggcagcatcccgtggtacaccatgatgatcctccacaagcgctccaagatcctgcagcgcgtcgacgacaccctcggcgtcttccacacccacggcgtcgccggcctcctcggcggcctcctcaccggcctcttcgccgagcccaccctctgcaacctcttcctccccgtcgccgactcccggggcgccttctacggcggcgccggcggcgcccagttcggcaagcagatcgccggtggcctcttcgtcgtcgcctggaacgtcgccgtcacctccctcatctgcctcgccatcaacctcctcgtcccgctccgcatgcccgacgacaagctcgaggtcggcgacgacgccgtccacggcgaggaggcctacgcgctctggggcgacggcgagatgtacgacgtcaccaagcacggctccgacgccgccgttgcgcccgtcgtcgtatga

SEQ ID NO: 67624 - protein, 479 aa, Oryza sativa
MSSSATVVPLAYQGNTSASVADWLNKGDNAWQLVAATVVGLQSVPGLVVLYGGVVKKKWAVNSAFMALYAFAAVWICWVTWAYNMSFGEKLLPIWGKARPALDQGLLVGRAALPATVHYRADGSVETAAVEPLYPMATVVYFQCVFAAITLILVAGSLLGRMSFLAWMIFVPLWLTFSYTVGAFSLWGGGFLFHWGVIDYCGGYVIHVSAGIAGFTAAYWVGPRAQKDRERFPPNNILFTLTGAGLLWMGWAGFNGGGPYAANSVASMAVLNTNICTAMSLIVWTCLDVIFFKKPSVVGAVQGMITGLVCITPAAGVVQGWAALVMGVLAGSIPWYTMMILHKRSKILQRVDDTLGVFHTHGVAGLLGGLLTGLFAEPTLCNLFLPVADSRGAFYGGAGGAQFGKQIAGGLFVVAWNVAVTSLICLAINLLVPLRMPDDKLEVGDDAVHGEEAYALWGDGEMYDVTKHGSDAAVAPVVV

SEQ ID NO: 67625 - DNA, 1461 bp, Oryza sativa
  CDS (1)..(1461)
atggcggcggcgggggcgtactcggcgagcctaccggcggtgccggactggctgaacaagggggacaacgcgtggcagctgacggcgtcgacgctggtggggatccagtcgatgcccgggctggtggtgctgtacggcagcatcgtgaagaagaagtgggcggtgaactcggcgttcatggcgctctacgcctacgcgtcgtcgctgctggtgtgggtgctggtcggcttccgcatggcgttcggcgaccagctgctgccgttctggggcaaggccggcgtggcgctgacccagagctacctcgtcggccgcgccacgctgccggccaccgcgcacggcgccatcccgcgcaccgagcccttctacccggaggccacgctggtgctcttccagttcgagttcgccgccatcacgctcgtcctcctcgccggctccgtcctcggccgcatgaacatcaaggcctggatggccttcaccccgctctggctcctcctctcctacaccgtcggcgccttcagcctctggggcggcggcttcctctaccgctggggcgtcatcgactactccggcggctacgtcatccacctctcctccggcatcgccggcttcaccgccgcctactgggtggggccaaggctgaagagcgaccgtgagcggttctcaccgaacaacatcctgctgatgatcgcgggcggcgggctgctgtggatggggtgggccgggttcaacggcggcgcgccgtacgccgccaacatcgcggcgtcggtcgccgtgctcaacaccaacgtctgcgccgccaccagcctcctcatgtggacctgcctcgacgtcatcttcttccgcaagccgtccgtcatcggcgccgtgcagggcatgatgaccggcctcgtctgcatcacccccggcgcagggctggtgcagacctgggcggccgtggtaatgggcatcttcgccggcagcgtgccgtggttcaccatgatgatcctgcacaagaagtcagcgctgctgatgaaggtggacgacacgctcgccgtgttccacacccacgccgtggcggggctcctcggcggcatcctcacgggcctcctggccaccccggagctcttctccctcgagtccacggtgccgggactccgcggcgcgttctacggcggcggtatcaagcagatcggcaagcagctcggcggcgccgcgttcgtgatcgcgtggaacctcgtggtcaccacggccatcctcctcggcatcggcctgttcatcccgctgcggatgcccgacgagcagctcatgatcggcgacgacgcggcgcacggcgaggaggcctacgcgctgtggggcgacggcgagaagttcgacgcgacgcggcacgacctgtcgaggggcggcggaggcggcgacagggacggccccgccggcgagcgcctctccgccctaggcgccaggggcgtcaccatccagctctag

SEQ ID NO: 67626 - protein, 486 aa, Oryza sativa
MAAAGAYSASLPAVPDWLNKGDNAWQLTASTLVGIQSMPGLVVLYGSIVKKKWAVNSAFMALYAYASSLLVWVLVGFRMAFGDQLLPFWGKAGVALTQSYLVGRATLPATAHGAIPRTEPFYPEATLVLFQFEFAAITLVLLAGSVLGRMNIKAWMAFTPLWLLLSYTVGAFSLWGGGFLYRWGVIDYSGGYVIHLSSGIAGFTAAYWVGPRLKSDRERFSPNNILLMIAGGGLLWMGWAGFNGGAPYAANIAASVAVLNTNVCAATSLLMWTCLDVIFFRKPSVIGAVQGMMTGLVCITPGAGLVQTWAAVVMGIFAGSVPWFTMMILHKKSALLMKVDDTLAVFHTHAVAGLLGGILTGLLATPELFSLESTVPGLRGAFYGGGIKQIGKQLGGAAFVIAWNLVVTTAILLGIGLFIPLRMPDEQLMIGDDAAHGEEAYALWGDGEKFDATRHDLSRGGGGGDRDGPAGERLSALGARGVTIQL

SEQ ID NO: 67627 - DNA, 1377 bp, Oryza sativa
  CDS (1)..(1377)
atggcgtcggtggcggtgccggagtggctgaacaagggcgacaacgcctggcagatgctctccgccacgctcgtcgccctgcagggcttccccggtctcgccctcttctacgccggcgccgtcacccgcaagtgcgcgctcacctccgcattcatggcgctctacgccatggccgccaccatgccgtgctgggcgctctgggcgcacaacatggccttcggccaccgcctcctgcccttcgtcggccgccccgccccggcgctcgcccagcactacatgctcacccaggcgctgctccccttcaccctccacctccactccaacggcgaggtggagacggccgcggtggcgccgctgtacccgtcggcgagcatggtgttcttccagtgggcctccgccggcgtcaccgtggggctggtcgccggcgccgtgctcgggcgcatgagcgtcaaggcgtggatggcgttcgtgccgctgtggacgacgctgtcctatacggtgggagcgtacagcatttggggcgggggcttcctcttccactggggcgtcatggactactccggcggctacgtcgttcacctcgccgccggcgtctccggctacacggccgcgtactgggtgggaccaaggaggaaggaggaggaggaaatgacaatggcgggtggtggcaacctggtggcgatggtggccggcgcgggcatcctgtggatggggtggaccggcttcaacggcggcgaccccttctccgccaacaccgactcgtcggtggcggtgctcaacacgcacatctgcaccaccaccagcatcctcgcttgggtttgctgcgacatcgccgtccgcgggaggccgtcggtggtgggcgcggtgcagggcatgatcaccggcctggtgtgcataactccggcggcagggctggtgcaggggtgggcagctctgctaatgggcgtcgcgtcggggacactgccatgctacaccatgaacgccgccatgtcgttcaaggtagacgacacgctgggcatcctgcacacccacgcggtgtccggtgttctgggcggcgtcctcaccggcgttttcgcgcaccctactctctgtgacatgttccttccggtgaccggctcaaggggcctcgtctacggcgtccgcgccggcggggtgcaggtgttgaagcaggtcgccgccgcattgttcgttgccgcatggaacgtggccgccacgtccatcatcttggtcgtcgtcagggcgttcgtgccgctgaggatgacggaagatgagctgctcgccggagacattgccgtacatggggaacaagcttattatttttcgagtggcaccaattgtagtttaagccatgagaccattgaggtcggaaattcataa

SEQ ID NO: 67628 - protein, 458 aa, Oryza sativa
MASVAVPEWLNKGDNAWQMLSATLVALQGFPGLALFYAGAVTRKCALTSAFMALYAMAATMPCWALWAHNMAFGHRLLPFVGRPAPALAQHYMLTQALLPFTLHLHSNGEVETAAVAPLYPSASMVFFQWASAGVTVGLVAGAVLGRMSVKAWMAFVPLWTTLSYTVGAYSIWGGGFLFHWGVMDYSGGYVVHLAAGVSGYTAAYWVGPRRKEEEEMTMAGGGNLVAMVAGAGILWMGWTGFNGGDPFSANTDSSVAVLNTHICTTTSILAWVCCDIAVRGRPSVVGAVQGMITGLVCITPAAGLVQGWAALLMGVASGTLPCYTMNAAMSFKVDDTLGILHTHAVSGVLGGVLTGVFAHPTLCDMFLPVTGSRGLVYGVRAGGVQVLKQVAAALFVAAWNVAATSIILVVVRAFVPLRMTEDELLAGDIAVHGEQAYYFSSGTNCSLSHETIEVGNS

SEQ ID NO: 67629 - DNA, 1512 bp, Brassica napus
  CDS (1)..(1512)
atgtcgggatctttatcttgctctgctgccgacctcgcagtcttgttaggccctaatgccacggctgcagctgactacatctgcggccaacttagcaccgttaacaacaaatttaccgacgttgctttcgccgtagacaacacataccttctcttctccgcttacctcgtcttctctatgcaactgggcttcgctatgctctgcgctggctctgtaagagccaagaacacgatgaacatcatgcttaccaacgtccttgacgctgcagctggaggtctcttctattatcttttcggttacgcctttgcctttggatctccctcaaacggcttcatcggaaaacacaaccttggtctcaaggactttccttcagcctccgccgactactctaactttctataccaatgggcttttgctatcgccgctgccggaatcaccagcggctccatcgctgaacggactcagtttgttgcatacctgatctattcatccttcttaacaggctttgtttacccagttgtttctcactggttctggtctgctgatgggtgggctagtccttttaggaccgacggagatctacttttcagcacaggagcaatcgatttcgctggctcgggtgttgttcacatggttggaggcatcgctggtctatggggtgcgttgatcgaaggtccacgacttggtcggtttgataacggtggacgagctatagccctacatggccactcggcctcactagttgtccttggaacattcctcctttggtttggatggtatggattcaaccctggttccttcaacaagatcctcgtcacttatgaatcaggcacgatcaacgggcagtggagcgctgtcggacggactgctgtcacaaccactttagctggctgcactgcggcgctcacaaccctcttcgggaaacgtcttctctcgggacactggaacgttactgacgtatgcaacggcctccttggagggtttgcagctataaccggtggctgttcggtcgtagagccttgggcggcgatcatctgcgggttcgtagcggccctggtactcctcgggtgcaacaagctcgcggagaaactcaaatacgatgacccgctcgaggcagcccagttacacggtgggtgcggagcctgggggctaatatttactgcactttttgctagagaaaagtacttgaaccagatctacggcgagaagcccggaaggccccacggtttgttcatgggcggtggaggaaaactgcttggagctcagcttattcaaatacttgttatcacaggttgggtaagtgcgaccatgggaacgcttttcttcatcctcaagaaaatgaaactgttgcgtatatctgctgaggatgagatggccggtatggatatgaccaggcatggtggctttgcttatatgtactatgatgatgatgagtctcacaaagccattcagctaaggaaagttgagcatagatctccttcaccttcgggtgttactaccacttctgtttga

SEQ ID NO: 67630 - protein, 503 aa, Brassica napus
MSGSLSCSAADLAVLLGPNATAAADYICGQLSTVNNKFTDVAFAVDNTYLLFSAYLVFSMQLGFAMLCAGSVRAKNTMNIMLTNVLDAAAGGLFYYLFGYAFAFGSPSNGFIGKHNLGLKDFPSASADYSNFLYQWAFAIAAAGITSGSIAERTQFVAYLIYSSFLTGFVYPVVSHWFWSADGWASPFRTDGDLLFSTGAIDFAGSGVVHMVGGIAGLWGALIEGPRLGRFDNGGRAIALHGHSASLVVLGTFLLWFGWYGFNPGSFNKILVTYESGTINGQWSAVGRTAVTTTLAGCTAALTTLFGKRLLSGHWNVTDVCNGLLGGFAAITGGCSVVEPWAAIICGFVAALVLLGCNKLAEKLKYDDPLEAAQLHGGCGAWGLIFTALFAREKYLNQIYGEKPGRPHGLFMGGGGKLLGAQLIQILVITGWVSATMGTLFFILKKMKLLRISAEDEMAGMDMTRHGGFAYMYYDDDESHKAIQLRKVEHRSPSPSGVTTTSV

SEQ ID NO: 67631 - DNA, 1512 bp, Brassica napus
  CDS (1)..(1512)
atgtcgggatctttatcttgctctgctgccgacctcgcactcttgttaggccctaatgccacggctgcagctgactacatctgcggccaacttagcaccgttaacaacaaatttaccgacgttgctttcgccgtagacaacacataccttctcttctccgcgtacctcgtcttctctatgcaactcggcttcgctatgctctgcgctggctctgtaagagccaaaaacacgatgaacatcatgcttaccaacgtccttgacgctgcagctggaggtctcttctattatctattcggttacgcctttgcctttggatctccctcaaacggcttcatcggtaaacacaactttggtctcaaagactttccttcagcctccgcagactactctaactttctataccaatgggcttttgctatcgccgctgccggaatcaccagcggctccatcgctgaacggactcagtttgttgcatacctgatctattcatccttcttaacaggatttgtttatccagttgtttctcactggttctggtctgttgatgggtgggctagtcctattaggaccgacggagatttacttttcagcacaggagcaatcgatttcgctggctcgggtgttgttcacatggttggaggcatcgctggtctatggggtgcgttgatcgaaggtccacgacttggtcggtttgataacggtggacgagctatagccctacgtggccactcggggtcactagttgtccttggaacattcctcctttggtttggatggtatggattcaaccctggttccttcaacaagatcctcgtcacttatgaatcaggcacgatcaacgggcagtggagcgctgtcggacggacggctgtcacaaccactttagctggctgcactgcggcgctcacaaccctcttcgggaaacgtcttctctcgggacactggaacgttactgacgtatgcaacggcctccttggagggtttgcagctataaccggtggctgctcggtcgtagagccatgggcggcgatcatctgcgggttcgtagcggccctggtactccttgggtgcaacaagctcgcggagaaactcaaatacgatgacccgctcgaggcagcccagttacacggtgggtgcggagcctgggggctaatatttactgcactttttgctagagaaaagtacttgaaccagatctacggtgagaagcccggaaggccccacggtttgttcatgggcggtggaggaaaactgcttggagctcagcttattcaaatacttgttatcacaggttgggtaagtgcgaccatgggaacgcttttcttcatcctcaagaaaatgaaactgttgcgtatatctgccgaggatgagatggccggtatggatatgaccaggcatggtggctttgcttacatgtactatgatgatgatgagtctcacaaagccattcagctaaggaaagtcgagcatagatctccttcaccttcgggtgttactaccacttctgtttga

SEQ ID NO: 67632 - protein, 503 aa, Brassica napus
MSGSLSCSAADLALLLGPNATAAADYICGQLSTVNNKFTDVAFAVDNTYLLFSAYLVFSMQLGFAMLCAGSVRAKNTMNIMLTNVLDAAAGGLFYYLFGYAFAFGSPSNGFIGKHNFGLKDFPSASADYSNFLYQWAFAIAAAGITSGSIAERTQFVAYLIYSSFLTGFVYPVVSHWFWSVDGWASPIRTDGDLLFSTGAIDFAGSGVVHMVGGIAGLWGALIEGPRLGRFDNGGRAIALRGHSGSLVVLGTFLLWFGWYGFNPGSFNKILVTYESGTINGQWSAVGRTAVTTTLAGCTAALTTLFGKRLLSGHWNVTDVCNGLLGGFAAITGGCSVVEPWAAIICGFVAALVLLGCNKLAEKLKYDDPLEAAQLHGGCGAWGLIFTALFAREKYLNQIYGEKPGRPHGLFMGGGGKLLGAQLIQILVITGWVSATMGTLFFILKKMKLLRISAEDEMAGMDMTRHGGFAYMYYDDDESHKAIQLRKVEHRSPSPSGVTTTSV

SEQ ID NO: 67633 - DNA, 1461 bp, Glycine max
  CDS (1)..(1461)
atggccacacccttggcctaccaagagcaccttccggcggcacccagttggctgaacaaaggtgacaacgcatggcagttaacagcagccaccctcgttggtcttcaaagcatgccgggtctcgtgatcctctacgcaagcatagtgaagaagaaatgggcagtgaattcagctttcatggctctctatgcctttgcagcagttctaatatgttgggtgcttgtgtgttaccgcatggcctttggagaagaacttttacccttctggggtaagggtgctccagcactaggccagaagttcctcacaaaaagagccatagtcaatgaaaccatccaccactttgataatggcactgttgaatcacctccagaagaacccttttaccctatggcctcacttgtgtatttccaattcacttttgctgctattacccttattttgttggctggctctgtcctcggccgaatgaacatcaaggcttggatggcttttgtgcctctttggttgatcttttcctacacagtcggggcttttagtctttggggtggtggctttctctaccaatggggggttattgactattctggcggctatgtcatccacctttcttctggaatcgctggtttaactgctgcttactgggttggaccaaggttgaagagtgacagggagaggtttccaccaaacaacgtgctacttatgcttgctggtgctgggttgttgtggatggggtggtcagggttcaacggtggagcaccatatgctgcaaacattgcatcttcaattgcggtgttgaacacaaacatttgtgcagccactagcctccttgtgtggacaactttggatgtcattttttttgggaaaccttcggtgattggagctgtgcagggcatgatgactggacttgtatgcatcaccccaggggcagggcttgtgcaatcatgggctgctatagtgatgggaatattatctgggagcattccatgggtgactatgatgattttgcataaaaagtcaactttgctacagaaggtagatgacacccttggtgtgtttcacacacatgctgtggctggccttttgggtggtctcctcacaggtctattagcagaaccagccctttgtagacttctattgccagtaacaaattcaaggggtgcattctatggtggaggtggtggtgtgcagttcttcaagcaattggtggcggccatgtttgttattggatggaacttggtgtccaccaccattattctccttgtcataaaattgttcatacccttgaggatgccggacgagcagctggaaatcggtgacgacgccgtccacggtgaggaagcttatgccctttggggtgatggagaaaaatatgacccaactaggcatggttccttgcaaagtggcaacactactgtctcaccttatgttaatggtgcaagaggggtgactataaacttatga

SEQ ID NO: 67634 - protein, 486 aa, Glycine max
MATPLAYQEHLPAAPSWLNKGDNAWQLTAATLVGLQSMPGLVILYASIVKKKWAVNSAFMALYAFAAVLICWVLVCYRMAFGEELLPFWGKGAPALGQKFLTKRAIVNETIHHFDNGTVESPPEEPFYPMASLVYFQFTFAAITLILLAGSVLGRMNIKAWMAFVPLWLIFSYTVGAFSLWGGGFLYQWGVIDYSGGYVIHLSSGIAGLTAAYWVGPRLKSDRERFPPNNVLLMLAGAGLLWMGWSGFNGGAPYAANIASSIAVLNTNICAATSLLVWTTLDVIFFGKPSVIGAVQGMMTGLVCITPGAGLVQSWAAIVMGILSGSIPWVTMMILHKKSTLLQKVDDTLGVFHTHAVAGLLGGLLTGLLAEPALCRLLLPVTNSRGAFYGGGGGVQFFKQLVAAMFVIGWNLVSTTIILLVIKLFIPLRMPDEQLEIGDDAVHGEEAYALWGDGEKYDPTRHGSLQSGNTTVSPYVNGARGVTINL

SEQ ID NO: 67635 - DNA, 1503 bp, Glycine max
  CDS (1)..(1503)
atgtcgctgcctgcttgtcccgccgaacaactggcccaacttctcggcccaaacaccacagacgcctccgccgccgcctcccttatctgcggccagttcgccgccgtggacagcaagttcgtcgacacggccttcgccgtcgacaacacctacctcctcttttccgcctacctcgttttttctatgcagctcggcttcgccatgctctgcgccggctccgtccgcgccaagaacaccatgaacatcatgctcaccaacgtcctcgacgccgccgccggcggcctcttctactacctcttcggcttcgccttcgctttcggctccccctccaacggcttcatcggtaaacatttcttcggcctcaaggacatcccttcatcctcctacgactacagctacttcctctaccaatgggccttcgccatcgccgccgccggcatcaccagcggaaccatcgccgaacgcacacagttcgtggcctatctcatctactcctccttcctcaccggcttcgtctatccggtggtctcccactggttctggtccccagacggctgggcctctgcctttaagatcaccgaccggctattttccaccggcgtaatagacttcgccggttccggcgtagtccacatggtcggcggaatagccggcctatggggagcgctgatcgaaggcccaagaatgggacgtttcgatcatgcaggacgagctgtggccttgcgaggccacagcgcgtccttagtagtcctgggaaccttcttgctttggttcggttggtacggatttaaccccggttcatttaacaaaatcctacttacttacggtaactcaggaaattactacggtcaatggagcgcggttggcagaaccgcggtcaccactaccctagcggggtcaacagctgccttgaccacgctattcggtaaacgggtgatatccggtcactggaacgtgaccgatgtctgcaacgggctgttaggcggtttcgcggcgataacagccggttgctccgtggttgagccatgggcagccatcgtatgcggttttgttgcttctatagtattaatagcttgcaacaaattagcagagaaggttaagttcgacgatcctctggaggcggcgcagttgcacggtgggtgtggcacgtggggggtgatattcacggcgttgttcgcaaaaaaggagtatgtgaaggaggtttacgggttggggagggcgcacgggttgctcatggggggtggtgggaagttgctggcggcgcacgtgattcagattctggtgattgctgggtgggttagtgcgaccatgggacccttgttttgggggttgaataaactgaagctgttgaggatttcttcagaggatgagcttgcggggatggacatgactcgccatggaggctttgcttatgcttatgaggatgatgagacgcacaagcatgggatgcagttgaggagggttgggcccaacgcgtcttccacacccaccactgatgaatga

SEQ ID NO: 67636 - protein, 500 aa, Glycine max
MSLPACPAEQLAQLLGPNTTDASAAASLICGQFAAVDSKFVDTAFAVDNTYLLFSAYLVFSMQLGFAMLCAGSVRAKNTMNIMLTNVLDAAAGGLFYYLFGFAFAFGSPSNGFIGKHFFGLKDIPSSSYDYSYFLYQWAFAIAAAGITSGTIAERTQFVAYLIYSSFLTGFVYPVVSHWFWSPDGWASAFKITDRLFSTGVIDFAGSGVVHMVGGIAGLWGALIEGPRMGRFDHAGRAVALRGHSASLVVLGTFLLWFGWYGFNPGSFNKILLTYGNSGNYYGQWSAVGRTAVTTTLAGSTAALTTLFGKRVISGHWNVTDVCNGLLGGFAAITAGCSVVEPWAAIVCGFVASIVLIACNKLAEKVKFDDPLEAAQLHGGCGTWGVIFTALFAKKEYVKEVYGLGRAHGLLMGGGGKLLAAHVIQILVIAGWVSATMGPLFWGLNKLKLLRISSEDELAGMDMTRHGGFAYAYEDDETHKHGMQLRRVGPNASSTPTTDE

SEQ ID NO: 67637 - DNA, 1437 bp, Zea mays
  CDS (1)..(1437)
atggcgggaggaggggcggcctaccagagctcgtcggcgtcgccggactggctgaacaagggcgacaatgcgtggcagatgacgtccgcgacgctggtgggcctgcagagcatgcccgggctggtgatcctgtacggcagcatcgtgaagaagaagtgggccatcaactcggcgttcatggcgctgtacgccttcgccgccgtctggctctgctgggtggtgtgggcctacaacatgtcgttcggcgaccggctgctgcccttctggggcaaggcgaggccggcgctcgggcagcgcttcctggtggcgcagtcccagctcacggccaccgccgtgcggtaccgcgacgggtcgctcgaggcggagatgctccaccccttctacccggccgccaccatggtgtacttccagtgcgtgttcgccagcatcaccgtcatcatcctcgccggctcgctgctgggccgcatggacatcaaggcctggatggccttcgtcccgctctggatcaccttctcctacaccgtctccgccttctcgctctggggcggcggcttcctcttccagtggggcgtcatcgactactccggcggctacgtcatccacctctcctcgggaatcgccggcctcaccgccgcttactgggtagggccaaggtcggcgtcggacagggagcggttccctcccaacaacatactgctggtgctggcgggggcaggcctgctgtggctcggatggactggcttcaacggcggcgacccgtactcggccaacatcgactcgtccatggcggtgctcaacacgcacatctgcgcctccaccagcctcctcatgtggaccctccttgacgtcttcttcttcgggaagccgtcggtgatcggtgctgtgcagggcatgatcaccggccttgtgtgcatcacgcctggcgcaggcctggtgcaagggtgggcagccattgtcatgggaattctctcaggtagcatcccctggtacactatgatggtactgcacaagaaatggtccttcatgcagaggatcgacgacaccctcggcgtattccacacccatgcggtcgctgggctcctcggcggcgccactactggactctttgctgagcctgtcctctgcaacctcttcctcgccatcccggactccagaggtgcattttatggtggtgatggtggatcacagtttgggaagcagatcgctggcgcactcttcgtcattggctggaacattgttatcacttccataatctgtgttcttattggcctagtcctgcccctccgaattcctgatgcacagctgcttatcggggatgatgctgtacatggtgaggaggcgtatgctatatgggcagaaggcgagctcaacgatgtaacccgccaagatgaaagcaggcatggcagcgtcgctgtaggagtcacacagaatgtttga

SEQ ID NO: 67638 - protein, 478 aa, Zea mays
MAGGGAAYQSSSASPDWLNKGDNAWQMTSATLVGLQSMPGLVILYGSIVKKKWAINSAFMALYAFAAVWLCWVVWAYNMSFGDRLLPFWGKARPALGQRFLVAQSQLTATAVRYRDGSLEAEMLHPFYPAATMVYFQCVFASITVIILAGSLLGRMDIKAWMAFVPLWITFSYTVSAFSLWGGGFLFQWGVIDYSGGYVIHLSSGIAGLTAAYWVGPRSASDRERFPPNNILLVLAGAGLLWLGWTGFNGGDPYSANIDSSMAVLNTHICASTSLLMWTLLDVFFFGKPSVIGAVQGMITGLVCITPGAGLVQGWAAIVMGILSGSIPWYTMMVLHKKWSFMQRIDDTLGVFHTHAVAGLLGGATTGLFAEPVLCNLFLAIPDSRGAFYGGDGGSQFGKQIAGALFVIGWNIVITSIICVLIGLVLPLRIPDAQLLIGDDAVHGEEAYAIWAEGELNDVTRQDESRHGSVAVGVTQNV

SEQ ID NO: 67639 - DNA, 1497 bp, Zea mays
  CDS (1)..(1497)
atgtcgacgtgcgcggcggacctggcgccgctgctcggcccggcggcggcgaacgccacggactacctgtgcgggcagttcgcggacacggcctccgcggtggacgccacgtacctgctcttctcggcctacctcgtgttcgccatgcagctcggcttcgccatgctgtgcgccggctccgtccgcgccaagaacaccatgaacatcatgctcaccaacgtgctcgacgccgccgcgggggcgctcttctactacctcttcggcttcgccttcgccttcggcacgccctccaacggcttcatcggcaagcagttcttcgggctcaagcacctgcccaggaccggcttcgactacgacttcttcctctaccagtgggccttcgccatcgccgccgcgggcatcacgtcgggctccatcgccgagcggacccagttcgtcgcctacctcatctactccgcgttcctgacggggttcgtctaccccgtggtgtcgcactggttctggtccgccgacggctgggccggcgccagccgcacgtccggcccgctgctcttcgggtccggcgtcatcgacttcgccggctccggcgtcgtccacatggtcggcggcatcgcggggctgtggggcgcgctcatcgagggcccccgcatcgggcgcttcgaccacgccggccgctccgtggcgctcaagggccacagcgcgtcgctcgtggtgctcggcaccttcctgctgtggttcggctggtacgggttcaaccccgggtccttcaccaccatcctcaagtcgtacggccccgccgggaccgtccacgggcagtggtcggccgtgggccgcaccgccgtcaccaccaccctcgccggcagcgtcgccgcgctcaccacgctgttcgggaagcggctccagacgggccactggaacgtggtggacgtctgcaacggcctcctcggcgggttcgcggccatcacggccgggtgcagcgtggtggagccgtgggcggccgtcatctgcgggttcgtgtccgcgtgggtgctcatcggcgccaacgccctcgcggcgcgcttcaggttcgacgacccgctggaggcggcgcagctgcacggcgggtgtggcgcctggggcgtcctcttcacggggctcttcgcgaggcgaaagtacgtggaggagatctacggcgccgggaggccctacgggctgttcatgggcggcggcgggaagctcctcgccgcgcagatcatccagatcctggtgatcgccgggtgggtgagctgcaccatgggcccgctcttctacgcgctcaagaagctgggcctgctgcgcatctcggccgacgacgagatgtccggcatggacctgacccggcacggcggcttcgcctacgtctaccacgacgaggaccctggcgacaaggccggggttggtgggttcatgctcaagtccgcgcagaaccgtgtcgagccggcggcggcggtggcggcggcgaccagcagccaggtgtaa

SEQ ID NO: 67640 - protein, 498 aa, Zea mays
MSTCAADLAPLLGPAAANATDYLCGQFADTASAVDATYLLFSAYLVFAMQLGFAMLCAGSVRAKNTMNIMLTNVLDAAAGALFYYLFGFAFAFGTPSNGFIGKQFFGLKHLPRTGFDYDFFLYQWAFAIAAAGITSGSIAERTQFVAYLIYSAFLTGFVYPVVSHWFWSADGWAGASRTSGPLLFGSGVIDFAGSGVVHMVGGIAGLWGALIEGPRIGRFDHAGRSVALKGHSASLVVLGTFLLWFGWYGFNPGSFTTILKSYGPAGTVHGQWSAVGRTAVTTTLAGSVAALTTLFGKRLQTGHWNVVDVCNGLLGGFAAITAGCSVVEPWAAVICGFVSAWVLIGANALAARFRFDDPLEAAQLHGGCGAWGVLFTGLFARRKYVEEIYGAGRPYGLFMGGGGKLLAAQIIQILVIAGWVSCTMGPLFYALKKLGLLRISADDEMSGMDLTRHGGFAYVYHDEDPGDKAGVGGFMLKSAQNRVEPAAAVAAATSSQV

SEQ ID NO: 67641 - DNA, 25 bp, Artificial sequence
  primer
atgtcttacaattttacaggtacgc

SEQ ID NO: 67642 - DNA, 26 bp, Artificial sequence
  primer
ttatactatatggtcagtgttcttag

SEQ ID NO: 67643 - protein, 590 aa, Artificial sequence
  consensus sequence
  Variant (2)..(3): Xaa in position 2 to 3 is any amino acid
  Variant (5)..(5): Xaa in position 5 is any amino acid
  Variant (6)..(6): Xaa in position 6 is any or no amino acid
  Variant (9)..(12): Xaa in position 9 to 12 is any amino acid
  Variant (14)..(14): Xaa in position 14 is any amino acid
  Variant (16)..(17): Xaa in position 16 to 17 is any amino acid
  Variant (19)..(19): Xaa in position 19 is any amino acid
  Variant (21)..(39): Xaa in position 21 to 39 is any amino acid
  Variant (41)..(43): Xaa in position 41 to 43 is any amino acid
  Variant (46)..(48): Xaa in position 46 to 48 is any amino acid
  Variant (50)..(50): Xaa in position 50 is any amino acid
  Variant (51)..(65): Xaa in position 51 to 65 is any or no amino acid
  Variant (67)..(82): Xaa in position 67 to 82 is any amino acid
  Variant (83)..(110): Xaa in position 83 to 110 is any or no amino acid
  Variant (112)..(115): Xaa in position 112 to 115 is any amino acid
  Variant (116)..(118): Xaa in position 116 to 118 is any or no amino acid
  Variant (120)..(121): Xaa in position 120 to 121 is any amino acid
  Variant (124)..(125): Xaa in position 124 to 125 is any amino acid
  Variant (127)..(131): Xaa in position 127 to 131 is any amino acid
  Variant (133)..(136): Xaa in position 133 to 136 is any amino acid
  Variant (137)..(137): Xaa in position 137 is any or no amino acid
  Variant (139)..(146): Xaa in position 139 to 146 is any amino acid
  Variant (148)..(150): Xaa in position 148 to 150 is any amino acid
  Variant (152)..(155): Xaa in position 152 to 155 is any amino acid
  Variant (157)..(159): Xaa in position 157 to 159 is any amino acid
  Variant (161)..(163): Xaa in position 161 to 163 is any amino acid
  Variant (165)..(165): Xaa in position 165 is any amino acid
  Variant (166)..(185): Xaa in position 166 to 185 is any or no amino acid
  Variant (187)..(188): Xaa in position 187 to 188 is any amino acid
  Variant (189)..(207): Xaa in position 189 to 207 is any or no amino acid
  Variant (209)..(209): Xaa in position 209 is any amino acid
  Variant (213)..(214): Xaa in position 213 to 214 is any amino acid
  Variant (217)..(219): Xaa in position 217 to 219 is any amino acid
  Variant (221)..(223): Xaa in position 221 to 223 is any amino acid
  Variant (225)..(230): Xaa in position 225 to 230 is any amino acid
  Variant (232)..(232): Xaa in position 232 is any amino acid
  Variant (234)..(240): Xaa in position 234 to 240 is any amino acid
  Variant (241)..(290): Xaa in position 241 to 290 is any or no amino acid
  Variant (292)..(297): Xaa in position 292 to 297 is any amino acid
  Variant (298)..(298): Xaa in position 298 is any or no amino acid
  Variant (300)..(302): Xaa in position 300 to 302 is any amino acid
  Variant (305)..(305): Xaa in position 305 is any amino acid
  Variant (308)..(308): Xaa in position 308 is any amino acid
  Variant (309)..(309): Xaa in position 309 is any or no amino acid
  Variant (313)..(313): Xaa in position 313 is any amino acid
  Variant (316)..(324): Xaa in position 316 to 324 is any amino acid
  Variant (325)..(373): Xaa in position 325 to 373 is any or no amino acid
  Variant (375)..(377): Xaa in position 375 to 377 is any amino acid
  Variant (379)..(388): Xaa in position 379 to 388 is any amino acid
  Variant (390)..(402): Xaa in position 390 to 402 is any amino acid
  Variant (403)..(409): Xaa in position 403 to 409 is any or no amino acid
  Variant (411)..(413): Xaa in position 411 to 413 is any amino acid
  Variant (415)..(416): Xaa in position 415 to 416 is any amino acid
  Variant (417)..(417): Xaa in position 417 is any or no amino acid
  Variant (421)..(422): Xaa in position 421 to 422 is any amino acid
  Variant (425)..(426): Xaa in position 425 to 426 is any amino acid
  Variant (428)..(428): Xaa in position 428 is any amino acid
  Variant (429)..(429): Xaa in position 429 is any or no amino acid
  Variant (431)..(438): Xaa in position 431 to 438 is any amino acid
  Variant (440)..(456): Xaa in position 440 to 456 is any amino acid
  Variant (457)..(463): Xaa in position 457 to 463 is any or no amino acid
  Variant (466)..(466): Xaa in position 466 is any amino acid
  Variant (468)..(472): Xaa in position 468 to 472 is any amino acid
  Variant (474)..(476): Xaa in position 474 to 476 is any amino acid
  Variant (478)..(479): Xaa in position 478 to 479 is any amino acid
  Variant (481)..(486): Xaa in position 481 to 486 is any amino acid
  Variant (489)..(501): Xaa in position 489 to 501 is any amino acid
  Variant (502)..(536): Xaa in position 502 to 536 is any or no amino acid
  Variant (538)..(564): Xaa in position 538 to 564 is any amino acid
  Variant (565)..(567): Xaa in position 565 to 567 is any or no amino acid
  Variant (570)..(572): Xaa in position 570 to 572 is any amino acid
  Variant (573)..(574): Xaa in position 573 to 574 is any or no amino acid
  Variant (576)..(577): Xaa in position 576 to 577 is any amino acid
  Variant (579)..(579): Xaa in position 579 is any amino acid
  Variant (581)..(585): Xaa in position 581 to 585 is any amino acid
  Variant (586)..(586): Xaa in position 586 is any or no amino acid
  Variant (588)..(588): Xaa in position 588 is any amino acid
  Variant (589)..(589): Xaa in position 589 is any or no amino acid
VXXMXXPGXXXXYXGXXRXKXXXXXXXXXXXXXXXXXXXWXXXGYXXXFXXXXXXXXXXXXXXXXGXXXXXXXXXXXXXXXXXXXXXXXXXXXXXXXXXXXXXXXXXXXXPXXXXXXXQXXFAXXTXXXXXGXXXXXRXXXXXXXXFXXXWXXXXYXXXAXXXWXXXXXXXXXXXXXXXXXXXXXGXXXXXXXXXXXXXXXXXXXXXDXAGGXXVHXXXGXXXLXXXXXXGXRXXXXXXXXXXXXXXXXXXXXXXXXXXXXXXXXXXXXXXXXXXXXXXXXXXXXXXXXXHXXXXXXXGXXXLWXGWXXGFNXGSXXXXXXXXXXXXXXXXXXXXXXXXXXXXXXXXXXXXXXXXXXXXXXXXXXXXXXXXXXAXXXTXXXXXXXXXXWXXXXXXXXXXXXXXXXXXXXGXXXGXXXGLVXXTPXXGXXVXXXXXXXXGXXXXXXXXXXXXXXXXXXXXXXXXDDXLXXXXXHXXXGXXGXXXXXXFAXXXXXXXXXXXXXXXXXXXXXXXXXXXXXXXXXXXXXXXXXXXXXXXXQXXXXXXXXXXXXXXXXXXXXXXXXXXXXXXLRXXXXXEXXGXDXXXXXXEXXY

SEQ ID NO: 67644 - protein, 20 aa, Artificial sequence
  protein pattern
  Variant (2)..(3): Xaa in position 2 to 3 is any amino acid
  Variant (5)..(5): Xaa in position 5 is Phe or Tyr
  Variant (6)..(6): Xaa in position 6 is Ala or Ser
  Variant (8)..(8): Xaa in position 8 is any or no amino acid
  Variant (10)..(10): Xaa in position 10 is any amino acid
  Variant (11)..(11): Xaa in position 11 is any or no amino acid
  Variant (13)..(15): Xaa in position 13 to 15 is any amino acid
  Variant (16)..(16): Xaa in position 16 is Ala, Gly, Asn, Ser or Thr
  Variant (17)..(17): Xaa in position 17 is Ala, Gly or Ser
  Variant (18)..(19): Xaa in position 18 to 19 is any amino acid
  Variant (20)..(20): Xaa in position 20 is Ala or Gly
GXXDXXGXGXXVXXXXXXXX

SEQ ID NO: 67645 - protein, 14 aa, Artificial sequence
  protein pattern
  Variant (2)..(2): Xaa in position 2 is any amino acid
  Variant (3)..(3): Xaa in position 3 is Ile, Leu, Met or Val
  Variant (4)..(4): Xaa in position 4 is Ala, Cys, Gly, Ser, Thr or Val
  Variant (5)..(5): Xaa in position 5 is Ala or Gly
  Variant (8)..(8): Xaa in position 8 is any amino acid
  Variant (9)..(9): Xaa in position 9 is Ala, Ile or Val
  Variant (11)..(11): Xaa in position 11 is Ala or Pro
  Variant (12)..(13): Xaa in position 12 to 13 is Ala, Cys, Gly or Ser
  Variant (14)..(14): Xaa in position 14 is Ala, Asp, Gly or Ser
GXXXXLVXXTXXXX

SEQ ID NO: 67646 - DNA, 1929 bp, Saccharomyces cerevisiae
  CDS (1)..(1929)
atggacaagaagaaggatctactggagaacgaacaatttctccgcatccaaaagctcaacgctgccgatgcgggcaaaagacaatctataacagtggacgacgagggcgaactatatgggttagacacctccggcaactcaccagccaatgaacacacagctaccacaattacacagaatcacagcgtggtggcctcaaacggagacgtcgcattcatcccaggaactgctaccgaaggcaatacagagattgtaactgaagaagtgattgagaccgatgataacatgttcaagacccatgtgaagactttaagctccaaagagaaggcacggtataggcaagggtcctctaactttatatcgtatttcgatgatatgtcatttgaacacaggcccagtatattagatgggtcagttaacgagcccttcaagaccaaattcgtgggacctactttagaaaaggagatcagaagaagggagaaagagctaatggccatgcgcaaaaatttacaccaccgcaagtcctccccagatgctgtcgactcagtagggaaaaatgatggcgccgccccaactactgttccaactgccgccacctcagaaacggtggtcaccgttgaaaccaccataatttcatccaatttctccgggttgtacgtggcgttttggatggctattgcatttggtgctgtcaaggctttaatagactattattaccagcataatggtagcttcaaggattcggagatcttgaaatttatgactacgaatttgttcactgtggcatccgtagatcttttgatgtatttgagcacttattttgtcgttggaatacaatacttatgcaagtggggggtcttgaaatggggcactaccggctggatcttcacctcaatttacgagtttttgtttgttatcttctacatgtatttaacagaaaacatcctaaaactacactggctgtccaagatcttcctttttttgcattctttagttttattgatgaaaatgcattctttcgccttctacaatggctatctatggggtataaaggaagaactacaattttccaaaagcgctcttgccaaatacaaggattctataaatgatccaaaagttattggtgctcttgagaaaagctgtgagttttgtagttttgaattgagctctcagtctttaagcgaccaaactcaaaaattccccaacaatatcagtgcaaaaagctttttttggttcaccatgtttccaaccctaatttaccaaattgaatatccaagaactaaggaaatcagatggagctacgtattagaaaagatctgcgccatcttcggtaccattttcttaatgatgatagatgctcaaatcttgatgtatcctgtagcaatgagagcattggctgtgcgcaattctgaatggactggtatattggatagattattgaaatgggttggattgctcgttgatatcgtcccagggtttatcgtgatgtacatcttggacttctatttgatttgggatgccattttgaactgtgtggctgaattgacaagatttggcgacagatatttctacggtgactggtggaattgtgttagttgggcagacttcagtagaatttggaacatcccagtgcataagtttttgttaagacatgtttaccatagttcaatgagttcattcaaattgaacaagagtcaagcaactttgatgacctttttcttaagttccgtcgttcatgaattagcaatgtacgttatcttcaagaaattgaggttttacttgttcttcttccaaatgctgcaaatgccattagtagctttaacaaatactaaattcatgaggaacagaaccataatcggaaatgttattttctggctcggtatctgcatgggaccaagtgtcatgtgtacgttgtacttgacattctaa

SEQ ID NO: 67647 - protein, 642 aa, Saccharomyces cerevisiae
MDKKKDLLENEQFLRIQKLNAADAGKRQSITVDDEGELYGLDTSGNSPANEHTATTITQNHSVVASNGDVAFIPGTATEGNTEIVTEEVIETDDNMFKTHVKTLSSKEKARYRQGSSNFISYFDDMSFEHRPSILDGSVNEPFKTKFVGPTLEKEIRRREKELMAMRKNLHHRKSSPDAVDSVGKNDGAAPTTVPTAATSETVVTVETTIISSNFSGLYVAFWMAIAFGAVKALIDYYYQHNGSFKDSEILKFMTTNLFTVASVDLLMYLSTYFVVGIQYLCKWGVLKWGTTGWIFTSIYEFLFVIFYMYLTENILKLHWLSKIFLFLHSLVLLMKMHSFAFYNGYLWGIKEELQFSKSALAKYKDSINDPKVIGALEKSCEFCSFELSSQSLSDQTQKFPNNISAKSFFWFTMFPTLIYQIEYPRTKEIRWSYVLEKICAIFGTIFLMMIDAQILMYPVAMRALAVRNSEWTGILDRLLKWVGLLVDIVPGFIVMYILDFYLIWDAILNCVAELTRFGDRYFYGDWWNCVSWADFSRIWNIPVHKFLLRHVYHSSMSSFKLNKSQATLMTFFLSSVVHELAMYVIFKKLRFYLFFFQMLQMPLVALTNTKFMRNRTIIGNVIFWLGICMGPSVMCTLYLTF

SEQ ID NO: 67648 - DNA, 2421 bp, Saccharomyces cerevisiae
  CDS (348)..(2276)
tataaaattcctttcatcaatacatctatatattcgaatatatagataaaccaatacaaaaacatactgaaattttttgaaaacaactaaaactattcattgcagttacacgtgaatgctaaactttatatcgctcttgtcggtcccgcggagttaacatttaacggcttctcgcgcaataaccggaaaaattccaacagtttctttgtaatattattaagccttcttttttcccggaatctataagaggggacgaaaattagccgctattaattctggtattgccacctagacaagaagtaaacagacacattacgttagcaaaagcaacaataacaaacacaaccatggacaagaagaaggatctactggagaacgaacaatttctccgcatccaaaagctcaacgctgccgatgcgggcaaaagacaatctataacagtggacgacgagggcgaactatatgggttagacacctccggcaactcaccagccaatgaacacacagctaccacaattacacagaatcacagcgtggtggcctcaaacggagacgtcgcattcatcccaggaactgctaccgaaggcaatacagagattgtaactgaagaagtgattgagaccgatgataacatgttcaagacccatgtgaagactttaagctccaaagagaaggcacggtataggcaagggtcctctaactttatatcgtatttcgatgatatgtcatttgaacacaggcccagtatattagatgggtcagttaacgagcccttcaagaccaaattcgtgggacctactttagaaaaggagatcagaagaggggagaaagagctaatggccatgcgcaaaaatttacaccaccgcaagtcctccccagatgctgtcgactcagtagggaaaaatgatggcgccgccccaactactgttccaactgccgccacctcagaaacggtggtcaccgttgaaaccaccataatttcatccaatttctccgggttgtacgtggcgttttggatggctattgcatttggtgctgtcaaggctttaatagactattattaccagcataatggtagcttcaaggattcggagatcttgaaatttatgactacgaatttgttcactgtggcatccgtagatcttttgatgtatttgagcacttattttgtcgttggaatacaatacttatgcaagtggggggtcttgaaatggggcactaccggctggatcttcacctcaatttacgagtttttgtttgttatcttctacatgtatttaacagaaaacatcctaaaactacactggctgtccaagatcttcctttttttgcattctttagttttattgatgaaaatgcattctttcgccttctacaatggctatctatggggtataaaggaagaactacaattttccaaaagcgctcttgccaaatacaaggattctataaatgatccaaaagttattggtgctcttgagaaaagctgtgagttttgtagttttgaattgagctctcagtctttaagcgaccaaactcaaaaattccccaacaatatcagtgcaaaaagctttttttggttcaccatgtttccaaccctaatttaccaaattgaatatccaagaactaaggaaatcagatggagctacgtattagaaaagatctgcgccatcttcggtaccattttcttaatgatgatagatgctcaaatcttgatgtatcctgtagcaatgagagcattggctgtgcgcaattctgaatggactggtatattggatagattattgaaatgggttggattgctcgttgatatcgtcccagggtttatcgtgatgtacatcttggacttctatttgatttgggatgccattttgaactgtgtggctgaattgacaagatttggcgacagatatttctacggtgactggtggaattgtgttagttgggcagacttcagtagaatttggaacatcccagtgcataagtttttgttaagacatgtttaccatagttcaatgagttcattcaaattgaacaagagtcaagcaactttgatgacctttttcttaagttccgtcgttcatgaattagcaatgtacgttatcttcaagaaattgaggttttacttgttcttcttccaaatgctgcaaatgccattagtagctttaacaaatactaaattcatgaggaacagaaccataatcggaaatgttattttctggctcggtatctgcatgggaccaagtgtcatgtgtacgttgtacttgacattctaaggcatcctgcaactgttctgtggagctattaaatctttatagtaaatttttttttacttttttttttttttttttttttttttattatttacaagcgtctatatattttctattatagaatattgtcatttattacattggttca

SEQ ID NO: 67649 - protein, 642 aa, Saccharomyces cerevisiae
MDKKKDLLENEQFLRIQKLNAADAGKRQSITVDDEGELYGLDTSGNSPANEHTATTITQNHSVVASNGDVAFIPGTATEGNTEIVTEEVIETDDNMFKTHVKTLSSKEKARYRQGSSNFISYFDDMSFEHRPSILDGSVNEPFKTKFVGPTLEKEIRRGEKELMAMRKNLHHRKSSPDAVDSVGKNDGAAPTTVPTAATSETVVTVETTIISSNFSGLYVAFWMAIAFGAVKALIDYYYQHNGSFKDSEILKFMTTNLFTVASVDLLMYLSTYFVVGIQYLCKWGVLKWGTTGWIFTSIYEFLFVIFYMYLTENILKLHWLSKIFLFLHSLVLLMKMHSFAFYNGYLWGIKEELQFSKSALAKYKDSINDPKVIGALEKSCEFCSFELSSQSLSDQTQKFPNNISAKSFFWFTMFPTLIYQIEYPRTKEIRWSYVLEKICAIFGTIFLMMIDAQILMYPVAMRALAVRNSEWTGILDRLLKWVGLLVDIVPGFIVMYILDFYLIWDAILNCVAELTRFGDRYFYGDWWNCVSWADFSRIWNIPVHKFLLRHVYHSSMSSFKLNKSQATLMTFFLSSVVHELAMYVIFKKLRFYLFFFQMLQMPLVALTNTKFMRNRTIIGNVIFWLGICMGPSVMCTLYLTF

SEQ ID NO: 67650 - DNA, 2004 bp, Candida glabrata CBS 138
  CDS (1)..(2004)
atggctgacgacttgctcaatgatgaggatttcatcaagatacagaagctgaactcggtggacggggagcggaggcacagcattgtgttcgactccactgtggtggtgaaggaaggccgtcagagccagagccagagccagagcgacagcgacaacgacaatgtgtctggtgtggatgtgctgagtgtggatcctgcgaccaatggtaaaggcggggactcacgtaccgattacgactacgacagcaacgataaggatgtcctggactcgcatgtgatggtggacaagcaagatggttccgtggcgttcacagttgcgcaggagagcgatacgcctgcagatggcgatcgcgatggcgatgcagatgccactggcgatgtcgctgccaatgctggcgcttccgttaaacacaccaaggacgtagacgctactatcaagaggtacatgaagcacatgcaccagaaggaggtcggccgtttcaacaagaagtcccaggagtacatctcctacttcggggatgtggacttcgacaagagacccacaatcctggacttcgcagtgagtgagccttacaggactcagttcaagggccctatactagagaaagagatcaaggagaaggagaagttgaagaagatcatcgcttatagaagtaacccaagttacaaaccggacttcgatatcaacatcaagaccagctcaaagggcaaggagaacgaggctccgactttctccggtgtctacgtgcttatgtggatgatctttgggttcgcttcgatccagtcttgcatcaattactacattgaccacggcaactcgttcaaggatgccatcttgttcaagttcatgttgactgacctgcatagggtgttcgcttttgatgcgctgttgtattgcgcaacatactttgtgctgtttatccaatacctgtgctgctacaacgtcatcaattggaacaagaccggtgtcccggtcatcgtcacttatgaaatcctctacgttactgctgcgctgtacatcccagcccatgtcctgaacttcaattggattgcaaggatatacatattcctacactcagtggtgcagattatgaaaatgcactcgttctcattctacaacgggtatctatggaatatcctcaatgagttgaacttctcgaagagagctgtcgccaagttaaaagaccgtaaggatatagactcagaagtcatggccacattgcatagaagcattgacttctgcagcttcgaattgaattaccaatgtcaaggcgaaaacttccctaacaatatcagcatcaagaactacttcatgtacacgttgttccccacattgatctaccagataaactaccctagaacaaacaagatcagaattggttacctgattgagaagacctgcgccacattcggctgcatctacctgatggtggtggacgcccagatatttatgctgcccattacggagaaggctatcaagctaaaagagctgcctatcggtctggagttcacagccaagttcttcctgatctgggctgagcttatcccaccgatgaccgtgctgtacatgctggccttctacttaatctgggacgccatcctgaacttctttgcggagctgaccatgttcgcagacagatacttctacggtgactggtggaactgcgtttcatttatagagttcagcagaatatggaacgtaccagtacacaagttcattttaagacacatctaccacagcgtcatcaacaggttcaggctctccaagctgcaggccaccttgttcacgttcctactcagcgctgtgttccacgagctggcaatgtacgccatcgtcaagcgctggcgtgggttcctgttcgcattccaactgggccagttcttcttcgcgggcatcagcaacatcccatacctgcgcaagagaccagtgctctccaacgctctgttctggttcgagatgtgcacagggccaagtgtcatcctactactatatgttgtgttttaa

SEQ ID NO: 67651 - protein, 667 aa, Candida glabrata CBS 138
MADDLLNDEDFIKIQKLNSVDGERRHSIVFDSTVVVKEGRQSQSQSQSDSDNDNVSGVDVLSVDPATNGKGGDSRTDYDYDSNDKDVLDSHVMVDKQDGSVAFTVAQESDTPADGDRDGDADATGDVAANAGASVKHTKDVDATIKRYMKHMHQKEVGRFNKKSQEYISYFGDVDFDKRPTILDFAVSEPYRTQFKGPILEKEIKEKEKLKKIIAYRSNPSYKPDFDINIKTSSKGKENEAPTFSGVYVLMWMIFGFASIQSCINYYIDHGNSFKDAILFKFMLTDLHRVFAFDALLYCATYFVLFIQYLCCYNVINWNKTGVPVIVTYEILYVTAALYIPAHVLNFNWIARIYIFLHSVVQIMKMHSFSFYNGYLWNILNELNFSKRAVAKLKDRKDIDSEVMATLHRSIDFCSFELNYQCQGENFPNNISIKNYFMYTLFPTLIYQINYPRTNKIRIGYLIEKTCATFGCIYLMVVDAQIFMLPITEKAIKLKELPIGLEFTAKFFLIWAELIPPMTVLYMLAFYLIWDAILNFFAELTMFADRYFYGDWWNCVSFIEFSRIWNVPVHKFILRHIYHSVINRFRLSKLQATLFTFLLSAVFHELAMYAIVKRWRGFLFAFQLGQFFFAGISNIPYLRKRPVLSNALFWFEMCTGPSVILLLYVVF

SEQ ID NO: 67652 - DNA, 1860 bp, Candida glabrata CBS 138
  CDS (1)..(1860)
atgggggacgagttgctaggcgacaagaggtttttgcgcatccagaggttgaactcgccggatgacggtagacgtcactcattgcagatagacagtgaggagcacctatatgagcacaaggaaattgccgttgatgagacacaccgtgaggttgaagaggacataccttcggagacgcacactccgcctgagttgaggcagaccattgaggtaacggagaagcctgtgggcgatggcgaggtggaacagactgtgaagattaacactgaacggatgaactccaacggcagtggaaaggacatggaggacaagaacgtcgagaagatatctaagaagttcaagaccaggtaccagaagggcacccaggatttcaggtcgtactttgacgacgttgcatttgagttcagaccaagtatcttcgatgtgtccatcaatgagccttaccagaccaagtttgctggtcctactctagaggcatccatcaagtccaaggagaaagagttgcgtaagctgcgtcgtgagcagaagcgtcaactggatagtggcgagggccctgtctcctgggaggaaacattattgtcttccaatttctctggtatttatgtcgcaatttggatgacattggcattgggtgtcctgaaatcgattgtggactactactgtgagactggtagcttgaccgagtctgagatttggaaattcatgaccaccgacttgtttaaagtcgccttagtagacacccaaatgtacttggccacttacttatcacttgtggtacaatatctgtgcaagtgggggttgctatcctgggaaaagcaagcttggttgattatggcggtgtatgaattttgttacgttttcttctttatgatctacaccgaacatatcatgaaattgcactggattgccaagattttcttattcctgcactcattggtacttttgatgaagatgcactcatactccttctataatggttacctatgggaaatttacgatgagctaacttactcaaagaaggctttggcaaaatacagagaaaccgccaagtctcctattatcaagacattggagaattccattgaattctgtactttagaaattaagtctcaatcaaaacataacgaattcccaaaaaacatatctattggaaactactttatgttcacaatgttcccaacattggtttatcaaattgaatacccaagaactaagaaggtgaggtggtcttatgtcttagaaaaggtatgcgcaatcttcggtacaattgtagtcatgatgactgtagctcaaattttcatgtacccagttgctattcgtgcgctatccatccgtgactccaccgaacaaagtctctttgaaaaggcaaaggagtggccaagactattaattgacatcgtgccaagtttcatcataatgtacttgcttgtattctatttgatttgggatgccatcttgaactgtattgccgagttaacatgctttggtgataggtatttctacggtgactggtggaactgtgtcgattgggctgaattcagtcgtatttggaatgttcctgttcataagttcttggttagacatgtttaccacagttccatgagtgctttcagattgaatagggaccaagcaaccctgtttacgttctttttaagttctgtgattcatgaaatggcaatgtatgtcatcttcaagagattcagactttatttatttagtttccaaatgttgcaattgccattggttgctatcagtaatacgaaatttatgagggaaagaactgtaattggtaatgttatcttctggctaggtatttgcttaggacccagtgtgatttgcaccatttacttaactttctga

SEQ ID NO: 67653 - protein, 619 aa, Candida glabrata CBS 138
MGDELLGDKRFLRIQRLNSPDDGRRHSLQIDSEEHLYEHKEIAVDETHREVEEDIPSETHTPPELRQTIEVTEKPVGDGEVEQTVKINTERMNSNGSGKDMEDKNVEKISKKFKTRYQKGTQDFRSYFDDVAFEFRPSIFDVSINEPYQTKFAGPTLEASIKSKEKELRKLRREQKRQLDSGEGPVSWEETLLSSNFSGIYVAIWMTLALGVLKSIVDYYCETGSLTESEIWKFMTTDLFKVALVDTQMYLATYLSLVVQYLCKWGLLSWEKQAWLIMAVYEFCYVFFFMIYTEHIMKLHWIAKIFLFLHSLVLLMKMHSYSFYNGYLWEIYDELTYSKKALAKYRETAKSPIIKTLENSIEFCTLEIKSQSKHNEFPKNISIGNYFMFTMFPTLVYQIEYPRTKKVRWSYVLEKVCAIFGTIVVMMTVAQIFMYPVAIRALSIRDSTEQSLFEKAKEWPRLLIDIVPSFIIMYLLVFYLIWDAILNCIAELTCFGDRYFYGDWWNCVDWAEFSRIWNVPVHKFLVRHVYHSSMSAFRLNRDQATLFTFFLSSVIHEMAMYVIFKRFRLYLFSFQMLQLPLVAISNTKFMRERTVIGNVIFWLGICLGPSVICTIYLTF

SEQ ID NO: 67654 - DNA, 1788 bp, Kluyveromyces lactis NRRL Y-1140
  CDS (1)..(1788)
atgtccggttcaagtgacagttcacatgataccaccgttaaggatataactgaggatgagcagttcttgaggataagaaggctgaacgacaacaaccatgggaagaggaagtctttgcatgaggaacagttggaggatgctgttctcgatgaacttggatctccggacgttcttttcaacacggtccagcctaacgacacggttatctttaagactagaaccacctccgaacaaggcgacaaacatctgcatgttttcatgcagaaattgaaggtgaaggaaaagaacagatataagaaggatacgaatgaaatgcagtccatgacacgagatgtagactggggctctagaggtagtatcatggatgagatggtcaacaatccgcttagatctcatttcaatgggccagcaatagacgagaaatattctagagtaaaggcaacagccagatcaaatacggtgaggatagatgacaataatactattgaaattgcaaatgaaactatagcaacagacttttctggattctatgtcttattttggatggcagttgcgttcaccatctgcaaagtgacattacaatattacgaggaacatggtgatttttcacagtcaattatcttgcgatacatgaccatgaatctttggaaagttgcgttatatgatatcgcaatgtacctgactagttattttgcattcgtcatacaatatttgtgcagaaaaaatgtcatcagttggagacgtacagggagagatattatttcagtttatgaggtggtatttctattctccaatatctacttaccaaaaaagaccttccatttcaactggatcgcccaaatatttttatttttacattcattggtctatttgatgaagatacattcttattccttctataatggttatttgtgggatatttcatcagagttggattatgcaacatctaccctaaagaaactgaaaaaactcagttctccacaaccagaacttgatatattgcaaaagtcaatagatttttgtgagtttgagataagatctcaatcatcaacggtcaggttcccatttaatgtctcagtgaagaactttttcgagttttcttcgttcccaacgcttgtatatcagatagaatacccacgcacaaaacgtataagatggttttacgtttttgagaaatgttgcgcgatctttggtatcatctttgtcatgatggttgttgcacaacaattcatgctgcctgttattttgaaagctaaaattttggcagatgccaacctcacattatgggaaaagaacctggtatggccgaagctcttgttggacttggcaccaggttttattatgatgtttttgttggtctggtatttgatttgggatgcaattttaaactgtgtggccgaattgtcctgttttgcagaccaccatttctactctgattggtggaactgttgctcctggtatgattttagcagattgtggaatcgtccggtgcatagctttttattgagacatgtatatcacagttcgattagtgcgtatcacatgagtaaagttcaagccaccttattcacatttttattaagttctgtgtttcacgagctagccatgtttgttcttttcaacaagttccgtggttatatcattatcctgcaaatgtcacaaattccatttacagctttatcaaacattccattgctcagagataagaaactatttaataatgttaccttctggattgggatttgtttaggaccaagtatgactggtttgctgtacttgatcttttaa

SEQ ID NO: 67655 - protein, 595 aa, Kluyveromyces lactis NRRL Y-1140
MSGSSDSSHDTTVKDITEDEQFLRIRRLNDNNHGKRKSLHEEQLEDAVLDELGSPDVLFNTVQPNDTVIFKTRTTSEQGDKHLHVFMQKLKVKEKNRYKKDTNEMQSMTRDVDWGSRGSIMDEMVNNPLRSHFNGPAIDEKYSRVKATARSNTVRIDDNNTIEIANETIATDFSGFYVLFWMAVAFTICKVTLQYYEEHGDFSQSIILRYMTMNLWKVALYDIAMYLTSYFAFVIQYLCRKNVISWRRTGRDIISVYEVVFLFSNIYLPKKTFHFNWIAQIFLFLHSLVYLMKIHSYSFYNGYLWDISSELDYATSTLKKLKKLSSPQPELDILQKSIDFCEFEIRSQSSTVRFPFNVSVKNFFEFSSFPTLVYQIEYPRTKRIRWFYVFEKCCAIFGIIFVMMVVAQQFMLPVILKAKILADANLTLWEKNLVWPKLLLDLAPGFIMMFLLVWYLIWDAILNCVAELSCFADHHFYSDWWNCCSWYDFSRLWNRPVHSFLLRHVYHSSISAYHMSKVQATLFTFLLSSVFHELAMFVLFNKFRGYIIILQMSQIPFTALSNIPLLRDKKLFNNVTFWIGICLGPSMTGLLYLIF

SEQ ID NO: 67656 - DNA, 1839 bp, Debaryomyces hansenii CBS767
  CDS (1)..(1839)
atggttgacaaatccaatacagatgaaaagctctcaacaattgttgatagaaatgatggaaggagacaatcacttattcttgatgatgactataatgagaacgaaacactgcaaggtttagatgatcaatatgaagcagcgatcaaattgcgcaattctaagacattagaagataccagcaacgtttctgacacagaggattcgagatcgactatttccgaaactataactcagccaaccgaagataaccaggtcaatgttgaacccctaatgagaaaattggacgaaattcacaatgcagctcctacaagacttaggagaaggaaaagtaaagggaaaggaacgtctgaaaagaaacaagctacaaataaaacagaagagccaagattcaggtctggctttggagatatcaaattctattctgtgctgtctactattttcgattcaagctattttaaaaattcagaattcttcgggatatatgtgctcttctggttaggcacagctttccttatgatgaacaatattgttcattcgtactttgagagtaacgagggattctttcagactgcagtaatgaagactttgaggaaagatttagtgaaaataggttttactgatttagggatgtatctcggtacatattttgcttttttccttcaatatgcatgcttgaaaggttggattgtgtgggattcaagtggttggataattcaagccgtctacgattttattcatggtgctttctggctctattttgcatccgaccagtgtatgtcttatccatggattggtaaggtgtttttagtattacacaatctcgttttcataatgaaaatgcattcttatgcattttataatggctatttatggcgcatattaagagagttggagttttcagaagattatttggaaaggttaactaatggtaaggttagattgccagagaaatatgacttggaaagaacaaaaaatattctagatggtagtattcggttttgtaagtttgaattagaataccagtcaagtgcaactaccatgtctagtgattcgccaatcgagtcattcgatttggaggatgatatccatgacttacaaaaaaggaatatagtgaaatttccaacgaatgttaatctatttaatttcttcgaatattcaatgttccctacattggtatatactttgaactacccacgtacacgcaggatcagatggcaatatgttttagaaaagacttgcggtgtttttggtattatatttctcatgattttagtagctcaaaactggatgtatccgattattcaacgtgcgatagccttacaagatatgcctactgcagataaatggagaggatgtatgttcattttacttgatatgattcctccttttctcatggaatatctttttacattctttttaatctgggacgcaattctaaatgttattgctgagttgagtagatttgcagatagagatttctatggaccatggtggtcatgttccgactggtcggaatatgctagaatttggaatcgtcctgttcataaattcttacttagacacgtctatcattcgtcgattagtgtactcaagcttaacaatctgagggccatcttaggcacttttattttgtccagcttagtacatgagttggttatgtttgtcatatttaacagattgagaggttatctattagtgatgcaaatgtctcagcttcctctagttgctctttgtaacacaagatttatgaagaatagaaaagtattgggcaacgttatgtgctggttcggattcatttcggtaccgagcatgatttgcacgttttatttaatattttaa

SEQ ID NO: 67657 - protein, 612 aa, Debaryomyces hansenii CBS767
MVDKSNTDEKLSTIVDRNDGRRQSLILDDDYNENETLQGLDDQYEAAIKLRNSKTLEDTSNVSDTEDSRSTISETITQPTEDNQVNVEPLMRKLDEIHNAAPTRLRRRKSKGKGTSEKKQATNKTEEPRFRSGFGDIKFYSVLSTIFDSSYFKNSEFFGIYVLFWLGTAFLMMNNIVHSYFESNEGFFQTAVMKTLRKDLVKIGFTDLGMYLGTYFAFFLQYACLKGWIVWDSSGWIIQAVYDFIHGAFWLYFASDQCMSYPWIGKVFLVLHNLVFIMKMHSYAFYNGYLWRILRELEFSEDYLERLTNGKVRLPEKYDLERTKNILDGSIRFCKFELEYQSSATTMSSDSPIESFDLEDDIHDLQKRNIVKFPTNVNLFNFFEYSMFPTLVYTLNYPRTRRIRWQYVLEKTCGVFGIIFLMILVAQNWMYPIIQRAIALQDMPTADKWRGCMFILLDMIPPFLMEYLFTFFLIWDAILNVIAELSRFADRDFYGPWWSCSDWSEYARIWNRPVHKFLLRHVYHSSISVLKLNNLRAILGTFILSSLVHELVMFVIFNRLRGYLLVMQMSQLPLVALCNTRFMKNRKVLGNVMCWFGFISVPSMICTFYLIF

SEQ ID NO: 67658 - DNA, 1830 bp, Candida albicans SC5314
  CDS (1)..(1830): transl_table=12
atggggagaacaaatacactggaccagttgaatgctatctccgataagaataccaaaaggaaatctttggcattagataacgaatatcataacaattcttcttccgaagatgatagctctaagatagagctttcatatactattcccgataacaataacataattctgcaagaaactacaacgtcagtagaagatgttttatctgtatcaagtgctccacaaaatgagttgcgattgaggaagcaaaagagcaacaatcaagactcacctgttgatttaaatggagttatagtcgatgtttcaaaaagagaaaagatttttttaaaaaggaaaagacaaatcgataacaagcatggatctgataagtctaagtacttatctcgattcaatgatatcacattcaaagcaaaatcttcgacgatctttgaatcggatgaattttataaaacggatttctttgggatgtatgttttgttttggttggcaacagcttttgctatggtaaataaccttattcatacatattttgaaaactcaacccctattttgcaatggactgtggtaaaggtgtttaagcgagacttgtttaaagttggattagtcgatttggcaatgtatttatctacttattttgcctttttcgtgcaatatgcttgtaaaaatggatatttatcatggaaaaaagttggctggtggctacaagcagcatttgatggtttatttttatttttttggttatggatagctctggaatattgcttggatttcccatggattgccaaagtatttttagtgctccacagtttggtatttattatgaagatgcactcttacgcattttacaatggatacctctggctgatttacaaagaagggttatactcagagaaatatcttgataaattaacaaatggaaaagttacattaccaaaaggacacaccaaaaacgaaacagaaaaagtacttcaggaaagtatagctttcaccaaatatgaattagaatatcaatcccacgctactacagagaatcccgacgatcatcatgtattcgatatagatcagacagataagtcaattgccaaactacaacaagaagggttgatcaaattcccacagaatataactttattcaattattttgagtacagcatgttcccaacattggtgtacactttaaatttcccaagaacaaaaagaattagatggtcatatgtatttggtaaaacgtttgggatttttggtcttattttcttaatgatccttattgctgaaaacaacttgtatccaatagttcttagatgtgagattgccagaaagttgccagtactggaaagaatcccacaatattttttcttattgatggatatgatcccaccattcttgatggtatatttgtttacgttctttttgatttgggatgccattcttaatgcaattgccgaattgtcgaaatttgctgatcgtgatttttatgggccctggtggtcatgcactgatttttcagaatttgccaatcaatggaatcgttgtgttcacaagtttctcttgagacatgtttaccattccagtatcagtgcattcgatgtgaataaacaactggcagcaataatcacgttcttattgtcgagtttagtacacgagcttgtgatgtatgtcatttttggaactttgagaggctatttgttattattccaaatgtcacagataccattgattattatgagtagaagtaaatttatgaaggacaaaaaggtgttaggtaacataatttgttggtttggttttattagcggtccaagtattatttgtacactttatttagtgttttaa

SEQ ID NO: 67659 - protein, 609 aa, Candida albicans SC5314
MGRTNTSDQLNAISDKNTKRKSLALDNEYHNNSSSEDDSSKIELSYTIPDNNNIISQETTTSVEDVLSVSSAPQNELRLRKQKSNNQDSPVDLNGVIVDVSKREKIFLKRKRQIDNKHGSDKSKYLSRFNDITFKAKSSTIFESDEFYKTDFFGMYVLFWLATAFAMVNNLIHTYFENSTPILQWTVVKVFKRDLFKVGLVDLAMYLSTYFAFFVQYACKNGYLSWKKVGWWLQAAFDGLFLFFWLWIASEYCLDFPWIAKVFLVLHSLVFIMKMHSYAFYNGYLWSIYKEGLYSEKYLDKLTNGKVTLPKGHTKNETEKVLQESIAFTKYELEYQSHATTENPDDHHVFDIDQTDKSIAKLQQEGLIKFPQNITLFNYFEYSMFPTLVYTLNFPRTKRIRWSYVFGKTFGIFGLIFLMILIAENNLYPIVLRCEIARKLPVSERIPQYFFLLMDMIPPFLMVYLFTFFLIWDAILNAIAELSKFADRDFYGPWWSCTDFSEFANQWNRCVHKFLLRHVYHSSISAFDVNKQSAAIITFLLSSLVHELVMYVIFGTLRGYLLLFQMSQIPLIIMSRSKFMKDKKVLGNIICWFGFISGPSIICTLYLVF

SEQ ID NO: 67660 - DNA, 1755 bp, Saccharomyces kluyveri
  CDS (1)..(1755)
atgtcagaagatatattggaaaacaaagatttccttagagtgcagaagttgaatgactctagaaacaaacgccaatcgttgcatcaggatgaactggatgaaaaggatctgtccttgggactagacaatgtcattgggattggactgaaggcagaatctgaacaggagcaggaagaccccactttaaaggtttttgtgaaacggttaaactggaaggagaagtaccgtttccataaagattccggtgagatgcagtccatgctcagagacgttgaattcaattacagaggtacaatcatggacaatgtagtcaacaatatcaatgaaccgctaaaaatagttctccaagattctcccgctggaaagctgaaagatggggacagcaagaccaagcataccacttctgagtcgaagaaagggattgagttgcacaagaatcaagagctgacaattcaaaccaactttgggcgcaccaatttttctgggttttacgttttgttttggttctccgttgcatttatagttactaaagtctcggtggattactatatcgcaaacgatggtgatttaggtcaatccgaagtcatccaatttatgactaaagatctgatctctgtggccttgattgacctggcaatgtacttgtccatttattttgtgtttgcagtccaatacgcttgcaaattgaagtggattagttggaataaggaggggtggttgatgacctccttatacgaggctgcgttcgttattgttttcctatatgttgcagagaatgtcatgaagttccattgggtggccaagattttccttttcttgcattccttggtgttgctgatgaagatgcattcatttgccttttacaatggttatctatggaacatttgggaagagttgtcttattcgaagggaaccttggcaaaagtcaaggatacgaaggtgagcagttcagtcatcgagtcgttggagaaaagccgtaatttctgtcaatttgaactggactgccagtctgaaaagataccatttccttcaaatatttccgttaacaatttctttatgtattccatgttccccaccctcgtttatcagattgaatacccgagaacaaaaaagattagatggggttacgttttcgaaaaattatgtgccatttttggcattatttttatcatgatggttgttgcacagatgtttatgtatcccgtggcaatgcgcgctattgcgttacgtgactcgggtataccaatattctgggaccgtattaagcaatggccacgtcttttgctggatattgtccctagtttcatcatgatgtacttgttggtttggtatctgatttgggatgccatcttgaactgtattgcagagctaacgtgttttgctgatagatacttctacggggattggtggaattgtgtttcctgggaagaatttagcagattgtggaacgttcctgttcataagtttctcttgaggcatgtttaccacagttcaatcagttttctacaactgaacaaagctcaggcaacgatcgcgacattctttattagttccgtggtgcatgaactagcaatgtacgtgcttttcaacaagcttcgtctcttcttatttttcttgcaaatgtaccaattgccattggtgaaaatgggcaacagcaagttttttaaggatagaaaagttcttggcaatgttatattttggattggtatctgtactggcccaagtttgatgtgtactttgtacttgactttttaa

SEQ ID NO: 67661 - protein, 584 aa, Saccharomyces kluyveri
MSEDILENKDFLRVQKLNDSRNKRQSLHQDELDEKDLSLGLDNVIGIGLKAESEQEQEDPTLKVFVKRLNWKEKYRFHKDSGEMQSMLRDVEFNYRGTIMDNVVNNINEPLKIVLQDSPAGKLKDGDSKTKHTTSESKKGIELHKNQELTIQTNFGRTNFSGFYVLFWFSVAFIVTKVSVDYYIANDGDLGQSEVIQFMTKDLISVALIDLAMYLSIYFVFAVQYACKLKWISWNKEGWLMTSLYEAAFVIVFLYVAENVMKFHWVAKIFLFLHSLVLLMKMHSFAFYNGYLWNIWEELSYSKGTLAKVKDTKVSSSVIESLEKSRNFCQFELDCQSEKIPFPSNISVNNFFMYSMFPTLVYQIEYPRTKKIRWGYVFEKLCAIFGIIFIMMVVAQMFMYPVAMRAIALRDSGIPIFWDRIKQWPRLLLDIVPSFIMMYLLVWYLIWDAILNCIAELTCFADRYFYGDWWNCVSWEEFSRLWNVPVHKFLLRHVYHSSISFLQLNKAQATIATFFISSVVHELAMYVLFNKLRLFLFFLQMYQLPLVKMGNSKFFKDRKVLGNVIFWIGICTGPSLMCTLYLTF

SEQ ID NO: 67662 - DNA, 1755 bp, Saccharomyces castellii
  CDS (1)..(1755)
atggaggagaaattactgaatgatagacagttcttgaagattcaagagttgaactcaccagatgcggatagaagatccatcacggaacccaaaaaggtaccagaacaagaggagaaaatcctcgtggaaccatcagagattaagatcaatgatgaaaatgtacaaatatcacctatcacttctgaaaaggatgattctgtgtttctcagtcatgtgggcgtacttcatgataaggaaaagacaagatatagaagaggttctgaatctttcatctcctattttgacgacgttgcatttgaaccaagaccaagtatattggatggatctattgatgaaccatttaggagaaacttccaaggcaccatcttggaaaaggaaatgaaaaaattagagaaggagcaaagaaagttgaatcgtaagggggttcatgtggaatttaaaccactggaaacttctcaatcaattggtaatttttcaggattttatgtggttacttggatgactattgcattaacatttctgagagtagtggttgactattatttggaacatggaacttttaccgattctaagattttacaatttatgactactgatttatttactaccgccactgtggatttgtcaatgtatttggatacctacattattttcctcattcaatattgttgtaagaaacgttggattaaatggcatggattgggttggtatttgaatgccattttcgaattcacatttgtcatggtttatatgtttttaagggaacatgtttggaaattacattgggtcggtaagattttcttattcttacactctttggtggtattaatgaagatgcattcatttgcattttataacggatacctatggtctatttgggaagaattacaatattctaaaaaggcattatcacaatttaaagatgaagaggaaaagactcaaaatgtaaccatgattaagactttggaaagaagtagtaccttttgtcaacatgaattaaatgtacaatctgaaaaggaaaaatttccaacaaatatcaatttaaaaaatttcttcatgtattccatgttccctgtgttagtctaccaaatcgaatacccaagaacaaagaaaataagatggaattatgtctttcaaaaagtttgtgccatctttggtaccattattcttatgatggttgatgctgacgtctttatgtatccagttgccattgaaggtttggctctacgtgacgctccctggatctcccttacacatagatttggtcaattggtcagattattaattgatatgatccctggattcatcgttatgtatctactgactttctacctaatttgggaagccatcttaaattgtatcgcagaactaacatgttttggcgatagatatttttacggtgactggtggaactgtgtttcatggggagatttctctagaatttggaatgtgccagttcataactttttggtaagacacgtttatcatagttccatgagtgctcttaaattaaataaaatgcaagcatcagtgatgacattcttaattagttctgtcattcatgaattatccatgtatgtgatctttaaaagatttaggctttacatcttcatgatgcaaatgtctcaaattcccttaatggctttgagtgaaacaaaatatctaaaggacagaaccattcttggaaatttaatcttttggtttggaatatgtgtgggaccaagtttgatgtgcacattatacttgaccttttag

SEQ ID NO: 67663 - protein, 584 aa, Saccharomyces castellii
MEEKLLNDRQFLKIQELNSPDADRRSITEPKKVPEQEEKILVEPSEIKINDENVQISPITSEKDDSVFLSHVGVLHDKEKTRYRRGSESFISYFDDVAFEPRPSILDGSIDEPFRRNFQGTILEKEMKKLEKEQRKLNRKGVHVEFKPLETSQSIGNFSGFYVVTWMTIALTFLRVVVDYYLEHGTFTDSKILQFMTTDLFTTATVDLSMYLDTYIIFLIQYCCKKRWIKWHGLGWYLNAIFEFTFVMVYMFLREHVWKLHWVGKIFLFLHSLVVLMKMHSFAFYNGYLWSIWEELQYSKKALSQFKDEEEKTQNVTMIKTLERSSTFCQHELNVQSEKEKFPTNINLKNFFMYSMFPVLVYQIEYPRTKKIRWNYVFQKVCAIFGTIILMMVDADVFMYPVAIEGLALRDAPWISLTHRFGQLVRLLIDMIPGFIVMYLLTFYLIWEAILNCIAELTCFGDRYFYGDWWNCVSWGDFSRIWNVPVHNFLVRHVYHSSMSALKLNKMQASVMTFLISSVIHELSMYVIFKRFRLYIFMMQMSQIPLMALSETKYLKDRTILGNLIFWFGICVGPSLMCTLYLTF

SEQ ID NO: 67664 - DNA, 1872 bp, Saccharomyces bayanus
  CDS (1)..(1872)
atgacggaggctaaggagttgttgcaggacgagcggtttctcaagatccaggaactcaattcggcagagcctagcaaacggcactcggtgacctacgataacgtaatcctaccacaggagtccgtggaagtgtcgccacggtcgtccaccacgtcgctggaagaaccagcgacgaccacggccacgggcgtggccgtggcagcagcggctgcggccgctgagaagaagaagaagaagaagggcgaggacggggacgacgagcaggacgagcaggcggaggagaagtatcctgtggacccccgcatgcagaagtacctctcgcacctcaagagcaagtcgcgcaccagggtccaccgcaaggacgccagcaagtacgtgtcgttcttcggggacgtgagcttcgacccgcggcccacgctcctggacagcgccgtcaacgtgcccttccagaccacgttcaagggccccgtcctggagaagcagctcaagggcctgcagcagaccaagaagggcgaggtcgccgctgccgccgccaccgccgccaccgctgccaccgctgccgctgcacccccaggcaagaaactggagtcgaacttctcgggcatctacgtgttcgcatggatgttcatgggctggatcgccttccgcagctgcatggactactacgtgtcgcacgaaggcgggttcgccagcatggagatcgtgcagtacatgacgtccgacctgttcaccatcgcgctgctcgacctggcgctgttcctgtccactttcttcgtcgtgttcgtgcactggctggtcaagctcgggttcatcaggtggaagtggaccgggttcgtcgccgtcagcctcttcgagctgtgcttcatccccgtgtccttccccgtgtacgtgtactacttccatttcagctgggtcaccaggatcttcctgttcctgcactcggtcgtgctgctcatgaaagcccactcgttcgccttctacaacggctatctctgggacatcaagaacgagctggagttctcctccaacaaactgaacaagttcaaagagtccctgtcccccgagaccaaagacatcctgcagaaaagctgcgatttctgtcttttcgaactcaactaccagaccaaggacaacgacttccccaacaacatcagctgcagcaactacttcatgttctgcatgttccccgtgctcgtgtaccagatcaactacccgcgcacctcgcacatcaggtggagatacgtcctcgagaagttctgcgccatcatgggcaccatcttcctcatgatggtcactgcgcagatcttcatgcacccggtcgccatgcgctgcatcgagtaccacgacacgccctccttcggcggctgggtccccgccgtcaagcagtggctcttcctgctcttcgagatgatcccgggcttcagtgtcctgtacatgctcaccttctacatgatctgggacgccttgctgaactgcgtcgcagaactcaccaggttcgcagacaggtacttctacggtgactggtggaactgcgtctccttcgaggagttcagcagaatctggaacgtccccgtccacaagttcctgctgagacacgtctaccacagctccatgggcgcgctgcacttcagcaaggcccaggccaccctcttcaccttcttgttgagcgccgtgttccacgaaatcgccatgttcgccatcttcaaggaggtcaggggctacctgttcctgttccaattgtcccagtttgcctggaccgccctgagcaacaccaagttcctgcgctctagaccacagttgtccaatgtcgtcttcacattcggtgtctgcacaggccccagcatgatcatgacgctgtacctgactttgtga

SEQ ID NO: 67665 - protein, 623 aa, Saccharomyces bayanus
MTEAKELLQDERFLKIQELNSAEPSKRHSVTYDNVILPQESVEVSPRSSTTSLEEPATTTATGVAVAAAAAAAEKKKKKKGEDGDDEQDEQAEEKYPVDPRMQKYLSHLKSKSRTRVHRKDASKYVSFFGDVSFDPRPTLLDSAVNVPFQTTFKGPVLEKQLKGLQQTKKGEVAAAAATAATAATAAAAPPGKKLESNFSGIYVFAWMFMGWIAFRSCMDYYVSHEGGFASMEIVQYMTSDLFTIALLDLALFLSTFFVVFVHWLVKLGFIRWKWTGFVAVSLFELCFIPVSFPVYVYYFHFSWVTRIFLFLHSVVLLMKAHSFAFYNGYLWDIKNELEFSSNKLNKFKESLSPETKDILQKSCDFCLFELNYQTKDNDFPNNISCSNYFMFCMFPVLVYQINYPRTSHIRWRYVLEKFCAIMGTIFLMMVTAQIFMHPVAMRCIEYHDTPSFGGWVPAVKQWLFLLFEMIPGFSVLYMLTFYMIWDALLNCVAELTRFADRYFYGDWWNCVSFEEFSRIWNVPVHKFLLRHVYHSSMGALHFSKAQATLFTFLLSAVFHEIAMFAIFKEVRGYLFLFQLSQFAWTALSNTKFLRSRPQLSNVVFTFGVCTGPSMIMTLYLTL

SEQ ID NO: 67666 - DNA, 1833 bp, Saccharomyces cerevisiae
  CDS (1)..(1833)
atgacggagactaaggatttgttgcaagacgaagagtttcttaagatccgcagactcaattccgcagaagccaacaaacggcattcggtcacgtacgataacgtgatcctgccacaggagtccatggaggtttcgccacggtcgtctaccacgtcgctggtggagccagtggagtcgactgaaggagtggagtcgactgaggcggaacgtgtggcagggaagcaggagcaggaggaggagtaccctgtggacgcccacatgcaaaagtacctttcacacctgaagagcaagtctcggtcgaggttccaccgaaaggatgctagcaagtatgtgtcgttttttggggacgtgagttttgatcctcgccccacgctcctggacagcgccatcaacgtgcccttccagacgactttcaaaggtccggtgctggagaaacagctcaaaaatttacagttgacaaagaccaagaccaaggccacggtgaagactacggtgaagactacggagaaaacggacaaggcagatgcccccccaggagaaaaactggagtcgaacttttcagggatctacgtgttcgcatggatgttcttgggctggatagccatcaggtgctgcacagattactatgcgtcgtacggcagtgcatggaataagctggaaatcgtgcagtacatgacaacggacttgttcacgatcgcaatgttggacttggcaatgttcctgtgcactttcttcgtggttttcgtgcactggctggtgaaaaagcggatcatcaactggaagtggactgggttcgttgcagtgagcatcttcgagttggctttcatccccgtgacgttccccatttacgtctactactttgatttcaactgggtcacgagaatcttcctgttcctgcactccgtggtgtttgttatgaagagccactcgtttgccttttacaacgggtatctttgggacataaagcaggaactcgagtactcttccaaacagttgcaaaaatacaaggaatctttgtccccagagacccgcgagattctgcaaaaaagttgcgacttttgccttttcgaattgaactaccagaccaaggataacgacttccccaacaacatcagttgcagcaatttcttcatgttctgtttgttccccgtcctcgtgtaccagatcaactacccaagaacgtcgcgcatcagatggaggtatgtgttggagaaggtgtgcgccatcattggcaccatcttcctcatgatggtcacggcacagttcttcatgcacccggtggccatgcgctgtatccagttccacaacacgcccaccttcggcggctggatccccgccacgcaagagtggttccacctgctcttcgacatgattccgggcttcactgttctgtacatgctcacgttttacatgatatgggacgctttattgaattgcgtggcggagttgaccaggtttgcggacagatatttctacggcgactggtggaattgcgtttcgtttgaagagtttagcagaatctggaacgtccccgttcacaaatttttactaagacacgtgtaccacagctccatgggcgcattgcatttgagcaagagccaagctacattatttacttttttcttgagtgccgtgttccacgaaatggccatgttcgccattttcagaagggttagaggatatctgttcatgttccaactgtcgcagtttgtgtggactgctttgagcaacaccaagtttctacgggcaagaccgcagttgtccaacgttgtcttttcgtttggtgtctgttcagggcccagtatcattatgacgttgtacctgaccttatga

SEQ ID NO: 67667 - protein, 610 aa, Saccharomyces cerevisiae
MTETKDLLQDEEFLKIRRLNSAEANKRHSVTYDNVILPQESMEVSPRSSTTSLVEPVESTEGVESTEAERVAGKQEQEEEYPVDAHMQKYLSHLKSKSRSRFHRKDASKYVSFFGDVSFDPRPTLLDSAINVPFQTTFKGPVLEKQLKNLQLTKTKTKATVKTTVKTTEKTDKADAPPGEKLESNFSGIYVFAWMFLGWIAIRCCTDYYASYGSAWNKLEIVQYMTTDLFTIAMLDLAMFLCTFFVVFVHWLVKKRIINWKWTGFVAVSIFELAFIPVTFPIYVYYFDFNWVTRIFLFLHSVVFVMKSHSFAFYNGYLWDIKQELEYSSKQLQKYKESLSPETREILQKSCDFCLFELNYQTKDNDFPNNISCSNFFMFCLFPVLVYQINYPRTSRIRWRYVLEKVCAIIGTIFLMMVTAQFFMHPVAMRCIQFHNTPTFGGWIPATQEWFHLLFDMIPGFTVLYMLTFYMIWDALLNCVAELTRFADRYFYGDWWNCVSFEEFSRIWNVPVHKFLLRHVYHSSMGALHLSKSQATLFTFFLSAVFHEMAMFAIFRRVRGYLFMFQLSQFVWTALSNTKFLRARPQLSNVVFSFGVCSGPSIIMTLYLTL

SEQ ID NO: 67668 - DNA, 1953 bp, Saccharomyces bayanus
  CDS (1)..(1953)
atggacaagaacaaggatctactggagaacgagcagtttctccgcatccaaaaactcaatgccagcgacgccggcaaaagacagtccatactagtggacaacgaggacgagctgtacgggctgacctccagcaacaattcatgtgccagcgaacacgagggcgagggcgagggcgaggacgaacggcctgccactacctcgtccgcgcccacgcagaaccacagcgccggcgacgttgcattcatcccggggaagaccgcagaagaagacacagaaacggtgacgaaggtagtcgaaagcgacgaccaagtgttcaggacgcacgtgcagaccttgagctccaagggcaagtctaggtacagaaagggctcgtccaacttcatctcgtttttcgatgacatggctttcgaaaacaggcccagtatactggacgggtccgtgaacgaccccttcaagaccaaattcgtgggtcccacgttggaaaaggagatcaggaaaagagaaaaggagctcatggccatgcgtaaaaacttgcatcatggcaagcccgctccggacgccgacgcagccgacgcacccgccttgaccaccaccaccaccaccaccacctcggccaccagcccagagacggtcgttaccatcgagaccaccatcctctcttccaacttctccgggctgtacgtggcgttctggatggcaattgcatttggcgctgtgaaggccttgatagactactactaccagcacaacggcagcttcaaggactcagagatcctgaagttcatgaccacaaacctgtccaccgtggctttgatcgaccttataatgtacttgagcacttttttcgtcgttggaatacaatacttgtgtaagtggggggtcctgaattggagctctaccggctgggccttcacctcgatctacgaattactgtttgtcgggttctacatgtacttgacagaaaacattttgaagttgcactggctatccaagatcttcctctttttgcattctttggtcctgttgatgaaaatgcattcgtttgccttttacaatggctacctgtggggcataaagcaggaactccagttttccaaaagtgcactggccaaatacaaggactccgtaaacgatccggatgtcgtggacgctcttgagaaaagttgcgagttctgtagttttgaattgaactcccaatccttgaatgaccagacgcagaaattccccaacaatattaacgtaagcaacttcttcatgttcaccatgttccccacgttaatctaccaaatcgagtatccaagaactaaagaaatcagatgggtttatgtgctagaaaaaatttgcgccatcttcggtaccatcttcctaatgatgatcgatgctcagatcttgatgcaccccgtcgcaatgagggccttggacgtgcgcaattccgaatggaccgggatactggacagactactaaaatgggccggattgctcgtagacattgtccccgggttcatcgtgatgtacatcttggacttctatttgatttgggacgccattttgaattgtgtggctgagttgaccaggttcggtgacaggtacttctatggtgattggtggaattgcgtcagttgggctgacttcagtagaatttggaacatcccagtgcataagtttttgttgaggcatgtttaccacagttccatgagttcgttcaagctaaacaagagccaagcaaccttgatgacctttttcttgagctccgtcgtccacgaattggccatgtacgttatcttcaagagactgagattctacctgttcttcttccaaatgctccaagtgccattggtggccctgaccaacaccaaatacatgaaagacagaaccgttatcgggaacgttattttctggctgggcatttgtatgggacccagtgtcatgtgcacgttgtacttgacattctaa

SEQ ID NO: 67669 - protein, 650 aa, Saccharomyces bayanus
MDKNKDLLENEQFLRIQKLNASDAGKRQSILVDNEDELYGLTSSNNSCASEHEGEGEGEDERPATTSSAPTQNHSAGDVAFIPGKTAEEDTETVTKVVESDDQVFRTHVQTLSSKGKSRYRKGSSNFISFFDDMAFENRPSILDGSVNDPFKTKFVGPTLEKEIRKREKELMAMRKNLHHGKPAPDADAADAPALTTTTTTTTSATSPETVVTIETTILSSNFSGLYVAFWMAIAFGAVKALIDYYYQHNGSFKDSEILKFMTTNLSTVALIDLIMYLSTFFVVGIQYLCKWGVLNWSSTGWAFTSIYELLFVGFYMYLTENILKLHWLSKIFLFLHSLVLLMKMHSFAFYNGYLWGIKQELQFSKSALAKYKDSVNDPDVVDALEKSCEFCSFELNSQSLNDQTQKFPNNINVSNFFMFTMFPTLIYQIEYPRTKEIRWVYVLEKICAIFGTIFLMMIDAQILMHPVAMRALDVRNSEWTGILDRLLKWAGLLVDIVPGFIVMYILDFYLIWDAILNCVAELTRFGDRYFYGDWWNCVSWADFSRIWNIPVHKFLLRHVYHSSMSSFKLNKSQATLMTFFLSSVVHELAMYVIFKRLRFYLFFFQMLQVPLVALTNTKYMKDRTVIGNVIFWLGICMGPSVMCTLYLTF

SEQ ID NO: 67670 - DNA, 24 bp, Artificial sequence
  primer
atggacaagaagaaggatctactg

SEQ ID NO: 67671 - DNA, 25 bp, Artificial sequence
  primer
ttagaatgtcaagtacaacgtacac

SEQ ID NO: 67672 - protein, 718 aa, Artificial sequence
  consensus sequence
  Variant (2)..(6): Xaa in position 2 to 6 is any amino acid
  Variant (9)..(13): Xaa in position 9 to 13 is any amino acid
  Variant (14)..(14): Xaa in position 14 is any or no amino acid
  Variant (16)..(16): Xaa in position 16 is any amino acid
  Variant (18)..(19): Xaa in position 18 to 19 is any amino acid
  Variant (20)..(20): Xaa in position 20 is any or no amino acid
  Variant (22)..(62): Xaa in position 22 to 62 is any amino acid
  Variant (63)..(144): Xaa in position 63 to 144 is any or no amino acid
  Variant (146)..(147): Xaa in position 146 to 147 is any amino acid
  Variant (148)..(148): Xaa in position 148 is any or no amino acid
  Variant (150)..(158): Xaa in position 150 to 158 is any amino acid
  Variant (159)..(159): Xaa in position 159 is any or no amino acid
  Variant (161)..(163): Xaa in position 161 to 163 is any amino acid
  Variant (165)..(169): Xaa in position 165 to 169 is any amino acid
  Variant (171)..(173): Xaa in position 171 to 173 is any amino acid
  Variant (174)..(174): Xaa in position 174 is any or no amino acid
  Variant (176)..(180): Xaa in position 176 to 180 is any amino acid
  Variant (181)..(183): Xaa in position 181 to 183 is any or no amino acid
  Variant (185)..(220): Xaa in position 185 to 220 is any amino acid
  Variant (221)..(256): Xaa in position 221 to 256 is any or no amino acid
  Variant (260)..(260): Xaa in position 260 is any amino acid
  Variant (263)..(264): Xaa in position 263 to 264 is any amino acid
  Variant (266)..(278): Xaa in position 266 to 278 is any amino acid
  Variant (281)..(294): Xaa in position 281 to 294 is any amino acid
  Variant (295)..(295): Xaa in position 295 is any or no amino acid
  Variant (297)..(299): Xaa in position 297 to 299 is any amino acid
  Variant (301)..(306): Xaa in position 301 to 306 is any amino acid
  Variant (308)..(309): Xaa in position 308 to 309 is any amino acid
  Variant (313)..(313): Xaa in position 313 is any amino acid
  Variant (315)..(315): Xaa in position 315 is any amino acid
  Variant (317)..(320): Xaa in position 317 to 320 is any amino acid
  Variant (323)..(323): Xaa in position 323 is any amino acid
  Variant (325)..(330): Xaa in position 325 to 330 is any amino acid
  Variant (332)..(334): Xaa in position 332 to 334 is any amino acid
  Variant (336)..(342): Xaa in position 336 to 342 is any amino acid
  Variant (344)..(361): Xaa in position 344 to 361 is any amino acid
  Variant (362)..(362): Xaa in position 362 is any or no amino acid
  Variant (364)..(366): Xaa in position 364 to 366 is any amino acid
  Variant (374)..(374): Xaa in position 374 is any amino acid
  Variant (376)..(377): Xaa in position 376 to 377 is any amino acid
  Variant (380)..(380): Xaa in position 380 is any amino acid
  Variant (383)..(384): Xaa in position 383 to 384 is any amino acid
  Variant (392)..(392): Xaa in position 392 is any amino acid
  Variant (394)..(395): Xaa in position 394 to 395 is any amino acid
  Variant (398)..(399): Xaa in position 398 to 399 is any amino acid
  Variant (401)..(403): Xaa in position 401 to 403 is any amino acid
  Variant (405)..(405): Xaa in position 405 is any amino acid
  Variant (407)..(418): Xaa in position 407 to 418 is any amino acid
  Variant (419)..(426): Xaa in position 419 to 426 is any or no amino acid
  Variant (428)..(429): Xaa in position 428 to 429 is any amino acid
  Variant (431)..(432): Xaa in position 431 to 432 is any amino acid
  Variant (435)..(436): Xaa in position 435 to 436 is any amino acid
  Variant (439)..(440): Xaa in position 439 to 440 is any amino acid
  Variant (442)..(446): Xaa in position 442 to 446 is any amino acid
  Variant (447)..(474): Xaa in position 447 to 474 is any or no amino acid
  Variant (477)..(477): Xaa in position 477 is any amino acid
  Variant (480)..(482): Xaa in position 480 to 482 is any amino acid
  Variant (484)..(484): Xaa in position 484 is any amino acid
  Variant (486)..(489): Xaa in position 486 to 489 is any amino acid
  Variant (492)..(492): Xaa in position 492 is any amino acid
  Variant (494)..(494): Xaa in position 494 is any amino acid
  Variant (498)..(498): Xaa in position 498 is any amino acid
  Variant (503)..(504): Xaa in position 503 to 504 is any amino acid
  Variant (508)..(508): Xaa in position 508 is any amino acid
  Variant (511)..(511): Xaa in position 511 is any amino acid
  Variant (514)..(514): Xaa in position 514 is any amino acid
  Variant (520)..(520): Xaa in position 520 is any amino acid
  Variant (522)..(523): Xaa in position 522 to 523 is any amino acid
  Variant (525)..(527): Xaa in position 525 to 527 is any amino acid
  Variant (530)..(531): Xaa in position 530 to 531 is any amino acid
  Variant (533)..(533): Xaa in position 533 is any amino acid
  Variant (535)..(556): Xaa in position 535 to 556 is any amino acid
  Variant (557)..(560): Xaa in position 557 to 560 is any or no amino acid
  Variant (563)..(563): Xaa in position 563 is any amino acid
  Variant (565)..(566): Xaa in position 565 to 566 is any amino acid
  Variant (568)..(568): Xaa in position 568 is any amino acid
  Variant (570)..(572): Xaa in position 570 to 572 is any amino acid
  Variant (574)..(574): Xaa in position 574 is any amino acid
  Variant (576)..(576): Xaa in position 576 is any amino acid
  Variant (587)..(588): Xaa in position 587 to 588 is any amino acid
  Variant (592)..(593): Xaa in position 592 to 593 is any amino acid
  Variant (595)..(595): Xaa in position 595 is any amino acid
  Variant (598)..(598): Xaa in position 598 is any amino acid
  Variant (607)..(611): Xaa in position 607 to 611 is any amino acid
  Variant (615)..(615): Xaa in position 615 is any amino acid
  Variant (618)..(618): Xaa in position 618 is any amino acid
  Variant (633)..(639): Xaa in position 633 to 639 is any amino acid
  Variant (641)..(641): Xaa in position 641 is any amino acid
  Variant (644)..(646): Xaa in position 644 to 646 is any amino acid
  Variant (649)..(649): Xaa in position 649 is any amino acid
  Variant (652)..(652): Xaa in position 652 is any amino acid
  Variant (654)..(654): Xaa in position 654 is any amino acid
  Variant (657)..(658): Xaa in position 657 to 658 is any amino acid
  Variant (660)..(661): Xaa in position 660 to 661 is any amino acid
  Variant (664)..(666): Xaa in position 664 to 666 is any amino acid
  Variant (668)..(668): Xaa in position 668 is any amino acid
  Variant (671)..(673): Xaa in position 671 to 673 is any amino acid
  Variant (675)..(676): Xaa in position 675 to 676 is any amino acid
  Variant (678)..(684): Xaa in position 678 to 684 is any amino acid
  Variant (686)..(691): Xaa in position 686 to 691 is any amino acid
  Variant (693)..(696): Xaa in position 693 to 696 is any amino acid
  Variant (698)..(699): Xaa in position 698 to 699 is any amino acid
  Variant (702)..(702): Xaa in position 702 is any amino acid
  Variant (704)..(704): Xaa in position 704 is any amino acid
  Variant (706)..(706): Xaa in position 706 is any amino acid
  Variant (710)..(712): Xaa in position 710 to 712 is any amino acid
  Variant (717)..(717): Xaa in position 717 is any amino acid
FXXXXXLNXXXXXXRXSXXXDXXXXXXXXXXXXXXXXXXXXXXXXXXXXXXXXXXXXXXXXXXXXXXXXXXXXXXXXXXXXXXXXXXXXXXXXXXXXXXXXXXXXXXXXXXXXXXXXXXXXXXXXXXXXXXXXXXXXXXXXXXXKXXXRXXXXXXXXXXSXXXDXXXXXRXXXXDXXXXXXXXPXXXXXXXXXXXXXXXXXXXXXXXXXXXXXXXXXXXXXXXXXXXXXXXXXXXXXXXXXXXXXXXXXXXXXXXXFSGXYVXXWXXXXXXXXXXXXXYYXXXXXXXXXXXXXXXMXXXLXXXXXXDXXMYLXTXFXXXXQYXCXXXXXXWXXXGXXXXXXXEXXXXXXXXXXXXXXXXXXXWXXXIFLFLHSXVXXMKXHSXXFYNGYLWXIXXELXXSXXXLXKXXXXXXXXXXXXXXXXXXXXLXXSXXFCXXELXXQXXXXXXXXXXXXXXXXXXXXXXXXXXXXXXXXXFPXNIXXXNXFXXXXFPXLXYQIXYPRTXXIRWXYVXEKXCAIFGXIXXMXXXAQXXMXPXXXXXXXXXXXXXXXXXXXXXXXXXXLLXDXXPXFXXXYXLXFYLIWDAILNXXAELXXFXDRXFYGDWWNCXXXXXFSRXWNXPVHKFLLRHVYHSSXXXXXXXKXQAXXXTFXLSXVXHEXXMXXIFXXXRXYLXXXQXXQXXXXXXXNXXXXXXRXXXXNXXFWXGXCXGPSXXXTLYLXF

SEQ ID NO: 67673 - protein, 62 aa, Artificial sequence
  protein pattern
  Variant (2)..(2): Xaa in position 2 is Ala, Asp, Thr or Val
  Variant (3)..(3): Xaa in position 3 is Phe or Trp
  Variant (5)..(5): Xaa in position 5 is Leu or Met
  Variant (8)..(8): Xaa in position 8 is Asp or Glu
  Variant (10)..(10): Xaa in position 10 is Ile or Leu
  Variant (13)..(13): Xaa in position 13 is any amino acid
  Variant (14)..(14): Xaa in position 14 is Phe, Ile or Val
  Variant (18)..(18): Xaa in position 18 is Ser or Thr
  Variant (19)..(19): Xaa in position 19 is any amino acid
  Variant (21)..(21): Xaa in position 21 is Ala or Gly
  Variant (23)..(23): Xaa in position 23 is any amino acid
  Variant (24)..(25): Xaa in position 24 to 25 is any or no amino acid
  Variant (27)..(27): Xaa in position 27 is any amino acid
  Variant (28)..(29): Xaa in position 28 to 29 is any or no amino acid
  Variant (35)..(35): Xaa in position 35 is Cys or Val
  Variant (36)..(36): Xaa in position 36 is Asp or Ser
  Variant (37)..(37): Xaa in position 37 is Phe or Trp
  Variant (38)..(38): Xaa in position 38 is any amino acid
  Variant (39)..(39): Xaa in position 39 is Asp or Glu
  Variant (43)..(43): Xaa in position 43 is Ile or Leu
  Variant (46)..(46): Xaa in position 46 is any amino acid
  Variant (50)..(50): Xaa in position 50 is any amino acid
  Variant (52)..(52): Xaa in position 52 is Ile or Leu
  Variant (53)..(53): Xaa in position 53 is Leu or Val
  Variant (56)..(56): Xaa in position 56 is Ile or Val
  Variant (60)..(60): Xaa in position 60 is Ser or Val
  Variant (61)..(61): Xaa in position 61 is Ile or Met
  Variant (62)..(62): Xaa in position 62 is Gly, Asn or Ser
LXXYXIWXAXLNXXAELXXFXDXXXYXXXDWWNCXXXXXFSRXWNXPVHXFXXRHXYHSXXX

SEQ ID NO: 67674 - protein, 61 aa, Artificial sequence
  protein pattern
  Variant (3)..(3): Xaa in position 3 is any or no amino acid
  Variant (5)..(5): Xaa in position 5 is any or no amino acid
  Variant (7)..(7): Xaa in position 7 is Asn, Ser or Thr
  Variant (8)..(9): Xaa in position 8 to 9 is any amino acid
  Variant (10)..(10): Xaa in position 10 is Asn or Ser
  Variant (11)..(11): Xaa in position 11 is Phe or Tyr
  Variant (13)..(13): Xaa in position 13 is any amino acid
  Variant (14)..(14): Xaa in position 14 is Phe or Tyr
  Variant (15)..(15): Xaa in position 15 is Cys, Ser or Thr
  Variant (16)..(16): Xaa in position 16 is Leu or Met
  Variant (19)..(19): Xaa in position 19 is Thr or Val
  Variant (21)..(21): Xaa in position 21 is Ile or Val
  Variant (23)..(23): Xaa in position 23 is Gln or Thr
  Variant (24)..(24): Xaa in position 24 is Ile or Leu
  Variant (25)..(25): Xaa in position 25 is Glu or Asn
  Variant (26)..(26): Xaa in position 26 is Phe or Tyr
  Variant (30)..(30): Xaa in position 30 is any amino acid
  Variant (31)..(31): Xaa in position 31 is Glu, His, Lys or Arg
  Variant (32)..(32): Xaa in position 32 is Ile or Val
  Variant (34)..(35): Xaa in position 34 to 35 is any amino acid
  Variant (37)..(37): Xaa in position 37 is Leu or Val
  Variant (38)..(38): Xaa in position 38 is Phe, Ile or Leu
  Variant (39)..(39): Xaa in position 39 is Glu, Gly or Gln
  Variant (41)..(42): Xaa in position 41 to 42 is any amino acid
  Variant (43)..(43): Xaa in position 43 is Ala or Gly
  Variant (44)..(44): Xaa in position 44 is any amino acid
  Variant (45)..(45): Xaa in position 45 is Phe, Ile or Met
  Variant (47)..(47): Xaa in position 47 is any amino acid
  Variant (49)..(49): Xaa in position 49 is any amino acid
  Variant (50)..(50): Xaa in position 50 is Ile, Leu or Val
  Variant (52)..(52): Xaa in position 52 is Ile, Met or Val
  Variant (53)..(54): Xaa in position 53 to 54 is any amino acid
  Variant (56)..(56): Xaa in position 56 is Asp, Glu or Gln
  Variant (57)..(58): Xaa in position 57 to 58 is any amino acid
  Variant (59)..(59): Xaa in position 59 is Leu or Met
  Variant (60)..(60): Xaa in position 60 is any amino acid
FPXNXIXXXXXFXXXXFPXLXYXXXXPRTXXXRXXYXXXKXXXXXGXIXXMXXXAXXXXXP

SEQ ID NO: 67675 - protein, 58 aa, Artificial sequence
  protein pattern
  Variant (2)..(2): Xaa in position 2 is any amino acid
  Variant (3)..(4): Xaa in position 3 to 4 is any or no amino acid
  Variant (6)..(8): Xaa in position 6 to 8 is any amino acid
  Variant (9)..(10): Xaa in position 9 to 10 is any or no amino acid
  Variant (12)..(12): Xaa in position 12 is any amino acid
  Variant (13)..(13): Xaa in position 13 is Phe or Tyr
  Variant (14)..(14): Xaa in position 14 is Ile or Leu
  Variant (15)..(15): Xaa in position 15 is Phe, Ile or Leu
  Variant (16)..(16): Xaa in position 16 is any amino acid
  Variant (17)..(17): Xaa in position 17 is Phe, Leu or Met
  Variant (19)..(19): Xaa in position 19 is Leu or Met
  Variant (20)..(20): Xaa in position 20 is any amino acid
  Variant (22)..(22): Xaa in position 22 is Phe, Ile, Leu, Met or Val
  Variant (23)..(23): Xaa in position 23 is any amino acid
  Variant (24)..(24): Xaa in position 24 is Phe or Leu
  Variant (25)..(26): Xaa in position 25 to 26 is any amino acid
  Variant (27)..(27): Xaa in position 27 is Ile, Leu or Met
  Variant (28)..(28): Xaa in position 28 is Cys, Gly, Ser or Thr
  Variant (29)..(29): Xaa in position 29 is Glu, Asn or Arg
  Variant (30)..(32): Xaa in position 30 to 32 is any amino acid
  Variant (33)..(33): Xaa in position 33 is Phe, Leu or Met
  Variant (34)..(34): Xaa in position 34 is Lys or Arg
  Variant (35)..(35): Xaa in position 35 is any amino acid
  Variant (36)..(36): Xaa in position 36 is Lys or Arg
  Variant (37)..(37): Xaa in position 37 is any amino acid
  Variant (38)..(38): Xaa in position 38 is Ile, Leu or Val
  Variant (39)..(39): Xaa in position 39 is Phe, Ile or Leu
  Variant (40)..(40): Xaa in position 40 is Gly, Asn or Ser
  Variant (42)..(42): Xaa in position 42 is Ala, Ile, Leu or Val
  Variant (43)..(44): Xaa in position 43 to 44 is any amino acid
  Variant (46)..(46): Xaa in position 46 is Phe, Ile or Leu
  Variant (47)..(47): Xaa in position 47 is Glu or Gly
  Variant (48)..(48): Xaa in position 48 is Phe, Ile or Met
  Variant (49)..(50): Xaa in position 49 to 50 is any amino acid
  Variant (51)..(51): Xaa in position 51 is Gly or Val
  Variant (54)..(54): Xaa in position 54 is Ile, Leu, Met or Val
  Variant (55)..(57): Xaa in position 55 to 57 is any amino acid
  Variant (58)..(58): Xaa in position 58 is Phe, Ile or Leu
MXXXVXXXXXRXXXXXXQXXQXXXXXXXXXXXXXXXXXXXNXXXWXXXXXXPSXXXXX

SEQ ID NO: 67676 - protein, 49 aa, Artificial sequence
  protein pattern
  Variant (2)..(2): Xaa in position 2 is Ile, Leu or Val
  Variant (3)..(3): Xaa in position 3 is Ala, Gly, Ser or Thr
  Variant (4)..(4): Xaa in position 4 is any amino acid
  Variant (6)..(7): Xaa in position 6 to 7 is any or no amino acid
  Variant (10)..(11): Xaa in position 10 to 11 is any or no amino acid
  Variant (14)..(14): Xaa in position 14 is Leu or Val
  Variant (16)..(16): Xaa in position 16 is any amino acid
  Variant (17)..(17): Xaa in position 17 is Ile, Leu or Val
  Variant (20)..(20): Xaa in position 20 is any amino acid
  Variant (23)..(23): Xaa in position 23 is Phe or Tyr
  Variant (24)..(24): Xaa in position 24 is Ala or Ser
  Variant (32)..(32): Xaa in position 32 is Asp, Glu, Gly, Asn or Ser
  Variant (34)..(34): Xaa in position 34 is any amino acid
  Variant (35)..(35): Xaa in position 35 is Asp, Glu, Asn, Gln or Ser
  Variant (38)..(38): Xaa in position 38 is Asp, Glu, Asn, Gln, Ser or Thr
  Variant (39)..(39): Xaa in position 39 is Phe or Tyr
  Variant (40)..(40): Xaa in position 40 is Ala or Ser
  Variant (41)..(43): Xaa in position 41 to 43 is any amino acid
  Variant (44)..(44): Xaa in position 44 is Leu or Val
  Variant (45)..(47): Xaa in position 45 to 47 is any amino acid
  Variant (48)..(48): Xaa in position 48 is Lys or Arg
  Variant (49)..(49): Xaa in position 49 is Asp, Glu or Lys
WXXXIXXFLXXHSXVXXMKXHSXXFYNGYLWXIXXELXXXXXXXXXXXX

SEQ ID NO: 67677 - protein, 42 aa, Artificial sequence
  protein pattern
  Variant (2)..(7): Xaa in position 2 to 7 is any amino acid
  Variant (8)..(8): Xaa in position 8 is any or no amino acid
  Variant (10)..(11): Xaa in position 10 to 11 is any amino acid
  Variant (12)..(13): Xaa in position 12 to 13 is any or no amino acid
  Variant (15)..(16): Xaa in position 15 to 16 is any amino acid
  Variant (17)..(17): Xaa in position 17 is Asp or Asn
  Variant (19)..(24): Xaa in position 19 to 24 is any amino acid
  Variant (26)..(27): Xaa in position 26 to 27 is any amino acid
  Variant (28)..(28): Xaa in position 28 is Leu or Met
  Variant (29)..(29): Xaa in position 29 is Phe or Tyr
  Variant (30)..(30): Xaa in position 30 is any amino acid
  Variant (31)..(31): Xaa in position 31 is Ala, Cys, Asp, Ser or Thr
  Variant (32)..(32): Xaa in position 32 is any amino acid
  Variant (33)..(33): Xaa in position 33 is Phe or Tyr
  Variant (34)..(34): Xaa in position 34 is Phe, Ile or Leu
  Variant (35)..(35): Xaa in position 35 is any amino acid
  Variant (36)..(36): Xaa in position 36 is Phe, Leu or Val
  Variant (37)..(37): Xaa in position 37 is any amino acid
  Variant (38)..(38): Xaa in position 38 is Ile or Val
  Variant (39)..(39): Xaa in position 39 is any amino acid
  Variant (40)..(40): Xaa in position 40 is Trp or Tyr
  Variant (41)..(41): Xaa in position 41 is any amino acid
  Variant (42)..(42): Xaa in position 42 is Cys or Val
GXXXXXXXIXXXXMXXXLXXXXXXDXXXXXXXXXXXXXXXXX

SEQ ID NO: 67678 - protein, 16 aa, Artificial sequence
  protein pattern
  Variant (2)..(2): Xaa in position 2 is Asp, Glu or Gln
  Variant (3)..(3): Xaa in position 3 is any amino acid
  Variant (5)..(6): Xaa in position 5 to 6 is any amino acid
  Variant (9)..(10): Xaa in position 9 to 10 is any amino acid
  Variant (12)..(12): Xaa in position 12 is Ile or Leu
  Variant (13)..(14): Xaa in position 13 to 14 is any amino acid
  Variant (16)..(16): Xaa in position 16 is Ser or Thr
LXXSXXFCXXEXXXQX

SEQ ID NO: 67679 - protein, 21 aa, Artificial sequence
  protein pattern
  Variant (2)..(4): Xaa in position 2 to 4 is any or no amino acid
  Variant (6)..(6): Xaa in position 6 is Phe, Ile or Leu
  Variant (9)..(10): Xaa in position 9 to 10 is any amino acid
  Variant (12)..(12): Xaa in position 12 is Phe, Leu or Met
  Variant (13)..(14): Xaa in position 13 to 14 is any amino acid
  Variant (15)..(15): Xaa in position 15 is Ala or Gly
  Variant (16)..(20): Xaa in position 16 to 20 is any amino acid
  Variant (21)..(21): Xaa in position 21 is Ala, Cys, Asn, Ser or Val
SXXXGXYVXXWXXXXXXXXXX

SEQ ID NO: 67680 - protein, 18 aa, Artificial sequence
  protein pattern
  Variant (2)..(2): Xaa in position 2 is Met or Val
  Variant (3)..(3): Xaa in position 3 is Ala, Asp, Glu or Ser
  Variant (4)..(4): Xaa in position 4 is Phe or Trp
  Variant (5)..(5): Xaa in position 5 is Asp, Glu, Gly or Asn
  Variant (6)..(6): Xaa in position 6 is any amino acid
  Variant (8)..(8): Xaa in position 8 is Gly or Pro
  Variant (9)..(9): Xaa in position 9 is Ser or Thr
  Variant (10)..(10): Xaa in position 10 is Ile or Leu
  Variant (11)..(11): Xaa in position 11 is Phe, Leu or Met
  Variant (13)..(14): Xaa in position 13 to 14 is any amino acid
  Variant (15)..(15): Xaa in position 15 is Ile or Val
  Variant (16)..(16): Xaa in position 16 is Asp, Asn or Ser
  Variant (17)..(17): Xaa in position 17 is any amino acid
  Variant (18)..(18): Xaa in position 18 is Ile or Pro
DXXXXXRXXXXDXXXXXX

SEQ ID NO: 67681 - protein, 28 aa, Artificial sequence
  protein pattern
  Variant (2)..(3): Xaa in position 2 to 3 is any amino acid
  Variant (4)..(7): Xaa in position 4 to 7 is any or no amino acid
  Variant (9)..(9): Xaa in position 9 is Ile or Leu
  Variant (10)..(10): Xaa in position 10 is Lys or Arg
  Variant (11)..(11): Xaa in position 11 is Ile or Val
  Variant (12)..(12): Xaa in position 12 is Gln or Arg
  Variant (13)..(13): Xaa in position 13 is Glu, Lys or Arg
  Variant (16)..(20): Xaa in position 16 to 20 is any amino acid
  Variant (21)..(21): Xaa in position 21 is any or no amino acid
  Variant (23)..(23): Xaa in position 23 is any amino acid
  Variant (25)..(25): Xaa in position 25 is Ile, Leu or Val
  Variant (26)..(27): Xaa in position 26 to 27 is any amino acid
  Variant (28)..(28): Xaa in position 28 is Asp, Glu or Pro
DXXXXXXFXXXXXLNXXXXXXRXSXXXX

SEQ ID NO: 67682 - protein, 15 aa, Artificial sequence
  protein pattern
  Variant (2)..(2): Xaa in position 2 is any or no amino acid
  Variant (4)..(4): Xaa in position 4 is any or no amino acid
  Variant (6)..(6): Xaa in position 6 is Ala, Ser or Thr
  Variant (7)..(7): Xaa in position 7 is Ile, Leu or Val
  Variant (8)..(8): Xaa in position 8 is any amino acid
  Variant (11)..(11): Xaa in position 11 is Phe or Leu
  Variant (12)..(12): Xaa in position 12 is Ile or Leu
  Variant (14)..(14): Xaa in position 14 is Ala or Ser
  Variant (15)..(15): Xaa in position 15 is Leu or Val
KXQXAXXXTFXXSXX

SEQ ID NO: 67683 - protein, 14 aa, Artificial sequence
  protein pattern
  Variant (3)..(3): Xaa in position 3 is any or no amino acid
  Variant (5)..(5): Xaa in position 5 is Ile, Leu or Met
  Variant (6)..(6): Xaa in position 6 is Ala, Ile or Val
  Variant (8)..(8): Xaa in position 8 is Gly, Pro or Ser
  Variant (10)..(10): Xaa in position 10 is any amino acid
  Variant (11)..(13): Xaa in position 11 to 13 is any or no amino acid
LLXDXXPXFXXXXM

SEQ ID NO: 67684 - DNA, 3306 bp, Saccharomyces cerevisiae
  CDS (1)..(3306)
atgacatacccggttagtgcagccgctcctgccgacatttcatattctaaaaataccccgttggtagggctctctaaacctccatgcttgtaccaacacgcttcctcgtccgtcgattcgttttcgtcaacattcagtgatgatgatcgttcggaccttgttgctgtacctaatgagtcgccgcatgcattttcgtataatcccatatcaccaaactcactgggagtaaggttgaccatcttaagaaggtctttggaaataatggtaaacagtcctgacatcttacatgagttgaagaaaaaagcacccgtaatagcataccccccctcacttagacacacaagaaacttaacagagactgccacgttatcagcatcgcgagatccgttaaatgggtctctaatttcaccattagtatccaatatgccatctcctgctagtagacccgtgatacagagagcaacgtccttaatggtgttgcctgataatgatactgccagtaaactgaatccagccaagtccgagttagaaaacttgttattcttgctaaatttagcattggaaaacaattccttcgaaagagcttccgatttacacatgctatcgttattgaatatcaagaaaataaactttgattcagacattcaaaaatcagaaactttgaaaaaggttttattagatagtttagcagaaccattttttgaaaactacaagaagttccctcacaaagatttaggttcgaaatcgcaatataatgaatatgaggagaaacacgatgatatagtctccttagcagacatcaaaccacaacaggactatagccgaattcttcatcctttcacatctgcaaaaaattctggtccagaggccatttttacatgttctcaacaatacccctggaacttcaaagctgccaatgatttggcgtgtctaacgttcggtatatcaaagaatgttatcaaggcacttactttactagaccttattcatacggatagcagaaattttgttctagagaaaatcatgaatgcagaagatgataaccaagaaattgtgtttaccggagaaactatacctatcgtccagccaaattcgacaagcaataataatgtaccaaatctgatttgggcttcactatgggccaagcggaagaatggcctactggtctgcgtatttgaaaaaacgccttgcgattacattgacgtcatgttaaacttgagagatttttcagtggacagcattattgatacaacacactttctggaaaactttgacaagaaaaagcagcaagaatcaacttcgccaatgacagaaaagaaaacggtaaaatttgcaaatgaaattcacgatattgggtcagtaagtcactcactgagtaaactaattgatgatgtacgttttggaaaagtgttttctgcagatgatgatttattacccttgtctatcagggtggcaaatcatgtcaacgaagagagatattttacgttgaattgtctatctgaaaatataccatgtgctgttacaacttccgtattggaaaacgaaataaaattaaaaattcatagtttgccctatcaggctgggctatttattgttgacagtcacactttaagtcttttaagtttcaacaaatcagtcgccaaaaacatgtttggcttgcgacttcacgagttggccggtagttcggttactaagttggttccttctttggcggacatgatatcttatatcaataaaacttatcctatgttaaatatcacattaccagaaaataaaggattggttttaacagaacattttttcagaaaaattgaggctgaaatgcatcatgataaggactcgttttacacttctattggtctagacggctgtcacaaagatggtaatttgataaaggtggatgttcaattacgggtcttgaatacgaatgctgtattattatggattacacactcaagagacgtggtcattgaaaattataccaccgttccttcgcagctaccgatgttaaaggagaacgaaattgatgtcgttggcagtagaggtagttccagtgcatcttccaagaaatcttcggaaaaaattcctgtgaatactttgaaggcaatggctgatctgtcgattagctccgctgaaacgatttctaattcagacgatgaagtagacttaaatcaagtgaatgaaaaactacgagaaacttcttgcggtaaagtgagaggtatcgaatctaatgacaacaataactatgacgatgacatgacaatggttgatgatcctgagttaaaacataaaattgaattaacgaaaatgtacacgcaggacaaatcaaaatttgtaaaggacgacaactttaaagtggatgaaaaatttataatgaggataattgaaccgataaacggagaagaaatcaaaaaggaaacaaatgagctagacaaaagaaattctactttaaaagctacgtacttgactactccagaggctaatataggctcacaaaagcgcataaagaaattttctgattttactattctgcaagtgatgggtgagggtgcgtacggtaaagtcaatttatgcattcataacagagaacactatatcgtggtcatcaaaatgattttcaaagagaggattttagtagacacatgggtgagagatagaaaattaggtactataccttctgagatccaaattatggcgaccttgaataaaaattcccaagaaaatatcttgaagttattagatttttttgaagatgacgattattattacattgaaacaccggtccatggagaaactggtagtattgatctatttgatgttatcgaattcaaaaaagatatggttgaacatgaagctaaactggtgtttaaacaggtagtcgctagtataaagcatttacatgaccaaggaattgttcatagagacataaaggacgaaaatgttattgttgattctcatggctttgtaaaattaatcgatttcggttcggctgcctatatcaagagtggaccattcgatgtttttgtgggaacaatggactatgctgcacctgaagtccttggtggttcctcttacaaaggtaaaccacaagatatttgggctcttggtgtgctactttataccataatttataaagagaatccttattacaacattgatgaaatcttggaaggtgaattaaggttcgataaatcggaacatgtcagtgaagaatgcatcagtttgataaaaagaattttgacaagagaagttgataaaagacctactattgatgaaatatatgaagataaatggcttaaaatctag

SEQ ID NO: 67685 - protein, 1101 aa, Saccharomyces cerevisiae
MTYPVSAAAPADISYSKNTPLVGLSKPPCLYQHASSSVDSFSSTFSDDDRSDLVAVPNESPHAFSYNPISPNSLGVRLTILRRSLEIMVNSPDILHELKKKAPVIAYPPSLRHTRNLTETATLSASRDPLNGSLISPLVSNMPSPASRPVIQRATSLMVLPDNDTASKLNPAKSELENLLFLLNLALENNSFERASDLHMLSLLNIKKINFDSDIQKSETLKKVLLDSLAEPFFENYKKFPHKDLGSKSQYNEYEEKHDDIVSLADIKPQQDYSRILHPFTSAKNSGPEAIFTCSQQYPWNFKAANDLACLTFGISKNVIKALTLLDLIHTDSRNFVLEKIMNAEDDNQEIVFTGETIPIVQPNSTSNNNVPNLIWASLWAKRKNGLLVCVFEKTPCDYIDVMLNLRDFSVDSIIDTTHFLENFDKKKQQESTSPMTEKKTVKFANEIHDIGSVSHSLSKLIDDVRFGKVFSADDDLLPLSIRVANHVNEERYFTLNCLSENIPCAVTTSVLENEIKLKIHSLPYQAGLFIVDSHTLSLLSFNKSVAKNMFGLRLHELAGSSVTKLVPSLADMISYINKTYPMLNITLPENKGLVLTEHFFRKIEAEMHHDKDSFYTSIGLDGCHKDGNLIKVDVQLRVLNTNAVLLWITHSRDVVIENYTTVPSQLPMLKENEIDVVGSRGSSSASSKKSSEKIPVNTLKAMADLSISSAETISNSDDEVDLNQVNEKLRETSCGKVRGIESNDNNNYDDDMTMVDDPELKHKIELTKMYTQDKSKFVKDDNFKVDEKFIMRIIEPINGEEIKKETNELDKRNSTLKATYLTTPEANIGSQKRIKKFSDFTILQVMGEGAYGKVNLCIHNREHYIVVIKMIFKERILVDTWVRDRKLGTIPSEIQIMATLNKNSQENILKLLDFFEDDDYYYIETPVHGETGSIDLFDVIEFKKDMVEHEAKLVFKQVVASIKHLHDQGIVHRDIKDENVIVDSHGFVKLIDFGSAAYIKSGPFDVFVGTMDYAAPEVLGGSSYKGKPQDIWALGVLLYTIIYKENPYYNIDEILEGELRFDKSEHVSEECISLIKRILTREVDKRPTIDEIYEDKWLKI

SEQ ID NO: 67686 - DNA, 3621 bp, Candida glabrata CBS 138
  CDS (1)..(3621)
atgccatacgcagggacttcagactcgtctagagctgctttcaaggcgtttcaagagaagcatatcaccaaggataccatatttaataagaagtttgatcttgcgtcgataccgtcatctgcatctgcgtccgatacatctttgagtttcaagaatataagccgaggtaactcctatgtggatcttcaaaggcctagtcctttttataggcatgagaatggatcttcggaatcagttaaaagtagctcagaaaaatttgactacaaagagcttatatcacttcctaatgagtctacacatgcatactcatgtaatcctttgtctccgatttcgctgtacgttagactatctatcctaaagagagctttagatatcatggctaatgaccccgatatgctagaagagagtaaagcggtagagcctttaaagagaatgaaggcatctaatacagcagatgttacccatgtagcacacttgcaggaaatgattaatgagaaaaataatgaagaggacatggtaactttgccaaagagagggagtgttaccaaatggaactctcatgcagctactttagaggcatttgtatcgaatagcatggataaaagtgctcaacctaatagcaaatatggggatctcacaaatgaagattcacaaatcccagaaaggccagtgcaaatgcaaagagcggtatcattggcagttttaccgcagagtatatctaatcatagcaataattcaccgttcaaaaaggattttaattttcgtgggacccaatctggcactaaattcagacataataaagacatattggaaggtttacgaaaacttttggatgatacattagaaaaaaaatcaatgagcaacgcatcaaagttgcataaattatcactcttaaatattgacaagttggacctgacttcggtaccaacagatggcaatgatgatacaatcaatgatgtggaagaaaaagggaacaagttaaaacgggctttactagacagtttagccgaacccttcattgaatttggtcgtgaaaacgataatatgcaggacgatcaatataaaaaattaaatgaacaagatctgaatatcaacatgtctgaagtggtacggcaatatcgctataataaagtgttgcatccttttacttcaggaaagaactctgcaccacaagcaatttttacctgttctgatcaacatccctggaactttaaagctgcaaacgatttggcgtgtttgacttttggtattaacaaaaatgtcctgaaagctttaactctccttgatcttattcacacagattgtagaaattttgctctgaataaactcattagtattcaagatgatcaagatattgtttttagtggggaaattatagccatagtacaacctaattcagaaaataaggctggattgatatgggcaaccatttgggcaagaagaataaaaggttccttggtttgtgtttttgagaagattccatgtgattacgcagatattatgttaaatttagatgacttttccgttgaaaacattaacgattctaccggtttgctttccaaccttgaccaaaatacagaaaatgatattacagtaaccgaaagtgatgaattagaaaaaaagaagactgtgaaatttgcaaacgaagtacatgatatcaaaaaagtgagtaagtccttatcgaaactaattaaagacgtatgtacaggaaattatgatatggatgaggatgataagttagtaccactgtcaattcgggtatcgaatgagattaatagaagaagatactttacattaaatcattcaaattataacatatcatgtgctgtatcctcgtctgtgttggaaaatgagctaaaactgaagattcatagtgccgcttatcaagttggtttgttcattattgaaagagaaactttgaagcttgtttcttgtaacaaatcaatctgcaagaatatgtttggttatcatacttctgaaattatcaactctgatattactaccttgattcctgatctcgccaaaattcttgcctttattcaatatcagtatccgattttagacttcagtgctgaagagaacagaggattggttcttactgagcattttttcagaaagattgtttctgaaatgcattctgatcctggaagcttttactcttctgttgggttggatgggcttcataaagacggaaataacattaaggttgattttcaaattagagtattggatgaaaatatctttctattatggatttctcaaacaagagacctgttatttgaaaattatgattcgaatccttctcagctaagcatgttgaaagagagtgaactttcactagttagcagtagaagtagttcgtcgtcctcaaagaggccaactgaatgtttagcgttatctgcgctaaagagaattgatagcttggctattgctgatcaaggtatagaagatgaaacttgtgagcataatgaaaacagatgtaattctatcgaaaaacagtccgtggctatttctaatagtaataaagaagcacatccaccaaaaaatagtgaactaaaaaatactgtcgatattattgataatgatctgatttctgatcctacaatcagagcaaatatcgaattggctagaagatatacaaataacaaatcagattttgtcaaggaagataattttaaacttgatgaagaaatgataaagaaaattgtaaacacggagattccagaggtggctaatgctgactctaacttagcgccggaagaactcttgaaggtgttgaacataaaagaaccaattgtgattggggcccaaaaaaggaagaaaaagtactccgattttgttgtcctacaaaagatgggagaaggggcatatggaaaagttaacttatgtattcacaaagaaaagaaatatattgttgtgattaagatgattttcaaggaaagaattttggtggacacctgggttagagatagaaaactaggtaccattccatcagaaattcaaatattagcgacaattaataagagacctcacgagaacattcttggtttgttggacttctttgaagatgacgattactactacttagaaactcctcctcacggtcaaactggtagtgtagatttatttgacatcattgagttcaagtcaaacatgactgaatttgaagcaaaattgatctttaagcaaattgttagcggtatcaagcatttgcacgaccaagggattgttcatagagatataaaggatgaaaatgttattgttgactccaagggttttgtaaagttgattgattttggttctgctgcctacgtgaaaagtggtcccttcgatgttttcgttggtactattgactatgctgctccggaggttcttggtggtaatccatatgagggcaaatcgcaagacatatgggccatcggtatcttattgtatactttgatctacaaggaaaatccattttacaatatagatgagatattagaaggagaacttagattcaatgatagcgcggatgttagtcaggaatgtaaagcattgattacaaagatattaaatcgctgtgttcgtaaaaggccaacaattgacgagatttgccaagatgtatggcttcaaatttaa

SEQ ID NO: 67687 - protein, 1206 aa, Candida glabrata CBS 138
MPYAGTSDSSRAAFKAFQEKHITKDTIFNKKFDLASIPSSASASDTSLSFKNISRGNSYVDLQRPSPFYRHENGSSESVKSSSEKFDYKELISLPNESTHAYSCNPLSPISLYVRLSILKRALDIMANDPDMLEESKAVEPLKRMKASNTADVTHVAHLQEMINEKNNEEDMVTLPKRGSVTKWNSHAATLEAFVSNSMDKSAQPNSKYGDLTNEDSQIPERPVQMQRAVSLAVLPQSISNHSNNSPFKKDFNFRGTQSGTKFRHNKDILEGLRKLLDDTLEKKSMSNASKLHKLSLLNIDKLDLTSVPTDGNDDTINDVEEKGNKLKRALLDSLAEPFIEFGRENDNMQDDQYKKLNEQDLNINMSEVVRQYRYNKVLHPFTSGKNSAPQAIFTCSDQHPWNFKAANDLACLTFGINKNVLKALTLLDLIHTDCRNFALNKLISIQDDQDIVFSGEIIAIVQPNSENKAGLIWATIWARRIKGSLVCVFEKIPCDYADIMLNLDDFSVENINDSTGLLSNLDQNTENDITVTESDELEKKKTVKFANEVHDIKKVSKSLSKLIKDVCTGNYDMDEDDKLVPLSIRVSNEINRRRYFTLNHSNYNISCAVSSSVLENELKLKIHSAAYQVGLFIIERETLKLVSCNKSICKNMFGYHTSEIINSDITTLIPDLAKILAFIQYQYPILDFSAEENRGLVLTEHFFRKIVSEMHSDPGSFYSSVGLDGLHKDGNNIKVDFQIRVLDENIFLLWISQTRDLLFENYDSNPSQLSMLKESELSLVSSRSSSSSSKRPTECLALSALKRIDSLAIADQGIEDETCEHNENRCNSIEKQSVAISNSNKEAHPPKNSELKNTVDIIDNDLISDPTIRANIELARRYTNNKSDFVKEDNFKLDEEMIKKIVNTEIPEVANADSNLAPEELLKVLNIKEPIVIGAQKRKKKYSDFVVLQKMGEGAYGKVNLCIHKEKKYIVVIKMIFKERILVDTWVRDRKLGTIPSEIQILATINKRPHENILGLLDFFEDDDYYYLETPPHGQTGSVDLFDIIEFKSNMTEFEAKLIFKQIVSGIKHLHDQGIVHRDIKDENVIVDSKGFVKLIDFGSAAYVKSGPFDVFVGTIDYAAPEVLGGNPYEGKSQDIWAIGILLYTLIYKENPFYNIDEILEGELRFNDSADVSQECKALITKILNRCVRKRPTIDEICQDVWLQI

SEQ ID NO: 67688 - DNA, 3690 bp, Kluyveromyces lactis NRRL Y-1140
  CDS (1)..(3690)
atgccgtttattggtgcttctaccgattcgcgtagtgggtttcatacactgatggaaaaacattcgagagcctcaacaccagtgtcttccacttcaagttttaaacgtgccgccactggcacttcaacggcagagttatcttctgcagatgatgatacacagagtttagcatcattttcgaggcttccgactaccagtgacattattgaacagccagaaccaattaaccaattgaggaaatcatcgacgatatcaactatatcttccatatcgtcatcgtctaacggttctattttcacagattctgatattagagaactcctgaggttcccaaattcttcaacacatgcatattcgtacaacccattatcaccttactcgttgtcggtacggctaacgatattgaaacggtccattgaaattatgatcaataatccttcacttttgagcgattctgatgagcctcatacttttgttaatatcgacgaagctaagaaactaattcctcagaaatctcaactacagacaccggtaccacccaaagtactgcgaaatgcttcatcagctgcattatcggcctttttcaccaacaagaatcaagacttgtctcctgtaaaaactttggttagtttgaactccaaaaattcagcatcgtcaaatcagctcgataaccaacaacaaaaaggccttccgacatctgttaatataatacgatcaagctcaaatcctttggcaacaacttgggagatcggcagtggacaaacaagcgaaaatactagtgcatcttcatccaggagaaattccctcgtttctaatcttcaatcatcgttaaatgatcatctaacgaacaaagcacctccttactatggcgacactgcaactgtcgattatgaagagaagaaaaaatctgatcttgaagcattgctagatttactcaataaagctttgcaaaataatacggatgatgctgcatcaagtcttcacgagatgtcactattcaacattaataaacttgccataccgtcaccacctaacaatggaaatggaagcggtaaatatgttgataatggagcaacaacaaaatatgacatcaattacgacgcacatgatactgcgattaagaaacaattattggagagtttggctcaaccgttccatgaaatttataacacaagggaagctttgatggacgaaaaagatcttgaatttaaagtggaagaatattcaagagatccgaattcgttaataaccggtaatagaattcttcacacattcacgtcccaaaagaattcgtccccaaaggcaatatttacttgttctcagcagcacccttggaagtttagagcagcaaatgaccttgcatgtttgatatttggtatatcaatgaatgcaatgcgtgctctaacattattagatttgattcatagtgatagcagaaactttgttctcaacaaaatcatgactacggaaggtcaagagcaggtatttacaggagaaattgttgggattaagcaaccgggacatgcttcctctggtctaatttggtcatcaatctgggctaaacgtaaaaatggtttaatcgtatgtgtattcgagaaagttccctgtgattacatggatgttctcctaaacttagaagactatagcatcgagaacgttgtgggtggagaaggtttgcagtatgatacaaagaatttctctatgaaagagcctcaggaagttgatggcacaggaaaaaagtcagtaaagttcgaacatcaacttcctgacgttgagtcgattagtaaatctctatggcaggttgtaaaggacgttacttcaggtaagttaatgggaccggacgatgatttactaccaatgccattgagagttgcaaatactataaacgatatcaggtactatacattgaattacttggaatataatattccatgtgcagtttcatgttctatattagataccgaattaaagcttaagatacacagcttgccttatcaaacgggtgtcttcattttgaacttgcacacatatgagatggtctcctttaacaaatcgatatctaaaaacatgtttggtcttcattacgcggaattggtggggaagagcattgaagaagttatcccatcattcccttcgatgattgcttatattaagcgaaactacccacagtgggatattgctttgcctacaaacaagggtttagtgttaacggagcactttttcaggaaaattgattgtgagatgcgaggaaaaggagaggaattctatcactctattggcttgaatgctctacacagagatggatctttcataaaggttgatgtacaattgcgcgttatcagttggaattacatggtgttatggataacttactcaagagatcttttcgggaaaaactattcttcaaatccatctcaattgaagattctcaacgaaaacaatatcaatgttgtcacaagtgccagttcggaaggttcttcaaaaaccaacagtgagaagatttcagtgactgatttcaagcaaatgcatgatgatttggaaaagatgaatctgagtctagaaggaagtactgtcggctcgcatctggagaaaaatccaatggaagaaaagaaggaggaaaacaaagaagttgaagaaacagaagaagttccggacgatgatctggaattgaaagcaaaactagaagttgctaaaaggtttcatcaggacaagtcacagtttgttaaagatgacaatttcaaattagacaaggaacttattgttaatatcacatcagcttctccacctgcacaagatgaccagtacaatatggattctacagcttctgacagttcaattcaaacatccaacacttcgaaatcctacgtgatcggatctcagaaacataccaaaaagttttctgacttccttgttttacagaagatgggagaaggcgcctacggtaaggttgatttatgcatgcacaaaaaggataagtacattgttgtcatcaaacgtatctacaaagaaagaattcttgttgatacctgggttagagatcgaacgttgggaactataccatcggagatccagattatggttacccttaatcggaaacctcatgaaaatatactgaggatcttggatttctttgaagacgatgattactattaccttgagacagaaatgcatggagaaacagggtcgattgatttgtttgatttaatagaacttaaaacgaatatgactgaatttgaagcgaaacttttgttcaagcaagtcgcttctggtatcaaacacctgcacgataatggaatagtccatagagatataaaagatgagaacgtaatcgtggacaacaaggggtttgttaagctaattgattttggatcagctgcttatgtcaaaagtggtccattcgacgttttcgtcggaaccattgattatgctgcaccggaagtattgggaggagagccatatgaaggtaaacctcaagatatatgggcaattggtgtattattgtataccataatttacaaagaaaatccattttacaatatagatgaaattttagacggtgacttgagaattcaatctacacacgaagttagtgccgaatgcgttgctttaataagaaaaatacttaaccggtccgtctcaaaaagaccgaccattgacgacatcatggaagattcgtggcttcaattataa

SEQ ID NO: 67689 - protein, 1229 aa, Kluyveromyces lactis NRRL Y-1140
MPFIGASTDSRSGFHTLMEKHSRASTPVSSTSSFKRAATGTSTAELSSADDDTQSLASFSRLPTTSDIIEQPEPINQLRKSSTISTISSISSSSNGSIFTDSDIRELLRFPNSSTHAYSYNPLSPYSLSVRLTILKRSIEIMINNPSLLSDSDEPHTFVNIDEAKKLIPQKSQLQTPVPPKVLRNASSAALSAFFTNKNQDLSPVKTLVSLNSKNSASSNQLDNQQQKGLPTSVNIIRSSSNPLATTWEIGSGQTSENTSASSSRRNSLVSNLQSSLNDHLTNKAPPYYGDTATVDYEEKKKSDLEALLDLLNKALQNNTDDAASSLHEMSLFNINKLAIPSPPNNGNGSGKYVDNGATTKYDINYDAHDTAIKKQLLESLAQPFHEIYNTREALMDEKDLEFKVEEYSRDPNSLITGNRILHTFTSQKNSSPKAIFTCSQQHPWKFRAANDLACLIFGISMNAMRALTLLDLIHSDSRNFVLNKIMTTEGQEQVFTGEIVGIKQPGHASSGLIWSSIWAKRKNGLIVCVFEKVPCDYMDVLLNLEDYSIENVVGGEGLQYDTKNFSMKEPQEVDGTGKKSVKFEHQLPDVESISKSLWQVVKDVTSGKLMGPDDDLLPMPLRVANTINDIRYYTLNYLEYNIPCAVSCSILDTELKLKIHSLPYQTGVFILNLHTYEMVSFNKSISKNMFGLHYAELVGKSIEEVIPSFPSMIAYIKRNYPQWDIALPTNKGLVLTEHFFRKIDCEMRGKGEEFYHSIGLNALHRDGSFIKVDVQLRVISWNYMVLWITYSRDLFGKNYSSNPSQLKILNENNINVVTSASSEGSSKTNSEKISVTDFKQMHDDLEKMNLSLEGSTVGSHLEKNPMEEKKEENKEVEETEEVPDDDLELKAKLEVAKRFHQDKSQFVKDDNFKLDKELIVNITSASPPAQDDQYNMDSTASDSSIQTSNTSKSYVIGSQKHTKKFSDFLVLQKMGEGAYGKVDLCMHKKDKYIVVIKRIYKERILVDTWVRDRTLGTIPSEIQIMVTLNRKPHENILRILDFFEDDDYYYLETEMHGETGSIDLFDLIELKTNMTEFEAKLLFKQVASGIKHLHDNGIVHRDIKDENVIVDNKGFVKLIDFGSAAYVKSGPFDVFVGTIDYAAPEVLGGEPYEGKPQDIWAIGVLLYTIIYKENPFYNIDEILDGDLRIQSTHEVSAECVALIRKILNRSVSKRPTIDDIMEDSWLQL

SEQ ID NO: 67690 - DNA, 3615 bp, Debaryomyces hansenii CBS767
  CDS (1)..(3615)
atgacaaataggacgaattccgacaccaaaaagaaccacactacgttttacgtaaatgacgatgaagtatcctttgaaaatgaaggaggactggaaagcattgaacgcaaagaaagtgacctaaagatacctaaaagacaagataagacttttaataagccacatggtagcaataataagcaaaatctagttatagatgccgatcaaggctgtatcgagctacggagtcctagcacatccacagcggggacaacggttttattaccaaacaaagaacaatttaatagcattaatgatatattaagattccccattgagtcgacccatgcatattcatacgctcatttatcccccaattcgttagcattgagattgaatgtattgaaaagatcgttggagatcttgaaagatagaccaggcttacttaagttcatgaatctaggaacagataagcaatttggaaaggcaccatctagactagaaaagccaaagattccaaattttggaaatagaatatacagtaatccacatgctagtaatagttcggaattttttaacaacagcgacaaatataaaattcaatcaaatgcatcatctgcagcattatcggaattatttaggccatctatgaaaaggtcagatagtttgccggtaaatcaaatttatgctacaaaagttgatgcagctcaaggtgcagccatccatataaaatcgagcgctagaaaagatcctataattaatgacgattttaaagatattataaccctattagagaatgataatgaagctttgacagagcaaagttttgatacttctgctttgcgcgatttgtcacaagctaccgctaaagatgatcagaagttgaaaaaaagtcttttgaaaaataaattgatatatgcattggcaactccatttgttgaaaattcgtcttcgttgttaggagaccagtatagtttagtggccccacaatttagtgcatcatctacctctttaagctcattaagtaaagtcccatccactccaactacagggagtgcggcaaatagtaatgcaagaccatttcattctatttccctgggaaaacacgctttaccccaatctattttcacagtcgaaacagatagtccatggtctgtcaaagcggcgaatgatttagcgctattaatgtttgggattctgaaaaatatgataaagtcattgaatttgatggacttaatagctcctcaatttagagaatttgtggcagataaattgacaagatcaatggcagacaatattttgaccgactcgaagcatgaacaaggaaacaacggtcgtgatatgcgtgacattatgtttgctggtgaaattgtcgctatcatgagacctggagacaaggattttgcttggacttcagtttgggccaaaaagagaggaaatcttatattttgtacgtttgagcaaattccttgtgacgcattcgatgttgtaattctgtctgataagggtcaagatgaggcttacaacgttgattctattaatgaagttgctggtaaattgatgcgaaatgtagatactggtaaaatgaaggttttatctgatatcagtgagtctatgggctcggatttaagcgatagagacgaaaatgaagaggatgacttaatagacgaatatttatctcatgacataatcgatagtgagaaaatcaataaaacgaggtattatacattgcaattgaagacagacgaaaacattccttgcgccgtaacctcatatcccttagaactaaacgatgataaggatgaagttaagttgaagatacactccttaccatatatcggtggtatgtttgtcatagactcattatcatacaatattatttcatgcaacaacgctattgcaaaaaatttattcggtaaatcctcaatttatttgaaaaataaatcaattaataatttaattcccgattttacagaaatcttgaatatcggtttgaagaatcatggagattcattagacatagttcctggccttgtgttaccagagcatttctttagaaaatttgatgctatacgtaggcattcaagctacaaagaagaaagtgaagaatcgttgttctttagttctcaaggtataagaggtttacatagagatggtaagtctatttgggttgatgtacaattaagagcatcctcaagtgaagcatttgtcgtatggatcacttattcaaggctgacggggacaaaagattctaatatctcgaaggaagttgagaaactaaattcaagtacttcttcactatcgattaaactgatgaatgataaagaaagatttaaaacgagactgctgagtggttatagaaggaatgaagtaaatcttccatcacagttgaaattatttcctcatgatgatctggaaatcttagaatttactccaggtagtggcgatataagtagagaaactagtacaaggcgaccaaaagcaaacacattcgcaattcctataagtgatatgaataaggatttagaaaaagcgatgaacttagataatggtaatagaggacctctgaaaagaaagagaatgacctcaaatactgattcgtcaggttcttatgtgtctagaaaatcaacatcagaatcagccacaatgagcccagatactattgcaacaacagtatacaacgataatgaaggaacaaattcaaatgccattatttcaaatgaaacatatcgcaaatactcagaagaagagatattgaagattgaagatgaaatgcttgaaaataaaaccaaaaattcaacacattggccgacagtcataggagcaaggagaagaactaagaaattttctgaattcaaggtacttaaagaattgggtgaaggcgcttacggtaaagtagtactagctcagcacaaagaagacccagtttatacaataattattaaatgtatagacaaggaaagaattttggttgatacatgggtcagagacaggaaattaggtacaatttgttccgaaattcaaattatggcatttttgaataacgaacctcatgtaaacatcatgagaattattgatttctttgaagattctaaatactattatcttgaaactccactatttggcgatcctcccgctattgatttatttgacttcattgaaattagaaaggatttgagtgagcgtgaatgtcgattcatttttaaacaaatagtactggcaatttatcatttgcataaacatggcatagtacatcgggatattaaagacgagaatgtaattgttgatgaaaatggtgtcgttaagttgatcgattttggtagtgctggttatacgaagctggggccatttgatgtttttgttggtactattgattatgcgtcacctgaagtattacgtggtgaaaaatatgaaggtaagcctcaggacatatgggcattaggaattttgctatacactatgctttatcaagagaaccctttctataatgttgatgaaatcatggaaggtgatttgcgaattccttatgtggtcagtgaaaactccttgaatttgattaaaaagattttggtcagagatataaaaagtagaccgacaattacagatattgtagaggatgtatggttagatatatag

SEQ ID NO: 67691 - protein, 1204 aa, Debaryomyces hansenii CBS767
MTNRTNSDTKKNHTTFYVNDDEVSFENEGGLESIERKESDLKIPKRQDKTFNKPHGSNNKQNLVIDADQGCIELRSPSTSTAGTTVLLPNKEQFNSINDILRFPIESTHAYSYAHLSPNSLALRLNVLKRSLEILKDRPGLLKFMNLGTDKQFGKAPSRLEKPKIPNFGNRIYSNPHASNSSEFFNNSDKYKIQSNASSAALSELFRPSMKRSDSLPVNQIYATKVDAAQGAAIHIKSSARKDPIINDDFKDIITLLENDNEALTEQSFDTSALRDLSQATAKDDQKLKKSLLKNKLIYALATPFVENSSSLLGDQYSLVAPQFSASSTSLSSLSKVPSTPTTGSAANSNARPFHSISLGKHALPQSIFTVETDSPWSVKAANDLALLMFGILKNMIKSLNLMDLIAPQFREFVADKLTRSMADNILTDSKHEQGNNGRDMRDIMFAGEIVAIMRPGDKDFAWTSVWAKKRGNLIFCTFEQIPCDAFDVVILSDKGQDEAYNVDSINEVAGKLMRNVDTGKMKVLSDISESMGSDLSDRDENEEDDLIDEYLSHDIIDSEKINKTRYYTLQLKTDENIPCAVTSYPLELNDDKDEVKLKIHSLPYIGGMFVIDSLSYNIISCNNAIAKNLFGKSSIYLKNKSINNLIPDFTEILNIGLKNHGDSLDIVPGLVLPEHFFRKFDAIRRHSSYKEESEESLFFSSQGIRGLHRDGKSIWVDVQLRASSSEAFVVWITYSRLTGTKDSNISKEVEKLNSSTSSLSIKLMNDKERFKTRLLSGYRRNEVNLPSQLKLFPHDDLEILEFTPGSGDISRETSTRRPKANTFAIPISDMNKDLEKAMNLDNGNRGPLKRKRMTSNTDSSGSYVSRKSTSESATMSPDTIATTVYNDNEGTNSNAIISNETYRKYSEEEILKIEDEMLENKTKNSTHWPTVIGARRRTKKFSEFKVLKELGEGAYGKVVLAQHKEDPVYTIIIKCIDKERILVDTWVRDRKLGTICSEIQIMAFLNNEPHVNIMRIIDFFEDSKYYYLETPLFGDPPAIDLFDFIEIRKDLSERECRFIFKQIVLAIYHLHKHGIVHRDIKDENVIVDENGVVKLIDFGSAGYTKLGPFDVFVGTIDYASPEVLRGEKYEGKPQDIWALGILLYTMLYQENPFYNVDEIMEGDLRIPYVVSENSLNLIKKILVRDIKSRPTITDIVEDVWLDI

SEQ ID NO: 67692 - DNA, 3972 bp, Candida albicans SC5314
  CDS (1)..(3972): transl_table=12
atgacttcaaaccggccgccaccaccatcactcctgtttttcatagaagacaatcccactgcacaacaaccacaggaacaccatcagcaatcccttttaaatcctaatgcatctgcaaatcgtccaccaataaaatgtactactactaattctagatttaatctgcaatcacaattgcgatatgagtcaaatgcccggccaaatcgttcttctcccttgtttacgtcatcccccacttttgccaactataataataaacctcctacccccagtgccaatggcgatgacaatggtaatagcgatattgaggatatattaaagtttcctatagagtcatcccatgcatattcatatgctcatttatcaccaaactctttagcattgagattaaatgtgttgaagcgatctttggaaattctaaaggaccgtcctgaattattcaagtcattgacaactactaatagtgcaaccaatagccctgttcagtctagtgctccacctactgctactagcataaacatctcaattgatgaagcatccccacttttccgatcagcttcacatccagttgaaatcgatactaatatgtcaactgaggatttatcactacaacctccaccattaagaaagacattatacatgcagaccaatcatagttctgattatatacatgacgtttcaggtgcatcttcgttgtctgctaatgaacacaagaactataaattgcgttctaatgcctcgtcagctgcattagctgcattgtttagacctactatgaaaagatcagatagtttgccattaaataacaatactagtattccagttacaggacgcagagtttccacacctccattagtacgcgaattaccaacgtcgcggaaaacctcttcaagcaaaaataaaaatgatgattttaaagacattatagatttattagagaacgatttgagtgcattattagacaattcagaggtagcaaccacattacatgatttatcattgtctacacctgataatttggacgatacaaactctaatcatgatatactaaagcataaattgttgcatgcattggctatgccatttatagagaattcagttcaaccaacttcactcttggaatttgatggaacaagcgatccatctttaaactcctcgcatgtgcgtccttcaaccacagcattaaacctactaaataacaattatgatgagccacctgcaaaaaacagatttaacaacaacaacaataataattttaaaaacagtgctgctagtcgaccattccattctttgttgactactaagcatgcacttcctcagtctgtgtttacagtggataaagatttaccattttcagtcaaagcagcaaatgatttagcatgtttaatgtttggtgtcctgaaaaacactatcaaagccttaactttaatggatttaattgctccacagtttcgagattttgttttgaaaagaatcacgggtgtacaaatcatggaaaacaagaaaaatagagatagaattttgtttgctggtgaaattgttgccattgttagacccggtgaccaaaactattcatggacctcactatgggctaaacgtaaaggaaatttgattatatgtatgtttgaccaaatcccttgtgatgcatttgacgttgtgatactgagtgaaaaagatgttatcgattacaaaatcgattctatcaatgaaatcgctggaagtttaattgaagattatggaattcaaaatctcagcagtttgaatagcttgagttattctttaaataaggaattacttgagttccatcacaacaacgaagcggaacaagatgcaattgatgaaactgaccaaacaaatcataccaataacaccaatcgcgacagttttgatattgacgagtattatgatgaagatattgaattgattaatcaaaccagatactatacattgcaattggaagatgaaaataatgttccatgtgcaataacttcaactccattagaactggaccaagaaaaacacgagattaagttgaaaattcacaccatgccgtacattgctggtatttttgttattgatagtaatgaatacaagatactatcatgtaacaatgccattgctagaaacttatttggcaaatcatttgacgaattagaaaaccatagtatagatgaattgataccaaatttcaccaaaatattacatgctggtattgaagccacttcaaattatgcatatcaattgtctccagggttggttttaccagaacattttttcagaaaatacgatgcatttattaaaaagcaacaaaatcctgagaatgaccaagaatctaaggaaacgatattttttaattcaaaaggtattgaggctgttcatcgtgatgggaaagtggtttacattgatgtgcaagttagagtttcaacgaacaatacgttagtggtctgggttacatattccagaactaacaagaaccgaaccaatatttctgaggaattggacaaattgagctctgcatcaacgtcttcttcgatttctttggcttctagtaataaatcggcagtttccttatcttcaatttcaaaacctcgaacttattcaagtggcctacaacttagtgatttaaaacagcaacaacaaccacagcatctgccgctgctgctgctgcaatttcttaccaaaccttcacagcaacaatcggcaaatctgttacaaaatattggtggccatgaacggaaactaactacaacatctactgttccatcgcaaatgaaattgtttaataatgaaaaagaaaatgatttattagaattctcacctcgtgagattacacgagccctgagtacaagaaaaccaaagaaagaaacttcattgggaattcccttgactagattggacagttatatatatgacaagaatggcagagagcaacaaaatctacaaaggaaagaagaaaagaaaccagcaaaagatcttcaaaatccatcatcggagccaacattatcatctccattggctttgtctagtcaagccgatgatagtgtgaaaacagatttcaacatagttttaaagtatacccaggaagaaatattagagttagagaatgagtcattagaacaaattaaatgtcaatcgtctcattggcccaaagatgtggggactcaaagacgaaccaaaaaattttctgagtttaaagttcttaaagatatgggggaaggtgcttatgggaaagtggtattagctcaacataaacaagatccactttacaaaattattattaaatgtatcaacaaggaaaggattttagttgatacttgggtacgtgatcggaaattagggacaatacctagtgaaattcaaattatggcttatttgaacagtgaacctcatccaaatattatgcgaattattgatttttttgaagattccaaatattattatttagaaacacctatttttggtgatcctccagctattgatttgtttgactttattgaaatcaaaaaagatttgagtgaagttgaatccaaatttatttttaaacaaattgtttcatcaatttatcatttacacaaaaatggaattgttcatcgagatattaaagatgagaacatcattgttgatgaaaagggtgtaatcaaattaattgattttgggtcagcaggatatgttaaacaaggtccatttgatgtatttgttggaacaattgattatgcttcacctgaggttttaggtggagaaaaatacgagggaaaacctcaagatatttgggcattgggaattttgttatacacaatgttatataaagaaaacccattttataatgttgatgaaattatggaaggggatctaagaattccctatgttattagcgaaacaagtttaactttgattaagaaaatcttggttcgtgatgtggatgaaagacccacaattactgatattatggaggatgaatggttacagatctaa

SEQ ID NO: 67693 - protein, 1323 aa, Candida albicans SC5314
MTSNRPPPPSLSFFIEDNPTAQQPQEHHQQSLLNPNASANRPPIKCTTTNSRFNSQSQLRYESNARPNRSSPLFTSSPTFANYNNKPPTPSANGDDNGNSDIEDILKFPIESSHAYSYAHLSPNSLALRLNVLKRSLEILKDRPELFKSLTTTNSATNSPVQSSAPPTATSINISIDEASPLFRSASHPVEIDTNMSTEDLSLQPPPLRKTLYMQTNHSSDYIHDVSGASSLSANEHKNYKLRSNASSAALAALFRPTMKRSDSLPLNNNTSIPVTGRRVSTPPLVRELPTSRKTSSSKNKNDDFKDIIDLLENDLSALLDNSEVATTLHDLSLSTPDNLDDTNSNHDILKHKLLHALAMPFIENSVQPTSLLEFDGTSDPSLNSSHVRPSTTALNLLNNNYDEPPAKNRFNNNNNNNFKNSAASRPFHSLLTTKHALPQSVFTVDKDLPFSVKAANDLACLMFGVSKNTIKALTLMDLIAPQFRDFVLKRITGVQIMENKKNRDRILFAGEIVAIVRPGDQNYSWTSLWAKRKGNLIICMFDQIPCDAFDVVISSEKDVIDYKIDSINEIAGSLIEDYGIQNLSSLNSLSYSLNKELLEFHHNNEAEQDAIDETDQTNHTNNTNRDSFDIDEYYDEDIELINQTRYYTLQLEDENNVPCAITSTPLESDQEKHEIKLKIHTMPYIAGIFVIDSNEYKILSCNNAIARNLFGKSFDELENHSIDELIPNFTKILHAGIEATSNYAYQLSPGLVLPEHFFRKYDAFIKKQQNPENDQESKETIFFNSKGIEAVHRDGKVVYIDVQVRVSTNNTLVVWVTYSRTNKNRTNISEELDKLSSASTSSSISLASSNKSAVSLSSISKPRTYSSGLQLSDLKQQQQPQHSPSSSSQFLTKPSQQQSANSLQNIGGHERKLTTTSTVPSQMKLFNNEKENDLLEFSPREITRASSTRKPKKETSLGIPLTRLDSYIYDKNGREQQNLQRKEEKKPAKDLQNPSSEPTLSSPLALSSQADDSVKTDFNIVLKYTQEEILELENESLEQIKCQSSHWPKDVGTQRRTKKFSEFKVLKDMGEGAYGKVVLAQHKQDPLYKIIIKCINKERILVDTWVRDRKLGTIPSEIQIMAYLNSEPHPNIMRIIDFFEDSKYYYLETPIFGDPPAIDLFDFIEIKKDLSEVESKFIFKQIVSSIYHLHKNGIVHRDIKDENIIVDEKGVIKLIDFGSAGYVKQGPFDVFVGTIDYASPEVLGGEKYEGKPQDIWALGILLYTMLYKENPFYNVDEIMEGDLRIPYVISETSLTLIKKILVRDVDERPTITDIMEDEWLQI

SEQ ID NO: 67694 - DNA, 23 bp, Artificial sequence
  primer
atgacatacccggttagtgcagc

SEQ ID NO: 67695 - DNA, 27 bp, Artificial sequence
  primer
ctagattttaagccatttatcttcata

SEQ ID NO: 67696 - protein, 1303 aa, Artificial sequence
  consensus sequence
  Variant (2)..(8): Xaa in position 2 to 8 is any amino acid
  Variant (10)..(10): Xaa in position 10 is any amino acid
  Variant (13)..(13): Xaa in position 13 is any amino acid
  Variant (19)..(20): Xaa in position 19 to 20 is any amino acid
  Variant (24)..(24): Xaa in position 24 is any amino acid
  Variant (27)..(28): Xaa in position 27 to 28 is any amino acid
  Variant (31)..(32): Xaa in position 31 to 32 is any amino acid
  Variant (40)..(43): Xaa in position 40 to 43 is any amino acid
  Variant (45)..(46): Xaa in position 45 to 46 is any amino acid
  Variant (48)..(56): Xaa in position 48 to 56 is any amino acid
  Variant (57)..(81): Xaa in position 57 to 81 is any or no amino acid
  Variant (83)..(104): Xaa in position 83 to 104 is any amino acid
  Variant (105)..(118): Xaa in position 105 to 118 is any or no amino acid
  Variant (120)..(128): Xaa in position 120 to 128 is any amino acid
  Variant (129)..(143): Xaa in position 129 to 143 is any or no amino acid
  Variant (145)..(162): Xaa in position 145 to 162 is any amino acid
  Variant (163)..(181): Xaa in position 163 to 181 is any or no amino acid
  Variant (183)..(189): Xaa in position 183 to 189 is any amino acid
  Variant (190)..(208): Xaa in position 190 to 208 is any or no amino acid
  Variant (210)..(211): Xaa in position 210 to 211 is any amino acid
  Variant (212)..(213): Xaa in position 212 to 213 is any or no amino acid
  Variant (215)..(243): Xaa in position 215 to 243 is any amino acid
  Variant (245)..(254): Xaa in position 245 to 254 is any amino acid
  Variant (255)..(276): Xaa in position 255 to 276 is any or no amino acid
  Variant (278)..(283): Xaa in position 278 to 283 is any amino acid
  Variant (284)..(284): Xaa in position 284 is any or no amino acid
  Variant (287)..(288): Xaa in position 287 to 288 is any amino acid
  Variant (291)..(292): Xaa in position 291 to 292 is any amino acid
  Variant (295)..(295): Xaa in position 295 is any amino acid
  Variant (298)..(298): Xaa in position 298 is any amino acid
  Variant (300)..(331): Xaa in position 300 to 331 is any amino acid
  Variant (332)..(360): Xaa in position 332 to 360 is any or no amino acid
  Variant (362)..(363): Xaa in position 362 to 363 is any amino acid
  Variant (365)..(369): Xaa in position 365 to 369 is any amino acid
  Variant (371)..(373): Xaa in position 371 to 373 is any amino acid
  Variant (375)..(376): Xaa in position 375 to 376 is any amino acid
  Variant (380)..(384): Xaa in position 380 to 384 is any amino acid
  Variant (387)..(388): Xaa in position 387 to 388 is any amino acid
  Variant (398)..(398): Xaa in position 398 is any amino acid
  Variant (402)..(402): Xaa in position 402 is any amino acid
  Variant (405)..(406): Xaa in position 405 to 406 is any amino acid
  Variant (412)..(412): Xaa in position 412 is any amino acid
  Variant (416)..(419): Xaa in position 416 to 419 is any amino acid
  Variant (421)..(421): Xaa in position 421 is any amino acid
  Variant (425)..(425): Xaa in position 425 is any amino acid
  Variant (427)..(432): Xaa in position 427 to 432 is any amino acid
  Variant (433)..(448): Xaa in position 433 to 448 is any or no amino acid
  Variant (450)..(450): Xaa in position 450 is any amino acid
  Variant (451)..(452): Xaa in position 451 to 452 is any or no amino acid
  Variant (454)..(454): Xaa in position 454 is any amino acid
  Variant (456)..(456): Xaa in position 456 is any amino acid
  Variant (460)..(461): Xaa in position 460 to 461 is any amino acid
  Variant (463)..(464): Xaa in position 463 to 464 is any amino acid
  Variant (466)..(471): Xaa in position 466 to 471 is any amino acid
  Variant (472)..(477): Xaa in position 472 to 477 is any or no amino acid
  Variant (479)..(479): Xaa in position 479 is any amino acid
  Variant (481)..(481): Xaa in position 481 is any amino acid
  Variant (486)..(488): Xaa in position 486 to 488 is any amino acid
  Variant (490)..(491): Xaa in position 490 to 491 is any amino acid
  Variant (493)..(493): Xaa in position 493 is any amino acid
  Variant (496)..(497): Xaa in position 496 to 497 is any amino acid
  Variant (501)..(502): Xaa in position 501 to 502 is any amino acid
  Variant (505)..(515): Xaa in position 505 to 515 is any amino acid
  Variant (516)..(520): Xaa in position 516 to 520 is any or no amino acid
  Variant (522)..(525): Xaa in position 522 to 525 is any amino acid
  Variant (527)..(527): Xaa in position 527 is any amino acid
  Variant (529)..(552): Xaa in position 529 to 552 is any amino acid
  Variant (553)..(556): Xaa in position 553 to 556 is any or no amino acid
  Variant (558)..(566): Xaa in position 558 to 566 is any amino acid
  Variant (567)..(568): Xaa in position 567 to 568 is any or no amino acid
  Variant (570)..(574): Xaa in position 570 to 574 is any amino acid
  Variant (576)..(578): Xaa in position 576 to 578 is any amino acid
  Variant (579)..(599): Xaa in position 579 to 599 is any or no amino acid
  Variant (602)..(603): Xaa in position 602 to 603 is any amino acid
  Variant (606)..(606): Xaa in position 606 is any amino acid
  Variant (609)..(613): Xaa in position 609 to 613 is any amino acid
  Variant (615)..(615): Xaa in position 615 is any amino acid
  Variant (621)..(624): Xaa in position 621 to 624 is any amino acid
  Variant (627)..(627): Xaa in position 627 is any amino acid
  Variant (628)..(632): Xaa in position 628 to 632 is any or no amino acid
  Variant (634)..(634): Xaa in position 634 is any amino acid
  Variant (641)..(641): Xaa in position 641 is any amino acid
  Variant (644)..(645): Xaa in position 644 to 645 is any amino acid
  Variant (647)..(647): Xaa in position 647 is any amino acid
  Variant (649)..(658): Xaa in position 649 to 658 is any amino acid
  Variant (660)..(660): Xaa in position 660 is any amino acid
  Variant (662)..(663): Xaa in position 662 to 663 is any amino acid
  Variant (665)..(665): Xaa in position 665 is any amino acid
  Variant (668)..(668): Xaa in position 668 is any amino acid
  Variant (671)..(674): Xaa in position 671 to 674 is any amino acid
  Variant (677)..(679): Xaa in position 677 to 679 is any amino acid
  Variant (682)..(683): Xaa in position 682 to 683 is any amino acid
  Variant (687)..(707): Xaa in position 687 to 707 is any amino acid
  Variant (708)..(710): Xaa in position 708 to 710 is any or no amino acid
  Variant (715)..(715): Xaa in position 715 is any amino acid
  Variant (722)..(732): Xaa in position 722 to 732 is any amino acid
  Variant (733)..(742): Xaa in position 733 to 742 is any or no amino acid
  Variant (744)..(745): Xaa in position 744 to 745 is any amino acid
  Variant (747)..(747): Xaa in position 747 is any amino acid
  Variant (749)..(752): Xaa in position 749 to 752 is any amino acid
  Variant (754)..(754): Xaa in position 754 is any amino acid
  Variant (757)..(758): Xaa in position 757 to 758 is any amino acid
  Variant (760)..(760): Xaa in position 760 is any amino acid
  Variant (765)..(765): Xaa in position 765 is any amino acid
  Variant (768)..(770): Xaa in position 768 to 770 is any amino acid
  Variant (772)..(775): Xaa in position 772 to 775 is any amino acid
  Variant (779)..(779): Xaa in position 779 is any amino acid
  Variant (782)..(809): Xaa in position 782 to 809 is any amino acid
  Variant (810)..(810): Xaa in position 810 is any or no amino acid
  Variant (812)..(821): Xaa in position 812 to 821 is any amino acid
  Variant (822)..(885): Xaa in position 822 to 885 is any or no amino acid
  Variant (887)..(903): Xaa in position 887 to 903 is any amino acid
  Variant (904)..(905): Xaa in position 904 to 905 is any or no amino acid
  Variant (907)..(926): Xaa in position 907 to 926 is any amino acid
  Variant (927)..(939): Xaa in position 927 to 939 is any or no amino acid
  Variant (941)..(965): Xaa in position 941 to 965 is any amino acid
  Variant (966)..(974): Xaa in position 966 to 974 is any or no amino acid
  Variant (976)..(992): Xaa in position 976 to 992 is any amino acid
  Variant (994)..(1009): Xaa in position 994 to 1009 is any amino acid
  Variant (1010)..(1015): Xaa in position 1010 to 1015 is any or no amino acid
  Variant (1017)..(1026): Xaa in position 1017 to 1026 is any amino acid
  Variant (1027)..(1029): Xaa in position 1027 to 1029 is any or no amino acid
  Variant (1032)..(1032): Xaa in position 1032 is any amino acid
  Variant (1034)..(1034): Xaa in position 1034 is any amino acid
  Variant (1036)..(1036): Xaa in position 1036 is any amino acid
  Variant (1041)..(1041): Xaa in position 1041 is any amino acid
  Variant (1043)..(1043): Xaa in position 1043 is any amino acid
  Variant (1046)..(1047): Xaa in position 1046 to 1047 is any amino acid
  Variant (1057)..(1057): Xaa in position 1057 is any amino acid
  Variant (1059)..(1060): Xaa in position 1059 to 1060 is any amino acid
  Variant (1063)..(1065): Xaa in position 1063 to 1065 is any amino acid
  Variant (1066)..(1066): Xaa in position 1066 is any or no amino acid
  Variant (1068)..(1070): Xaa in position 1068 to 1070 is any amino acid
  Variant (1073)..(1073): Xaa in position 1073 is any amino acid
  Variant (1075)..(1075): Xaa in position 1075 is any amino acid
  Variant (1102)..(1102): Xaa in position 1102 is any amino acid
  Variant (1105)..(1106): Xaa in position 1105 to 1106 is any amino acid
  Variant (1109)..(1109): Xaa in position 1109 is any amino acid
  Variant (1112)..(1115): Xaa in position 1112 to 1115 is any amino acid
  Variant (1121)..(1122): Xaa in position 1121 to 1122 is any amino acid
  Variant (1130)..(1131): Xaa in position 1130 to 1131 is any amino acid
  Variant (1133)..(1136): Xaa in position 1133 to 1136 is any amino acid
  Variant (1142)..(1142): Xaa in position 1142 is any amino acid
  Variant (1145)..(1145): Xaa in position 1145 is any amino acid
  Variant (1147)..(1150): Xaa in position 1147 to 1150 is any amino acid
  Variant (1152)..(1152): Xaa in position 1152 is any amino acid
  Variant (1154)..(1154): Xaa in position 1154 is any amino acid
  Variant (1156)..(1157): Xaa in position 1156 to 1157 is any amino acid
  Variant (1161)..(1161): Xaa in position 1161 is any amino acid
  Variant (1163)..(1164): Xaa in position 1163 to 1164 is any amino acid
  Variant (1166)..(1166): Xaa in position 1166 is any amino acid
  Variant (1170)..(1171): Xaa in position 1170 to 1171 is any amino acid
  Variant (1187)..(1188): Xaa in position 1187 to 1188 is any amino acid
  Variant (1190)..(1190): Xaa in position 1190 is any amino acid
  Variant (1200)..(1200): Xaa in position 1200 is any amino acid
  Variant (1202)..(1202): Xaa in position 1202 is any amino acid
  Variant (1204)..(1204): Xaa in position 1204 is any amino acid
  Variant (1218)..(1218): Xaa in position 1218 is any amino acid
  Variant (1225)..(1226): Xaa in position 1225 to 1226 is any amino acid
  Variant (1237)..(1237): Xaa in position 1237 is any amino acid
  Variant (1239)..(1239): Xaa in position 1239 is any amino acid
  Variant (1244)..(1245): Xaa in position 1244 to 1245 is any amino acid
  Variant (1254)..(1254): Xaa in position 1254 is any amino acid
  Variant (1258)..(1258): Xaa in position 1258 is any amino acid
  Variant (1261)..(1261): Xaa in position 1261 is any amino acid
  Variant (1264)..(1267): Xaa in position 1264 to 1267 is any amino acid
  Variant (1268)..(1269): Xaa in position 1268 to 1269 is any or no amino acid
  Variant (1272)..(1276): Xaa in position 1272 to 1276 is any amino acid
  Variant (1279)..(1279): Xaa in position 1279 is any amino acid
  Variant (1283)..(1283): Xaa in position 1283 is any amino acid
  Variant (1285)..(1285): Xaa in position 1285 is any amino acid
  Variant (1287)..(1288): Xaa in position 1287 to 1288 is any amino acid
  Variant (1293)..(1294): Xaa in position 1293 to 1294 is any amino acid
  Variant (1296)..(1296): Xaa in position 1296 is any amino acid
  Variant (1299)..(1299): Xaa in position 1299 is any amino acid
  Variant (1302)..(1302): Xaa in position 1302 is any amino acid
DXXXXXXXPXESXHAYSYXXLSPXSLXXRLXXLKRSLEIXXXXPXXLXXXXXXXXXXXXXXXXXXXXXXXXXXXXXXXXXXLXXXXXXXXXXXXXXXXXXXXXXXXXXXXXXXXXXXXSXXXXXXXXXXXXXXXXXXXXXXXXNXXXXXXXXXXXXXXXXXXXXXXXXXXXXXXXXXXXXXLXXXXXXXXXXXXXXXXXXXXXXXXXXKXXXXKXXXXXXXXXXXXXXXXXXXXXXXXXXXXXLXXXXXXXXXXXXXXXXXXXXXXXXXXXXXXXXDXXXXXXXLKXXLLXXLAXPFXEXXXXXXXXXXXXXXXXXXXXXXXXXXXXXXXXXXXXXXXXXXXXXXXXXXXXXXXXXXXXXRXXHXXXXXKXXXPXXIFTXXXXXPWXXKAANDLACLXFGIXKNXXKALTLXDLIXXXXRXFVLXKXXXXXXXXXXXXXXXXXXXXXXDXXXIXFXGEIXXIXXPXXXXXXXXXXXXWXSXWAKRXXXLXXCXFEXXPCDXXDVXXXXXXXXXXXXXXXXIXXXXGXLXXXXXXXXXXXXXXXXXXXXXXXXXXXXNXXXXXXXXXXXLXXXXXDXXXXXXXXXXXXXXXXXXXXXXXXINXXRYXTLXXXXXNXIPCAVXXXXLEXXXXXXEXKLKIHSXPYXXGXFXXXXXXXXXXSXNXXIXKNXFGXXXXELXXXSIXXLIPXXXXXXXXXXXXXXXXXXXXXXXXGLVLXEHFFRKXXXXXXXXXXXXXXXXXXXXXFXXSXGXXXXHXDGXXIXVDVQXRVXXXNXXXXWITXSRXXXXXXXXXXXXXXXXXXXXXXXXXXXXXSXXXXXXXXXXXXXXXXXXXXXXXXXXXXXXXXXXXXXXXXXXXXXXXXXXXXXXXXXXXXXXXXXXXXXXXXXXKXXXXXXXXXXXXXXXXXXXIXXXXXXXXXXXXXXXXXXXXXXXXXXXXXXXXXNXXXXXXXXXXXXXXXXXXXXXXXXXXXXXXXXXXSXXXXXXXXXXXXXXXXXIXXXXXXXXXXXXXXXXXXXXXXLXXXXXXXXXXXXXIGXQXRXKKFSXFXVLXXMGEGAYGKVXLXXHKXXXXYXXXIKXIXKERILVDTWVRDRKLGTIPSEIQIMAXLNXXPHXNIXXXXDFFEDXXYYYLETPXXGXXXXIDLFDXIEXKXXXXEXEXKXXFKQXVXXIXHLHXXGIVHRDIKDENVIVDXXGXVKLIDFGSAXYXKXGPFDVFVGTIDYAXPEVLGGXXYEGKPQDIWAXGXLLYTXXYKENPFYNXDEIXEGXLRXXXXXXVSXXXXXLIXKILXRXVXXRPTIXXIXEDXWLXI

SEQ ID NO: 67697 - protein, 59 aa, Artificial sequence
  protein pattern
  Variant (2)..(2): Xaa in position 2 is any amino acid
  Variant (21)..(21): Xaa in position 21 is Cys or Pro
  Variant (27)..(27): Xaa in position 27 is Leu or Met
  Variant (29)..(29): Xaa in position 29 is any amino acid
  Variant (30)..(30): Xaa in position 30 is Ile or Leu
  Variant (32)..(32): Xaa in position 32 is any amino acid
  Variant (33)..(33): Xaa in position 33 is Glu, Asn or Arg
  Variant (34)..(34): Xaa in position 34 is Pro or Ser
  Variant (35)..(36): Xaa in position 35 to 36 is any amino acid
  Variant (39)..(39): Xaa in position 39 is Leu or Met
  Variant (40)..(40): Xaa in position 40 is any amino acid
  Variant (41)..(42): Xaa in position 41 to 42 is Ile or Leu
  Variant (48)..(48): Xaa in position 48 is Asp or Ser
  Variant (49)..(49): Xaa in position 49 is Asp or Lys
  Variant (53)..(53): Xaa in position 53 is Ile or Leu
  Variant (57)..(57): Xaa in position 57 is Ile, Leu, Pro or Val
  Variant (58)..(58): Xaa in position 58 is Phe or His
IXKERILVDTWVRDRKLGTIXSEIQIXAXXNXXXXXNIXXXXDFFEDXXYYYXETPXXG

SEQ ID NO: 67698 - protein, 57 aa, Artificial sequence
  protein pattern
  Variant (5)..(5): Xaa in position 5 is any or no amino acid
  Variant (7)..(7): Xaa in position 7 is any or no amino acid
  Variant (9)..(9): Xaa in position 9 is Phe, Ile or Leu
  Variant (11)..(11): Xaa in position 11 is any amino acid
  Variant (12)..(12): Xaa in position 12 is Asp or Asn
  Variant (13)..(13): Xaa in position 13 is Leu or Met
  Variant (14)..(14): Xaa in position 14 is Ser, Thr or Val
  Variant (16)..(16): Xaa in position 16 is any amino acid
  Variant (18)..(18): Xaa in position 18 is Ala or Ser
  Variant (20)..(20): Xaa in position 20 is Phe or Leu
  Variant (21)..(21): Xaa in position 21 is Ile, Leu or Val
  Variant (25)..(25): Xaa in position 25 is Ile or Val
  Variant (26)..(26): Xaa in position 26 is Ala or Val
  Variant (27)..(27): Xaa in position 27 is Ala or Ser
  Variant (28)..(28): Xaa in position 28 is Gly or Ser
  Variant (30)..(30): Xaa in position 30 is any amino acid
  Variant (34)..(34): Xaa in position 34 is Asp or Lys
  Variant (35)..(35): Xaa in position 35 is Asn or Gln
  Variant (47)..(47): Xaa in position 47 is Ile or Val
  Variant (51)..(51): Xaa in position 51 is Glu, Asn or Ser
  Variant (52)..(52): Xaa in position 52 is His or Lys
  Variant (54)..(54): Xaa in position 54 is Phe or Val
  Variant (55)..(55): Xaa in position 55 is Ile or Val
DLFDXIXEXKXXXXEXEXKXXFKQXXXXIXHLHXXGIVHRDIKDENXIVDXXGXXKL

SEQ ID NO: 67699 - protein, 61 aa, Artificial sequence
  protein pattern
  Variant (2)..(3): Xaa in position 2 to 3 is any amino acid
  Variant (4)..(4): Xaa in position 4 is any or no amino acid
  Variant (6)..(6): Xaa in position 6 is any amino acid
  Variant (7)..(7): Xaa in position 7 is any or no amino acid
  Variant (9)..(9): Xaa in position 9 is any amino acid
  Variant (10)..(10): Xaa in position 10 is Ala or Ser
  Variant (11)..(11): Xaa in position 11 is any amino acid
  Variant (13)..(13): Xaa in position 13 is any amino acid
  Variant (14)..(14): Xaa in position 14 is Ala or Ser
  Variant (15)..(15): Xaa in position 15 is Ile or Val
  Variant (18)..(18): Xaa in position 18 is Cys or Val
  Variant (19)..(19): Xaa in position 19 is Asp or Ser
  Variant (20)..(20): Xaa in position 20 is any amino acid
  Variant (21)..(21): Xaa in position 21 is Asp or Gln
  Variant (22)..(22): Xaa in position 22 is any amino acid
  Variant (24)..(24): Xaa in position 24 is Phe or Trp
  Variant (25)..(25): Xaa in position 25 is any amino acid
  Variant (26)..(26): Xaa in position 26 is Phe or Val
  Variant (27)..(27): Xaa in position 27 is Lys or Arg
  Variant (36)..(36): Xaa in position 36 is any amino acid
  Variant (39)..(39): Xaa in position 39 is Ile or Val
  Variant (40)..(40): Xaa in position 40 is Asn or Ser
  Variant (41)..(41): Xaa in position 41 is any amino acid
  Variant (43)..(43): Xaa in position 43 is Ala, Thr or Val
  Variant (44)..(44): Xaa in position 44 is Ile, Leu or Met
  Variant (45)..(45): Xaa in position 45 is Lys or Arg
  Variant (50)..(50): Xaa in position 50 is Leu or Met
  Variant (54)..(54): Xaa in position 54 is any amino acid
  Variant (55)..(55): Xaa in position 55 is Pro, Ser or Thr
  Variant (56)..(56): Xaa in position 56 is Asp or Gln
  Variant (57)..(57): Xaa in position 57 is any amino acid
  Variant (59)..(59): Xaa in position 59 is Asp or Asn
  Variant (61)..(61): Xaa in position 61 is Ala or Val
HXXXTXXKXXXPXXXFTXXXXXPXXXXAANDLACLXFGXXXNXXXALTLXDLIXXXXRXFX

SEQ ID NO: 67700 - protein, 41 aa, Artificial sequence
  protein pattern
  Variant (3)..(3): Xaa in position 3 is Ala or Ser
  Variant (4)..(4): Xaa in position 4 is Gln or Arg
  Variant (5)..(5): Xaa in position 5 is Lys or Arg
  Variant (6)..(6): Xaa in position 6 is His or Arg
  Variant (7)..(7): Xaa in position 7 is any amino acid
  Variant (10)..(10): Xaa in position 10 is Phe or Tyr
  Variant (12)..(12): Xaa in position 12 is Asp or Glu
  Variant (14)..(14): Xaa in position 14 is any amino acid
  Variant (15)..(15): Xaa in position 15 is Ile or Val
  Variant (17)..(18): Xaa in position 17 to 18 is any amino acid
  Variant (19)..(19): Xaa in position 19 is Leu or Met
  Variant (28)..(28): Xaa in position 28 is Asp, Asn or Val
  Variant (30)..(30): Xaa in position 30 is Ala or Cys
  Variant (31)..(31): Xaa in position 31 is any amino acid
  Variant (33)..(33): Xaa in position 33 is any amino acid
  Variant (34)..(34): Xaa in position 34 is Glu, Lys or Arg
  Variant (35)..(35): Xaa in position 35 is Asp, Glu or Lys
  Variant (36)..(38): Xaa in position 36 to 38 is any amino acid
  Variant (39)..(39): Xaa in position 39 is Thr or Val
  Variant (40)..(40): Xaa in position 40 is Ile or Val
IGXXXXXKKXSXFXXLXXXGEGAYGKVXLXXHXXXXXXXXI

SEQ ID NO: 67701 - protein, 41 aa, Artificial sequence
  protein pattern
  Variant (2)..(2): Xaa in position 2 is Phe or Tyr
  Variant (3)..(3): Xaa in position 3 is any amino acid
  Variant (5)..(6): Xaa in position 5 to 6 is any or no amino acid
  Variant (8)..(10): Xaa in position 8 to 10 is any amino acid
  Variant (11)..(12): Xaa in position 11 to 12 is any or no amino acid
  Variant (14)..(14): Xaa in position 14 is Lys or Arg
  Variant (17)..(18): Xaa in position 17 to 18 is any amino acid
  Variant (19)..(19): Xaa in position 19 is Ile or Val
  Variant (20)..(20): Xaa in position 20 is any amino acid
  Variant (21)..(21): Xaa in position 21 is Ile or Val
  Variant (25)..(25): Xaa in position 25 is Leu or Val
  Variant (27)..(27): Xaa in position 27 is Ala or Val
  Variant (28)..(28): Xaa in position 28 is any amino acid
  Variant (29)..(29): Xaa in position 29 is Asn, Ser or Thr
  Variant (30)..(30): Xaa in position 30 is any amino acid
  Variant (31)..(31): Xaa in position 31 is Glu or Asn
  Variant (32)..(32): Xaa in position 32 is any amino acid
  Variant (33)..(33): Xaa in position 33 is Phe, Leu, Met or Val
  Variant (34)..(35): Xaa in position 34 to 35 is Leu or Val
  Variant (37)..(37): Xaa in position 37 is Ile or Val
  Variant (39)..(39): Xaa in position 39 is His or Tyr
FXXSXXIXXXXXHXDGXXXXXDVQXRXXXXXXXXXWXTXSR

SEQ ID NO: 67702 - protein, 37 aa, Artificial sequence
  protein pattern
  Variant (2)..(2): Xaa in position 2 is any amino acid
  Variant (7)..(7): Xaa in position 7 is Ala or Leu
  Variant (8)..(8): Xaa in position 8 is Ala or Pro
  Variant (10)..(10): Xaa in position 10 is any amino acid
  Variant (11)..(11): Xaa in position 11 is any or no amino acid
  Variant (13)..(13): Xaa in position 13 is any amino acid
  Variant (14)..(14): Xaa in position 14 is any or no amino acid
  Variant (16)..(16): Xaa in position 16 is Ile or Val
  Variant (17)..(17): Xaa in position 17 is Ile, Leu or Val
  Variant (18)..(18): Xaa in position 18 is Asp, Glu or Asn
  Variant (19)..(20): Xaa in position 19 to 20 is any amino acid
  Variant (21)..(21): Xaa in position 21 is Ser or Thr
  Variant (22)..(23): Xaa in position 22 to 23 is any amino acid
  Variant (24)..(24): Xaa in position 24 is Ile, Leu or Met
  Variant (25)..(25): Xaa in position 25 is Ile, Leu or Val
  Variant (27)..(27): Xaa in position 27 is any amino acid
  Variant (29)..(29): Xaa in position 29 is any amino acid
  Variant (30)..(30): Xaa in position 30 is Ala or Ser
  Variant (31)..(31): Xaa in position 31 is Ile or Val
  Variant (32)..(32): Xaa in position 32 is Ala, Cys or Ser
  Variant (35)..(35): Xaa in position 35 is Leu or Met
KXKIHSXXYXXGXXFXXXXXXXXXXSXNXXXXKNXFG

SEQ ID NO: 67703 - protein, 14 aa, Artificial sequence
  protein pattern
  Variant (2)..(2): Xaa in position 2 is Thr or Val
  Variant (5)..(6): Xaa in position 5 to 6 is any amino acid
  Variant (10)..(11): Xaa in position 10 to 11 is any amino acid
  Variant (13)..(13): Xaa in position 13 is Ile or Val
  Variant (14)..(14): Xaa in position 14 is Leu, Met or Val
CXFEXXPCDXXDXX

SEQ ID NO: 67704 - protein, 47 aa, Artificial sequence
  protein pattern
  Variant (2)..(8): Xaa in position 2 to 8 is any amino acid
  Variant (9)..(10): Xaa in position 9 to 10 is any or no amino acid
  Variant (12)..(12): Xaa in position 12 is any amino acid
  Variant (13)..(13): Xaa in position 13 is any or no amino acid
  Variant (16)..(16): Xaa in position 16 is Phe or Tyr
  Variant (19)..(19): Xaa in position 19 is Ala or Asn
  Variant (20)..(20): Xaa in position 20 is any amino acid
  Variant (21)..(21): Xaa in position 21 is Ile or Leu
  Variant (24)..(24): Xaa in position 24 is any amino acid
  Variant (27)..(27): Xaa in position 27 is Ala, Gly or Ser
  Variant (28)..(28): Xaa in position 28 is Leu or Val
  Variant (31)..(31): Xaa in position 31 is Asn or Thr
  Variant (32)..(32): Xaa in position 32 is Ile or Val
  Variant (34)..(34): Xaa in position 34 is Lys or Arg
  Variant (37)..(37): Xaa in position 37 is Ile or Leu
  Variant (40)..(40): Xaa in position 40 is Leu or Met
  Variant (41)..(41): Xaa in position 41 is any amino acid
  Variant (42)..(42): Xaa in position 42 is Asp or Asn
  Variant (43)..(43): Xaa in position 43 is Asn, Arg or Ser
  Variant (45)..(45): Xaa in position 45 is Asp, Glu, Gly or Ser
  Variant (46)..(46): Xaa in position 46 is Ile or Leu
  Variant (47)..(47): Xaa in position 47 is Phe or Leu
DXXXXXXXXXSXXHAXSYXXXSPXSLXXRLXXLXRSXEIXXXXPXXX

SEQ ID NO: 67705 - protein, 30 aa, Artificial sequence
  protein pattern
  Variant (2)..(2): Xaa in position 2 is Ala, Glu or Gln
  Variant (3)..(3): Xaa in position 3 is Glu or Thr
  Variant (4)..(4): Xaa in position 4 is Cys or Ser
  Variant (5)..(5): Xaa in position 5 is any amino acid
  Variant (6)..(6): Xaa in position 6 is Ala, Ser or Thr
  Variant (9)..(9): Xaa in position 9 is any or no amino acid
  Variant (11)..(11): Xaa in position 11 is any or no amino acid
  Variant (14)..(14): Xaa in position 14 is Asn, Thr or Val
  Variant (16)..(16): Xaa in position 16 is any amino acid
  Variant (18)..(18): Xaa in position 18 is Asp, Arg or Ser
  Variant (19)..(19): Xaa in position 19 is Glu or Lys
  Variant (24)..(24): Xaa in position 24 is any or no amino acid
  Variant (26)..(26): Xaa in position 26 is any amino acid
  Variant (27)..(27): Xaa in position 27 is Ile or Met
  Variant (28)..(28): Xaa in position 28 is any amino acid
  Variant (29)..(29): Xaa in position 29 is Asp, Glu or Gln
  Variant (30)..(30): Xaa in position 30 is Asp or Glu
SXXXXXLIXKXILXRXVXXRPTIXDXXXXX

SEQ ID NO: 67706 - protein, 18 aa, Artificial sequence
  protein pattern
  Variant (5)..(5): Xaa in position 5 is Pro or Thr
  Variant (12)..(14): Xaa in position 12 to 14 is any or no amino acid
  Variant (16)..(17): Xaa in position 16 to 17 is any amino acid
  Variant (18)..(18): Xaa in position 18 is Glu or His
GLVLXEHFFRKXXXIXXX

SEQ ID NO: 67707 - protein, 15 aa, Artificial sequence
  protein pattern
  Variant (2)..(2): Xaa in position 2 is any amino acid
  Variant (4)..(4): Xaa in position 4 is Ala, Ser or Thr
  Variant (7)..(7): Xaa in position 7 is any or no amino acid
  Variant (9)..(9): Xaa in position 9 is any amino acid
  Variant (10)..(10): Xaa in position 10 is any or no amino acid
  Variant (12)..(12): Xaa in position 12 is Met or Val
  Variant (13)..(13): Xaa in position 13 is Gln or Arg
  Variant (15)..(15): Xaa in position 15 is Gly or Asn
IXFXGEXIXXIXXPX

SEQ ID NO: 67708 - protein, 14 aa, Artificial sequence
  protein pattern
  Variant (2)..(2): Xaa in position 2 is Ala, Ser or Thr
  Variant (4)..(4): Xaa in position 4 is Ile, Leu or Val
  Variant (8)..(8): Xaa in position 8 is any or no amino acid
  Variant (10)..(10): Xaa in position 10 is any amino acid
  Variant (11)..(11): Xaa in position 11 is any or no amino acid
  Variant (13)..(13): Xaa in position 13 is any or no amino acid
WXSXWAKXRXXNXL

SEQ ID NO: 67709 - protein, 10 aa, Artificial sequence
  protein pattern
  Variant (4)..(4): Xaa in position 4 is Leu or Met
  Variant (7)..(7): Xaa in position 7 is Asp or Glu
  Variant (10)..(10): Xaa in position 10 is Phe or Ile
DEIXEGXLRX

SEQ ID NO: 67710 - DNA, 2430 bp, Saccharomyces cerevisiae
  CDS (1)..(2430)
atgtcttctgtagaagaattgactcagctgttttcacaggttgggtttgaagataaaaaggtgaaggagattgtcaagaataaaaaggtttctgattcactttacaaattgattaaggagactccttcggactatcaatggaacaaatctactagagcgctagtacacaacctggcatcttttgtcaaaggtacagatctacccaagtctgaattaattgttaacggcatcattaatggtgatttgaagacatctctgcaagtcgatgccgcatttaaatatgtaaaggctaatggcgaggcatccaccaaaatgggtatgaatgaaaactctggtgttggtattgagattacagaggatcaggttagaaattacgtcatgcagtacattcaagaaaacaaggaaagaattttaactgaacgctataaactggtgccaggtatttttgccgatgttaaaaacttaaaggagctgaagtgggccgatccacgtagtttcaagccaattatcgaccaagaagtcttaaaacttttgggtccaaaggatgagagagacttaatcaagaagaagaccaagaataatgaaaagaagaaaaccaattctgccaagaagagttctgataattctgcatcatccggtccaaagaggactatgttcaatgaaggtttcctaggtgatttgcataaagtgggtgaaaacccacaagcttacccagaattaatgaaggaacaccttgaggttactggtggcaaagttcgtacaaggttccctccggagcccaatggatatttgcatattggtcattctaaagctattatggttaattttggttatgctaaatatcacaatggtacctgttatttaagatttgacgataccaaccccgaaaaggaagctcctgaatattttgaatccattaagagaatggtttcttggttaggttttaaaccatggaaaattacttactcaagtgattattttgacgagctttatcgcctcgctgaagtgttgatcaaaaacggcaaagcttacgtttgtcattgtaccgccgaagaaattaaaagaggtcgtggtattaaagaagacggtactccaggtggggagagatatgcttgtaagcatcgtgatcagtcgatagaacaaaacctgcaagaattcagagatatgagagatggcaagtacaaacctggtgaagctatcttaagaatgaaacaggatctaaattcaccaagcccacaaatgtgggacttgattgcgtatagagttttaaatgctccacatccaagaacgggaacaaaatggagaatttatcctacttacgattttacacattgtttggtcgattcaatggaaaatattacacattctttatgtactactgaattctacctatctagagaaagctatgaatggttatgtgatcaggttcatgtgttcagacccgctcaaagagaatatggtcgtttgaatatcaccggtacagttttatccaaaagaaaaattgcgcaattggtggatgaaaaattcgttagaggctgggacgatcctagactattcacgcttgaagctatacgcagacgtggtgttcctcctggtgccattttatcctttatcaacacattaggtgttaccacaagtaccacaaacattcaagttgtgaggtttgagagcgctgttagaaagtacctagaagataccacaccgagattaatgtttgtgttggatcctgttgaagttgttgtcgataatttatctgacgattatgaagaattggcaactattccttacagacctggtactccagaatttggtgaaagaactgtaccatttacaaacaaattctacattgaaaggtcagatttctcagaaaacgttgatgataaggaatttttcagattaacaccaaaccaaccagttggtttaattaaagtctcacacacagtttctttcaaaagtttggaaaaagatgaagctggtaaaattataagaattcatgtcaactatgataacaaggttgaagaaggttcgaaaccaaagaaaccaaaaacttatattcaatgggttcctatctcttcaaaatataattctccattgagagttactgaaactagggtttacaaccaattgttcaaatctgaaaatccatcttctcatcctgaaggcttcttgaaggacatcaacccagaaagtgaagtcgtttataaagaatctgtcatggaacataacttcggggacgttgtcaagaacagtccatgggtcgttgattctgttaaaaactcggaattttatgttgaagaagataaggattccaaagaagtgtgtagattccaagctatgagagtaggttatttcactctggataaagagagtacgacttctaaggttattttgaatagaatagttagcttgaaggacgcaacttccaagtga

SEQ ID NO: 67711 - protein, 809 aa, Saccharomyces cerevisiae
MSSVEELTQLFSQVGFEDKKVKEIVKNKKVSDSLYKLIKETPSDYQWNKSTRALVHNLASFVKGTDLPKSELIVNGIINGDLKTSLQVDAAFKYVKANGEASTKMGMNENSGVGIEITEDQVRNYVMQYIQENKERILTERYKLVPGIFADVKNLKELKWADPRSFKPIIDQEVLKLLGPKDERDLIKKKTKNNEKKKTNSAKKSSDNSASSGPKRTMFNEGFLGDLHKVGENPQAYPELMKEHLEVTGGKVRTRFPPEPNGYLHIGHSKAIMVNFGYAKYHNGTCYLRFDDTNPEKEAPEYFESIKRMVSWLGFKPWKITYSSDYFDELYRLAEVLIKNGKAYVCHCTAEEIKRGRGIKEDGTPGGERYACKHRDQSIEQNLQEFRDMRDGKYKPGEAILRMKQDLNSPSPQMWDLIAYRVLNAPHPRTGTKWRIYPTYDFTHCLVDSMENITHSLCTTEFYLSRESYEWLCDQVHVFRPAQREYGRLNITGTVLSKRKIAQLVDEKFVRGWDDPRLFTLEAIRRRGVPPGAILSFINTLGVTTSTTNIQVVRFESAVRKYLEDTTPRLMFVLDPVEVVVDNLSDDYEELATIPYRPGTPEFGERTVPFTNKFYIERSDFSENVDDKEFFRLTPNQPVGLIKVSHTVSFKSLEKDEAGKIIRIHVNYDNKVEEGSKPKKPKTYIQWVPISSKYNSPLRVTETRVYNQLFKSENPSSHPEGFLKDINPESEVVYKESVMEHNFGDVVKNSPWVVDSVKNSEFYVEEDKDSKEVCRFQAMRVGYFTLDKESTTSKVILNRIVSLKDATSK

SEQ ID NO: 67712 - DNA, 2397 bp, Eremothecium gossypii
  CDS (1)..(2397)
atgtcatctgttgaggagctaagccagctgttcgcagatgtggggtttgaggaagcgaaggtgaaggagatagtcaagaacaagaaggttgcacactcgctggaagaactggttcgcgaagcaggggcgagggccgaatgggacaagggtaagcgtgcgctactgcacacgcttgcaagctccttgaagggggccacggtcaccgggcagaacctggttgccgagggcatccgcagcggtgaactgaagacatcgttgcaggtggatgcggccctgaagtatgtcaagcgggcgggcgagggagccacagtggccgagatgcacgctgagagcggcgtaggcgtccaggtgacggaagaccaggtgcaggcgcgcgtggtgcagtatctcgaagagaaccgcgcgaagatcgaaagcgagcgttacaagttggttccaggcatctttgcgcagatcaaggcgttgcccgagctgaagtgggcggacccgcggctgttcaagcctattattgatcgcgaggtattgaaaatccttgggcccaaggatgagcgcgatgttgttaagaaggaaaagaagaaagagcctaaaacgaacgacaaaaagaaggccgcggtggaggaggctcctaagcgcacgatgttctccgaaggttttctaggcgacctgcacaaagttggagagaacccacaggcctacccagagctcatggtagaacacttgaaagccactggcggcaaggtgcacacgcgtttcccacctgagccaaacggatacctacacatcggtcactcgaaggccatcatggtgaactttggctatgcgaagcatcacggcggtgtctgctacttgcgttttgacgataccaacccagaggcagaagcaccagaatattttgaaagtattgagagaatggtggcatggttggggttcagtccatggaagatcacatactcgagcgactactttgaccagctatatgaacttgccgaagttctgatcaagaatggtaagggatacatctgtcactgtactgcggaagagataagacgtggacggggtatcaaggaggacggtacaccaggtggcgagagactgccatgtgcccaccgtgaacggcccattgaggagaaccttgctgagttcaggaacatgcgcgatggcaaatatgctcccggagaggctattctccgtatgaagcaggatctgtcttctccttctccgcagatgtgggatttagttgcctacagagtcttgaacgctccacacccaagaacgggttccaaatggcgcatctatcctacctatgacttcacacactgtcttgttgattctctggagaacattacccattctctgtgcaccgccgagttctatttatcgcgcgagtcgtatgaatggttgtgcgatcaagtgcatgtcttcagacctgctcaaagggagtatggtcgtctgaatatcacaggcactgtattgtctaagcgcaagatcgccaagcttgtccacgagaaatacgtccgtggctgggatgatccccgtctcttcacccttgaggctattcgcaggcgcggtgtcccacctggagccatcctctccttcattaatacgctgggtgtcaccactagtactacaaacatccaggttgtccgttttgagagtgcaatcagaaagtacctcgaagacaccactgcacgcttgatgtttgtcttagatcccatagaagtcatcgtggacaacttgccagaggactatgaggagcttgtatcgattccttaccgcccaggcacgccagagttcggagagaggacggttcccttcagcaagcgtttctacatcgagcgttccgatttctctgaggacacctctgacaaagagttcttccgtctcacgcctgctcaatcggtaggtctcatcaaggtgccatacactatcgccttcaagagcctagagcgtgatgcgaacggaaagatcacgcgtattcacgcccactatgagaacgacacacctgatgggaagcctcgcaagccaaagacctacatccagtgggttcctattgcacctcgccatggttctcctatcccagttgcagaaacgcgtgtttacaaccagctgttcacttcagagaacccaagcggagacccagccgacatcaacccttacagtgaggtcatatatccttccgcggtcgtcgagcacaacttccgtcatgtcgtctctaactctccgtgggtcgtcgaaagcgccaagcagtccgagttctacgtcccagaggaacatgatcgcaaagaggtctgccgtttccaggctatgcgcgtaggctacttcacgcttgacaaggacagtacccatgaccgcatcatcctcaaccgcattgtcagcctcaaagatggctccaagtag

SEQ ID NO: 67713 - protein, 798 aa, Eremothecium gossypii
MSSVEELSQLFADVGFEEAKVKEIVKNKKVAHSLEELVREAGARAEWDKGKRALLHTLASSLKGATVTGQNLVAEGIRSGELKTSLQVDAALKYVKRAGEGATVAEMHAESGVGVQVTEDQVQARVVQYLEENRAKIESERYKLVPGIFAQIKALPELKWADPRLFKPIIDREVLKILGPKDERDVVKKEKKKEPKTNDKKKAAVEEAPKRTMFSEGFLGDLHKVGENPQAYPELMVEHLKATGGKVHTRFPPEPNGYLHIGHSKAIMVNFGYAKHHGGVCYLRFDDTNPEAEAPEYFESIERMVAWLGFSPWKITYSSDYFDQLYELAEVLIKNGKGYICHCTAEEIRRGRGIKEDGTPGGERLPCAHRERPIEENLAEFRNMRDGKYAPGEAILRMKQDLSSPSPQMWDLVAYRVLNAPHPRTGSKWRIYPTYDFTHCLVDSLENITHSLCTAEFYLSRESYEWLCDQVHVFRPAQREYGRLNITGTVLSKRKIAKLVHEKYVRGWDDPRLFTLEAIRRRGVPPGAILSFINTLGVTTSTTNIQVVRFESAIRKYLEDTTARLMFVLDPIEVIVDNLPEDYEELVSIPYRPGTPEFGERTVPFSKRFYIERSDFSEDTSDKEFFRLTPAQSVGLIKVPYTIAFKSLERDANGKITRIHAHYENDTPDGKPRKPKTYIQWVPIAPRHGSPIPVAETRVYNQLFTSENPSGDPADINPYSEVIYPSAVVEHNFRHVVSNSPWVVESAKQSEFYVPEEHDRKEVCRFQAMRVGYFTLDKDSTHDRIILNRIVSLKDGSK

SEQ ID NO: 67714 - DNA, 2391 bp, Oryza sativa (japonica cultivar-group)
  CDS (1)..(2391)
atgggcaccggaggcggcgagggggacaagtcggccgtgctgccgctggaggcgctgctggcgctggggctcgaccagcgcacggcggagaacgctctggtcaacagcaaggtcaccgccaacctcgccgccgtcatagccgaggctggtataagtggatgtgataagacggttgggaacctcctgtacacggttgccactaaatacccaaccaatgcgcttgtccatcgtcctgtactcattgactatattgtgtcaacgaagataaagaatcctgcacaactagatgctgctctgtcattccttactaatactggccctgactctttagatactgggaagtttgaagaagcctgtggtgtaggtgtggttgtttcaattgaagagattaaatcaacagtcaatgaggtattaaagcataatatggaggctatattggagcagcgatatcatattaatgttggtaacctatgcggacaggttaggaagaggcacccctggggtgatgctaaggcgaccaaggatgaaattgacaagaagcttgcagagatattaggtccaaagacagatgctgacaatgtaaaaccagtgaaaaagaaaaaggaaaaagcagcaaaagttgaggagaaaaaagctgcagtagtcactgctgcaccgccatctgaggaggaattgaatccatactctatatttcctcagccagaggaaaattttaaggttcatacagaaatattctatagtgatgggaacatatggagagcgcataacagtaaggagattttagagaaacaccttaaggcaaccggtggaaaagtgatgacccgtttcccaccagaacctaatggatatcttcatattggtcatgccaaggctatgtttattgattttggactggcgaaagagagaaatggtcattgttaccttaggtttgatgacacaaatccagaagccgaaaagaaagagtatattgaccacattcaggaaatcgtacactggatgggatgggagccctacaaagttacatatacaagtgattatttccaggctttatatgagcatgcagttgagttaatacgaaaagggctagcctatgtggatcaccagaccgcagaagaaatcaaggaatacagggaaaagaaaatgaatagtccatggagggatagacccattgaagaatcactgaaactatttgaagacatgagacgtgggttgattgctgaaggtgcagcaacactccgaatgaaacaagatatgcagaatgataacaagaatatgtctgatttaatagcatatagaataaaattcactcctcatccacatgctggtgataagtggtgcatctatccaagctatgactatgctcactgcatggtggattctcttgagaacattacacattcgctgtgcacgctcgagtttgacatacgtcgcccgtcatactactggctacttgttgccttgggcctgtaccagccatatgtttgggagtattcgaggctaaacatatcgaatactgtgatgtctaaaagaaagttgaatcgacttgtgacagaaaagtgggtagatgggtgggatgaccctcgtttgttgacactagcaggattgcggcgacgtggagtgtcatcaactgcaattaattcgtttatttgtggaattggaataacaagaagtgacaatagcttaattcgggttgaccgtcttgaatatcatatcagagaagagcttaataaaacagcttcccgtgccatggttgtgttgaatcctctaaaggttgtaataactaacttggaggatgaaaaagtcatagaccttgatggaaaaatgtggcctgatgctcctgcagacgatgcttcatcctactacaaggttcctttctcaagaatcgtttacatcgaaaaaactgattttcgtctaaaggactcgaaagattactacgggctagctcctggtaaatctgccctgctaagatatgcattccccattaaatgtaccgaggttgtttatggtgacaatccagatgacatcattgaaattcgagctgaatatgacccttcaaagactactaaacctaagggtgttctgcactgggttgctcagccagcacctggagttgaaccacttaaggtggaagtaagattatttgataaattattcctctctgagaatcctgctgaactggaggattggctgggtgatcttaacccgaactcaaaagaggtgatcaagggtgcctacgccgtgccatcgcttgcgactgcggttcttggtgacaagttccagttcgagcggctaggctacttcgcagtggacacagactcgacacctgagaacattgtgttcaacaggacggttaccctgcgtgattcgtatgggaaagctgggccaaagtga

SEQ ID NO: 67715 - protein, 796 aa, Oryza sativa (japonica cultivar-group)
MGTGGGEGDKSAVLPLEALLALGLDQRTAENALVNSKVTANLAAVIAEAGISGCDKTVGNLLYTVATKYPTNALVHRPVLIDYIVSTKIKNPAQLDAALSFLTNTGPDSLDTGKFEEACGVGVVVSIEEIKSTVNEVLKHNMEAILEQRYHINVGNLCGQVRKRHPWGDAKATKDEIDKKLAEILGPKTDADNVKPVKKKKEKAAKVEEKKAAVVTAAPPSEEELNPYSIFPQPEENFKVHTEIFYSDGNIWRAHNSKEILEKHLKATGGKVMTRFPPEPNGYLHIGHAKAMFIDFGLAKERNGHCYLRFDDTNPEAEKKEYIDHIQEIVHWMGWEPYKVTYTSDYFQALYEHAVELIRKGLAYVDHQTAEEIKEYREKKMNSPWRDRPIEESLKLFEDMRRGLIAEGAATLRMKQDMQNDNKNMSDLIAYRIKFTPHPHAGDKWCIYPSYDYAHCMVDSLENITHSLCTLEFDIRRPSYYWLLVALGLYQPYVWEYSRLNISNTVMSKRKLNRLVTEKWVDGWDDPRLLTLAGLRRRGVSSTAINSFICGIGITRSDNSLIRVDRLEYHIREELNKTASRAMVVLNPLKVVITNLEDEKVIDLDGKMWPDAPADDASSYYKVPFSRIVYIEKTDFRLKDSKDYYGLAPGKSALLRYAFPIKCTEVVYGDNPDDIIEIRAEYDPSKTTKPKGVLHWVAQPAPGVEPLKVEVRLFDKLFLSENPAELEDWLGDLNPNSKEVIKGAYAVPSLATAVLGDKFQFERLGYFAVDTDSTPENIVFNRTVTLRDSYGKAGPK

SEQ ID NO: 67716 - DNA, 2391 bp, Oryza sativa (japonica cultivar-group)
  CDS (1)..(2391)
atggcgaccggagaagcggcggcggcggcggcgtcgccgccggagctggcgtcgttcctggcgatcgggcttgaccagcgcacggcggagaacgccctcgccaaccgcaaggtcaccgccaacctcaccgccgtcatcgccgaggctggtgttagtgggtgtgacaaatctgtggggaatcttctctacactgtcgcgacgaagtatccggcgaatgccctggtgcatcgtcccgttgtcatccaatacattgtgtcgtcaaagatcaagacccccgcgcaattagatgctgctctgtcgtttctttctactttgggtcctgatccattggacacagcaaagtttgaagagacatgtggagtgggggtggttgtttcaactgaagagattcagtcaatggtcactgatatcctgaaggaaaacatggaagccatagttgaacagcgatatcatataaatgttggcagcttgtgcggacaggttaggaagtggcacccctggggcgatgctaagttcataaaggaggaaattgataaaaggcttacagagattcttggtccaaagacagaagctgacaatgtaaagcctgtgaaaaagaagaaggagaagcccgcaaaagttgaggagaaaaaaactgcggtagctgctcctgctccaccatctgaggaagaacttaatccctactccatatttcctcaaccggaggaaaacttaaaggtccatacagaaattttcttcagcgatggaaatatatggagagcacacaacagaaaggacattttagagaaacatcttaaagcaactggaggaaaagtgatgacccgctttcccccagagcctaatggctaccttcatattggtcatgctaaggctatgtttattgattttggactggctaaagagcgcaacggacattgttaccttaggtttgatgatacaaaccctgaggcggagaagaaagaatatatagatcacattcaagaaattgtccgatggatgggctgggagccttataaagttacctatacaagtgactatttccaagaattatatgaacttgctgtttgtttgataaagaagggactagcttatgtcgatcaccagacaccagaagagataaaggagtatagagaaaagcaaatgaatagtccatggagggataggcctatagaagagtcactaaaactgtttgaagatatgaggcatgggttggttgctgagggaaaggcaactcttaggatgaaacaagacatgcagaatgataacaagaacatggctgacttaatagcatatagaataaagtttacacctcatccccatgctggcgacaagtggtttatctatccaagctatgactatgctcattgtttggttgactctcttgaaaacattacccattcgttgtgcacactagaatttgacatacgtcgtccttcatactactggctgctcgtatccctggaccagtaccagccatatgtttgggaatattcaaggttaaacatatcaaacaatgttatgtccaagcgaaagctaaataaacttgtgacagagaagtgggtagatgggtgggatgatcctcgcctgttgacacttgcaggactacggcggagaggagtatcatcaacagcaattaactcctttattcgtggaatgggcataacaaggagtgacaacagtttgatacgcttagaacgccttgagtatcatattagagaagagctcaacaaagtagctcctcgtgctatggttgttttgcatcccctaaaggttgttataaataatttagactatggaacaataatagaccttgatgcaaaaaagtggcccgatgctccaggagatgatgcttcggcctattacaaggttccattctcaagaactgtctacatcgagcagtctgattttcgtgtaaaggattcaaaagattattatgggcttgctcctggtaaaacagtactactaaggtatgcattcccaataaaatgtacggaagttatctatggtgataattcagataatatcattgaaatccgagctgagtatgacccttcgaaggctacaaaaccaaagggtgtgttgcactgggttgccgaaccttctccaggtgttaacccgctcaaagtggaaatcagattgttcgagaaattatttctttcagagaatcctgtggagcttgaggattggctgggtgatctcaacccacgatcaaaggaagtgataaagggtgcctatgccgtgccttcgcttgcaactgcagcgctgggggacaaatttcagtttgaacgcctcggttactttgctgtggattccgactcgacggctgaggaacttgtgttcaacagaaccgttactctacgggattcctatggaaaagctggacccaagtga

SEQ ID NO: 67717 - protein, 796 aa, Oryza sativa (japonica cultivar-group)
MATGEAAAAAASPPELASFLAIGLDQRTAENALANRKVTANLTAVIAEAGVSGCDKSVGNLLYTVATKYPANALVHRPVVIQYIVSSKIKTPAQLDAALSFLSTLGPDPLDTAKFEETCGVGVVVSTEEIQSMVTDILKENMEAIVEQRYHINVGSLCGQVRKWHPWGDAKFIKEEIDKRLTEILGPKTEADNVKPVKKKKEKPAKVEEKKTAVAAPAPPSEEELNPYSIFPQPEENLKVHTEIFFSDGNIWRAHNRKDILEKHLKATGGKVMTRFPPEPNGYLHIGHAKAMFIDFGLAKERNGHCYLRFDDTNPEAEKKEYIDHIQEIVRWMGWEPYKVTYTSDYFQELYELAVCLIKKGLAYVDHQTPEEIKEYREKQMNSPWRDRPIEESLKLFEDMRHGLVAEGKATLRMKQDMQNDNKNMADLIAYRIKFTPHPHAGDKWFIYPSYDYAHCLVDSLENITHSLCTLEFDIRRPSYYWLLVSLDQYQPYVWEYSRLNISNNVMSKRKLNKLVTEKWVDGWDDPRLLTLAGLRRRGVSSTAINSFIRGMGITRSDNSLIRLERLEYHIREELNKVAPRAMVVLHPLKVVINNLDYGTIIDLDAKKWPDAPGDDASAYYKVPFSRTVYIEQSDFRVKDSKDYYGLAPGKTVLLRYAFPIKCTEVIYGDNSDNIIEIRAEYDPSKATKPKGVLHWVAEPSPGVNPLKVEIRLFEKLFLSENPVELEDWLGDLNPRSKEVIKGAYAVPSLATAALGDKFQFERLGYFAVDSDSTAEELVFNRTVTLRDSYGKAGPK

SEQ ID NO: 67718 - DNA, 2388 bp, Arabidopsis thaliana
  CDS (1)..(2388)
atggttctcaaagacgataactccgagaaatctattgagctcttcattagtattggtttggacgagaaaacagctcgtaataccatcaataataacaaggtcaccgccaatctcaccgccgttatccacgaggctgctgttactgatgggtgcgatcgaaatactggcaatctgttatactcggtcgctactaagttccctacaaatgctcttgtgcatcgccctacattgctcaagtacattgttaactctaagattaaaactccagcccaattggaagctgcatttgccttttttgccagtaccggtcctgaggactttaagctgaatgagtttgaagaggcatgtggtgttgggattgaagtttccccagaagatattgagaaagcagttaaaggaatctttgaagagaataagaaaacaatattggagcagcgctatcgaactaatgtgggtgaattatttggacatgtccggaaaagtttgccatgggccgatcctaagattgtaaagaaactcatagatgagaaaatgtatgagctgcttggtgagaaaaccgctgctgataatgaaaaacctacaaaaaagaaggagaagaaggagaagcctgccaaagtcgaggaaaagaaagctgtggtggaaactaccgcagagccatctgaagaggagcttaatccatatactatattccctcagccagaacaaaattttatggttcacacagaagtgtttttcagtgatggctctattctcagatgtagcaatacaaaggaagtacttgacaaacatctcaaggtgactggagggaaagtttatactcggttcccccctgaaccaaatggttatcttcatattggacatgccaaggctatgtttgttgattttggtcttgcaaaggagcgagggggttgctgttatctaaggtatgatgatacaaatccagaggcagaaaaggaagagtatattaatcatattgaagaaattgttaagtggatgggttgggaacccttcaagattacatacaccagtgattatttccaggaactgtatgatttggcagtggagttgattcggagaggtcatgcttatgttgatcatcagactgctgatgagataaaagagtacagagagaagaaaatgaacagcccctggagggacagacctattgaagaatctctaaaactttttgatgaaatgagacgaggcatcattgaggaagggaaggcaaccctaagaatgaagcaagatatgcagagtgacaattttaatatgtatgatcttattgcctatcgaataaagttcgcacctcatcctaaggctggtgacaagtggtgtatctatccgagttatgattatgcccactgcactgttgattctcttgagaatataacgcattcgctctgtactcttgaatttgaaacccggcgtgcttcatactattggctgttacattccctgagtctctacatgccatatgtgtgggaatattcacggttgaatgtgacaaacactgtaatgtccaagcgtaagttgaattacatagtgacaaacaagtatgttgatggttgggatgatccacgtcttttgacactttctggtttgagacggaggggtgtgacttcaactgcgattaatgcatttgtacgaggcattgggattactagaagtgatggtagcatgatacacgtaagtcgtcttgagcatcatattagagaggaattgaataaaacagcccctcgcaccatggtggtgcttaatcctcttaaagtggtcatcaccaatttggaatcagacaagcttatagagcttgatgccaaaaggtggcctgatgctcagaacgatgatccctcagcattctacaaggtaccgttctctagagttgtatacattgaccaatctgacttccgaatgaaggattcaaaagattattatgggctcgcccctggtaaatctgttttgctaagatatgctttcccaatcaagtgcaccaatgttgtctttgctgatgacaatgaaaccgttcgtgagattcatgcggaatatgaccccgagaaaaagtcaaagccaaagggggttctacactgggtcgctgaatcttccccaggagaagagcccataaaggtggaagtccgattatttgagaaactctttaactccgagaacccggctgaactcaatgatgcttggctcactgacattaacccaaactctaaaatggtaatttctggtgcctatgctgtatcaacccttaaagatgctgcagttggggacagattccaattcgagaggctaggttattacgcggtggacaaggactctgagccaggaaagcttgtgttcaaccggacggtcacactcagagacagctacgggaaaggtggaaagtaa

SEQ ID NO: 67719 - protein, 795 aa, Arabidopsis thaliana
MVLKDDNSEKSIELFISIGLDEKTARNTINNNKVTANLTAVIHEAAVTDGCDRNTGNLLYSVATKFPTNALVHRPTLLKYIVNSKIKTPAQLEAAFAFFASTGPEDFKLNEFEEACGVGIEVSPEDIEKAVKGIFEENKKTILEQRYRTNVGELFGHVRKSLPWADPKIVKKLIDEKMYELLGEKTAADNEKPTKKKEKKEKPAKVEEKKAVVETTAEPSEEELNPYTIFPQPEQNFMVHTEVFFSDGSILRCSNTKEVLDKHLKVTGGKVYTRFPPEPNGYLHIGHAKAMFVDFGLAKERGGCCYLRYDDTNPEAEKEEYINHIEEIVKWMGWEPFKITYTSDYFQELYDLAVELIRRGHAYVDHQTADEIKEYREKKMNSPWRDRPIEESLKLFDEMRRGIIEEGKATLRMKQDMQSDNFNMYDLIAYRIKFAPHPKAGDKWCIYPSYDYAHCTVDSLENITHSLCTLEFETRRASYYWLLHSLSLYMPYVWEYSRLNVTNTVMSKRKLNYIVTNKYVDGWDDPRLLTLSGLRRRGVTSTAINAFVRGIGITRSDGSMIHVSRLEHHIREELNKTAPRTMVVLNPLKVVITNLESDKLIELDAKRWPDAQNDDPSAFYKVPFSRVVYIDQSDFRMKDSKDYYGLAPGKSVLLRYAFPIKCTNVVFADDNETVREIHAEYDPEKKSKPKGVLHWVAESSPGEEPIKVEVRLFEKLFNSENPAELNDAWLTDINPNSKMVISGAYAVSTLKDAAVGDRFQFERLGYYAVDKDSEPGKLVFNRTVTLRDSYGKGGK

SEQ ID NO: 67720 - DNA, 2094 bp, Encephalitozoon cuniculi GB-M1
  CDS (1)..(2094)
atggcagatcttgagaagattcttgaaaggctggggatttctcctgaaaagcggtgtcaggtgattaaaaaagagcaggtggttcggaacatggagaagatctttctggggagggacctttcgaataggttgctgtatacattagcctgcattgctccaaagaatgctgatcttgggctgttggcggatctggttgatgctcgggtcatcaagcatgagagcatgctgaaggaatgtctgcgatacacggagaagaaggatgtttcgatggaggagatgactcggtttgtgaagaggaacgaggtttcctctgaagatgtgcggaagtttgttgccaagatgagaagcgatagagtggcgaagaaggacatggtcagtaaggcaaggaaggccatgccctgtgcagacttcagggttgttgttgaggagattaataaggtccctgatgatgtagatggtggagatgagaaaaggcctttagaggggggttggctggaagagggggagattaagaagcttccgaagccttcggagattccccagatcaacgaggagataaggcaggcccatctacggaggacaggggggagggttgtcaccaggtttccgcctgagcctaatggaattcttcacattgggcatgcaaaggcaataaacctgaacttcgaatatgccaaaaagtttggaggatatacctatctgagatacgacgacacaaaccccaagaacgaggaggcagagtacttcgattcgatctacgaggatgtccggtggcttggatttgagccctacaaggtcactgcctcaagcgattatttcgacaagatgactgagtttggttttcagcttataagaaaaggaaaggcatatgtctgccacctaagccaggatgaaatatgcgaaagaagaagacagtatgtgtctgatggaacgaatgacagatcgcacctgagccagtacagagacaggcctgtctcggagaatctgaggctctttcaggagatggttgacggtaaatgggaagaggggaaggcatgcctcagattcaagatggacactgacacaaagaaccccctgatgcttgatcttgtgggcattcggatattggacgtggtgcatcccaggaaaaacgtgaagtatactgtgtatccaacctatgagtttgctctttgtgtatctgacagcctggaggacgtaacgcactccttctgtacaagggagttttatacgaggcaggagagctataactggctacttgtccagcttgagatctacaagcccatccagtgggaatttagcaggctgaatataagcaacactgttctgagcaagagaaagctgcttcctctgaagaagtacgggattgagctagacgatcctcggctgtttacgatcaaagggatgaggagaagaggcttccccccggaagccatcaaccagttctgccgaagcctcgggttcacctttgcagaaacaacggttgatgtgaagaagctcgagaactttgttagagacaatctcaataggacctctcgaagaatcatgtgtgtgaaggagcctctaaaggtgacgataatgaattcgacgccgtgcagtatatctattccggaccttcccgggtcgagtgttgtcagagatgttccatttactcctgtcatatacatagagaagtcggactttatggagaagggagacaaggacttcctgaggctgacccctgagcagcctgttgggctttacatgctttacccaataagagtcgtgaaggtcactccggacgggattgtagccgagagatgggatggagttccaaggaagtttatacactgggttagcgaagactctgtcgaagtagagatgaggatgtattcctcactctggacatcgttcagcccgaaggatgccacctatcttgaagagatgaacaaagacagcctcaaggtcttccacgggctctgcgacaagagaatttcagatgcaaggatcgaagacaggttccagttccagcgcataggatacttctgcgtggacaaagacacgaccaaagaaaacattgttgttaatcttacgattcctctcaagaacattgcttga

SEQ ID NO: 67721 - protein, 697 aa, Encephalitozoon cuniculi GB-M1
MADLEKILERLGISPEKRCQVIKKEQVVRNMEKIFLGRDLSNRLLYTLACIAPKNADLGLLADLVDARVIKHESMLKECLRYTEKKDVSMEEMTRFVKRNEVSSEDVRKFVAKMRSDRVAKKDMVSKARKAMPCADFRVVVEEINKVPDDVDGGDEKRPLEGGWLEEGEIKKLPKPSEIPQINEEIRQAHLRRTGGRVVTRFPPEPNGILHIGHAKAINLNFEYAKKFGGYTYLRYDDTNPKNEEAEYFDSIYEDVRWLGFEPYKVTASSDYFDKMTEFGFQLIRKGKAYVCHLSQDEICERRRQYVSDGTNDRSHLSQYRDRPVSENLRLFQEMVDGKWEEGKACLRFKMDTDTKNPLMLDLVGIRILDVVHPRKNVKYTVYPTYEFALCVSDSLEDVTHSFCTREFYTRQESYNWLLVQLEIYKPIQWEFSRLNISNTVLSKRKLLPLKKYGIELDDPRLFTIKGMRRRGFPPEAINQFCRSLGFTFAETTVDVKKLENFVRDNLNRTSRRIMCVKEPLKVTIMNSTPCSISIPDLPGSSVVRDVPFTPVIYIEKSDFMEKGDKDFLRLTPEQPVGLYMLYPIRVVKVTPDGIVAERWDGVPRKFIHWVSEDSVEVEMRMYSSLWTSFSPKDATYLEEMNKDSLKVFHGLCDKRISDARIEDRFQFQRIGYFCVDKDTTKENIVVNLTIPLKNIA

SEQ ID NO: 67722 - DNA, 1704 bp, Buchnera aphidicola str. Sg (Schizaphis graminum)
  CDS (1)..(1704): transl_table=11
atgagatttaaaaaaatgaacaataaaatagaaaaaaatgataataattttatttataaaattattaatgaagatttcaaaaaaaataaaaatttgttattgcatacgcgttttcctcctgaacctaatggatatcttcatattggacatgctaaatcaatatgtttaaattttgaacttgcaaatgtatacaatggatattgtaatcttcgtttcgatgatacaaatccagttaaggaaaacatcaaatatataaactcaatcaaaaacgatattaaatggttgggttatcaatggcataaaaaagttcgttattcttctgaatattttccaatactgtatgaatatgctaaagaattaattcaaaaaggtttagcatacgtagatgaattaacaaaagaagaaatacgtgaatacagaggcactttaagtaccgtaggaaaaaatagtccttatagaaatagaagtattacagaaaacttaaaattatttgaaaaaatgaaaaaaggagaatttaaagaaggagaggcatgcttacgtgcaaaaattaatatgagttcttcatttattgttatgcgtgatcctgtattatatcgaattattttctctacacatcaccaaactaaaaaaaaatggtgtatatatcctacatatgattttgctcattgtttatctgattctattgaaggtataactcattctttttgtacattagaatttcaagacaataaaaatttatataattggattttaaaaaatactagtatcaagcattattcaaaacaatatgagttctctagattaaatctagaatactcaattttatctaaaagaaaaatttcaattttaattgaaaaaaaaatagttaacggatgggacgatccaagaatactaactatttctggattgagaaaaaaaggatatacagcatcttctattcgtgatttttgtcatagaattggtatcactaaacaaaataatttaatagaattttctatgctagaatattgtattagaaaagaactaaacaaaaaagcaatacgtactatggctgtattagaaccaattaaaatatttctatataacatagataatgatcatgaagaaaaattaatagttcccaatcatccaaaacatctacatttagggactcacgaaattatctttacaaatacaatatatattgaacgagaagatttcaaagaaaaatacgataaaaaatataaaagattaaaaattggagaagaagttcgtttaagatatgcatatataataaaagcagaaaaaatagaaaaagatgaaagtggtaatattatcaaaataatatgcttctgtgatattaacagtttagggaaaaaaccaattaatagaaaaaatcctgcagtaatacactggattgcagtaaaaaattcatttccagctaaatttaaattatacaatcaattatttaaaataaaaaatcctgatcaagaaaaaaatttcttatcttatttaaattctaattcattaatagtaaaaaatggctttgtcgaaaaaaaaatagctcaaaaaataataaaaaaaatgagtaataattttataaaattgttttttcaatttgaaagaactggctacttttgtgtagatgaagttgattcaaaagaaaataaattagtttttaatcgtactgttagtttaaaagattcatggaatttaaaaaaatga

SEQ ID NO: 67723 - protein, 567 aa, Buchnera aphidicola str. Sg (Schizaphis graminum)
MRFKKMNNKIEKNDNNFIYKIINEDFKKNKNLLLHTRFPPEPNGYLHIGHAKSICLNFELANVYNGYCNLRFDDTNPVKENIKYINSIKNDIKWLGYQWHKKVRYSSEYFPILYEYAKELIQKGLAYVDELTKEEIREYRGTLSTVGKNSPYRNRSITENLKLFEKMKKGEFKEGEACLRAKINMSSSFIVMRDPVLYRIIFSTHHQTKKKWCIYPTYDFAHCLSDSIEGITHSFCTLEFQDNKNLYNWILKNTSIKHYSKQYEFSRLNLEYSILSKRKISILIEKKIVNGWDDPRILTISGLRKKGYTASSIRDFCHRIGITKQNNLIEFSMLEYCIRKELNKKAIRTMAVLEPIKIFLYNIDNDHEEKLIVPNHPKHLHLGTHEIIFTNTIYIEREDFKEKYDKKYKRLKIGEEVRLRYAYIIKAEKIEKDESGNIIKIICFCDINSLGKKPINRKNPAVIHWIAVKNSFPAKFKLYNQLFKIKNPDQEKNFLSYLNSNSLIVKNGFVEKKIAQKIIKKMSNNFIKLFFQFERTGYFCVDEVDSKENKLVFNRTVSLKDSWNLKK

SEQ ID NO: 67724 - DNA, 1740 bp, Bacteroides thetaiotaomicron VPI-5482
  CDS (1)..(1740): transl_table=11
atgacagatattaaaaacgaagacacaggcgataagaaaagcctgaactttattgaacaggcagtagagaaggatttgaaggaaggtaaaaatggtggaaaagtgcagacccgcttcccgcccgaaccgaacggataccttcacatcggtcatgccaaagctatttgccttgacttcggcatcgctgccaagcatggcggcgtatgtaaccttcgtttcgacgacacaaatccgaccaaagaggatgtggaatatgtagaagccatcaaagaagatattcaatggctgggctaccaatggggaaacgaatactacgcttccgactatttccagcaattatgggacttcgccatccgcctcatcgaggaaggaaaagcatatattgacgagcaaactgccgaacagattgcccaacaaaaaggtactcccacccaggcaggtgtgaacagcccttaccgcgaccgccctatcgaagaaagtctggaacttttcaagaagatgaacagcggtgaaatagaagaaggtgctatggtactccgtgccaaaatcgacatgtccaatcctaacatgcacttccgcgacccgatcatctatcgtgtcgtaaaacatccgcaccaccgtacaggcactacctggaaggcttatccgatgtatgacttcgcccacggacagagtgacttcttcgaaggagtaactcactctctgtgtacacttgaatttgtggtgcaccgtccgctctacgacctcttcatcgactggctgaaagaaggtaaggacctgaacgacaaccgtccccgtcagactgagttcaacaaactgaacctgagctacacgctgatgagcaaacgtaacctgctgacactggtaaaagaaggactggtgaacggatgggacgatccccgtatgccgactatctgcggtttccgccgtcgtggttactctccggaatctatccataaatttatcgataagatcggttacaccacttacgacgcactgaacgatatcgcattgctggaaagctctgtccgcgacgatctgaacagccgtgctacccgtatatccgctgtcatcaacccggtgaaactcatcatcaccaactatccggaaggacaagtagaacaactggaagccatcaacaatccggaagatccggaagccggaagccatatgattgagttcagccgcgaattatggatggaacgcgaagacttcatggaagacgcgcccaagaaatatttccgcatgactccgggacaggaagtacgcctcaaaaacgcttacatcgtgaaatgtaccggatgcaagaaggatgaaaacggtgtgatcacagaagtatattgcgaatatgatgcaaatacccgcagcggcatgccggatgccaaccgtaaagtgaaaggtacactccactgggtaagctgcaaccactgtctgcaagcagaagtgcgcctctacgaccgtctgtggaaagtagaaaacccacgcgacgaactggctgctatccgcgaagcaaagaaatgcgaagctctggaagcaatgaaggaaatcatcaatccggattctctgaaagttcttccgaattgctatatcgagaagtttgcggcaaccttgcctgtactctcatacctgcaattccaacgcatcggctattttaatatagacaaagactcgactccggagaaacttgtattcaaccgtacggtaggattaaaagatacctggggtaaaatcaataaataa

SEQ ID NO: 67725 - protein, 579 aa, Bacteroides thetaiotaomicron VPI-5482
MTDIKNEDTGDKKSLNFIEQAVEKDLKEGKNGGKVQTRFPPEPNGYLHIGHAKAICLDFGIAAKHGGVCNLRFDDTNPTKEDVEYVEAIKEDIQWLGYQWGNEYYASDYFQQLWDFAIRLIEEGKAYIDEQTAEQIAQQKGTPTQAGVNSPYRDRPIEESLELFKKMNSGEIEEGAMVLRAKIDMSNPNMHFRDPIIYRVVKHPHHRTGTTWKAYPMYDFAHGQSDFFEGVTHSLCTLEFVVHRPLYDLFIDWLKEGKDLNDNRPRQTEFNKLNLSYTLMSKRNLLTLVKEGLVNGWDDPRMPTICGFRRRGYSPESIHKFIDKIGYTTYDALNDIALLESSVRDDLNSRATRISAVINPVKLIITNYPEGQVEQLEAINNPEDPEAGSHMIEFSRELWMEREDFMEDAPKKYFRMTPGQEVRLKNAYIVKCTGCKKDENGVITEVYCEYDANTRSGMPDANRKVKGTLHWVSCNHCLQAEVRLYDRLWKVENPRDELAAIREAKKCEALEAMKEIINPDSLKVLPNCYIEKFAATLPVLSYLQFQRIGYFNIDKDSTPEKLVFNRTVGLKDTWGKINK

SEQ ID NO: 67726 - DNA, 1650 bp, Wigglesworthia glossinidia endosymbiont of Glossina brevipalpis
  CDS (1)..(1650): transl_table=11
atggaaaaacaaaaaaaaataacatccaattttatttataaaattatacataaagatttatttattaataaatacaaatatattcatactagatttcctccagagcctaatggatatttacatttaggtcatgcaaaatctatttgtttaaattttaatttagctaagattttcaagggaaaatgtaatttaagatttgatgatactaatccaaatacaaaacatgaaaaatatataaataaaattaaaaatgacattttatggttaggatttaaatgggatggaaaaactcgttattcttcggattattttgatcaaatatataattttgctataaaattaataaaaaaaaatttagcatacgtagaagaattatctttaaaagaagtaagaaaaaacagagggtctttgacaagaaaaggaaaacaaagcccgtatagaaatagaaaaataaaagaaaatttaattttgtttgaaaaaatgaaaaatggagaattcaaagaaggatcagcttgcttaagagcaaagataaatatgcaatcttcatgtgttctaatgagagatcctattttgtatagaattagatttaaaaatcatcatcgtacaaaaaataaatggtgtatttatcctacttatgattttagtcattgcatttcagattctattgaaaatattactcattctttatgcacattagaatttcaagaaaataaaaaattatataattggattttaaaaaaagtttcaacagattttgttcctaaacaatatgaattttctagaatgaatttagaatattctattatgtcaaaaagaaaattgaaaattttaatagaaaaaaaattagtaagtggatggaatgatcctagaattccaacattagctggaataaggagaagaggatatactgcctcatctattcgtgaattctgcaatagaattgggatcactaaacaagaaagtactattagtgaatctatgcttgagtttttcataaaaaaagaactgaattttaactcatacagattaatggctgtaataaatcctctgttgttaataatagagaattttccagatgaatatgaagaaaaaatagaaatttctaatcatccatataacaatatggggaaaagaacagttatttttaacaaaaaaatatacatagaacgttcggattttatggaaaatccaaaattagaatataaaagattatcattagggaaaaaggtaaaattaagaaattcatatattataaaagcaaacagaatagaaaaaaataaacacggatatattacaaaagtttattgtaattattattcaaatataaaaaaaaataattataaattttcaaaattaggaattatacattgggtatctgaaaaaaataatattccagcagaatttcgtttttacgatagattgttcactcatcctaatcccgaaaaattggataattttttatcttttttcaacaaagattctttaataattaagcatggttttatagaaaaaaatataaaaaaacaccacataaactatccagttcaattcgaaagaataggatatttttttgcagataaatttaattataaaaaagattatccagtatttaatttaactgcaaaattatctagctatttaaatagataa

SEQ ID NO: 67727 - protein, 549 aa, Wigglesworthia glossinidia endosymbiont of Glossina brevipalpis
MEKQKKITSNFIYKIIHKDLFINKYKYIHTRFPPEPNGYLHLGHAKSICLNFNLAKIFKGKCNLRFDDTNPNTKHEKYINKIKNDILWLGFKWDGKTRYSSDYFDQIYNFAIKLIKKNLAYVEELSLKEVRKNRGSLTRKGKQSPYRNRKIKENLILFEKMKNGEFKEGSACLRAKINMQSSCVLMRDPILYRIRFKNHHRTKNKWCIYPTYDFSHCISDSIENITHSLCTLEFQENKKLYNWILKKVSTDFVPKQYEFSRMNLEYSIMSKRKLKILIEKKLVSGWNDPRIPTLAGIRRRGYTASSIREFCNRIGITKQESTISESMLEFFIKKELNFNSYRLMAVINPLLLIIENFPDEYEEKIEISNHPYNNMGKRTVIFNKKIYIERSDFMENPKLEYKRLSLGKKVKLRNSYIIKANRIEKNKHGYITKVYCNYYSNIKKNNYKFSKLGIIHWVSEKNNIPAEFRFYDRLFTHPNPEKLDNFLSFFNKDSLIIKHGFIEKNIKKHHINYPVQFERIGYFFADKFNYKKDYPVFNLTAKLSSYLNR

SEQ ID NO: 67728 - DNA, 1671 bp, Candidatus Blochmannia floridanus
  CDS (1)..(1671): transl_table=11
gtggataataaatcaaattttatatataatataattaatcaggatctaaattttaaaaaatataccataatacatacacgttttcctcctgaacctaatggatatttacatattggtcatgttaaatctatttatctaaattttaatatcgccaaatattatcatggtaaatgtaacttacggtttgatgatactaatccagataaagaaagtaaagaatatgtagaagctattaaatcagacattcaatggcttggttttatgtggaatggtgaagtgtgttatgtttctgattattttgaacaattatataattatgctgttgaacttatccaaaaaggtctagcatatgtagatgaattatctatatatgctattcgagaatatcgcggtacattaaaaaaatctggccaaaatagtccatatcgttctcgtagtattaaagacaatttattttttttctctaaaatgcgaaatggtgaatttccagaaggaagtgtatgtttgcgagccaaaattaatatgtccgattcttctatgattatgagggatccagtattatatcgaattaaatataccactcatcatcgtgtaggcaaaagttggtgcatttatccgacttatgattttagtcattgtatttctgatgctatagaaggtattactcattcattatgtacattagaatttcaagaaaatcgtcgtttatataattggatattaaaaaatattagtattactaaacatcccattcaatatgaattttctagattaaatataaaatatattattacctctaaacgtaagttaaatttattagttgtaaataatatagtggatggatgggatgacccaagaatgcctactatttctggattaaggcgtagaggttatacagcacgatcaatttgtgaattttgtaaacgtattggaattagtcgtcaagatagttacatagaattatcagagttagaatcttgtattcgtgatgatttgaacaaacactctttaagattaatggctataattaacccaattatggttaaaattattaatttacctacaggatatatagaaaaaattcctatgcctaatcatcctaatgattgcagtatgggaatacgttatgtattttttacgcaagaaatttttattgatcgatttgatcttgatcaatactgtaaaaacagtagatttcctaaattaacgataggacgagaaatacgtttaaggcatgcatatgtcattaaagtagatcattttaaaaaagataccgaaggaaacattatttctgttcattgttattatgatccaactacactaaacagaaaacctatagatggtcgaaaaatacaaggtgttatacattgggtatcagctacaaaaaatatatcagctgaatttcgattatatgataaattatttattcatcctactcctgatattgttataaacatattaaacatcgttaatcctcgttctttagttatttctcacgggtttgttgaattaaatccgatattttcaaataatccaggtccttatcaatttgaaagagaaggttatttcattctagactatcaatatagtaaaccaacttatttagtgtttaatagaactgtaacattaaagaaatctaataaatctattagatttattaagccacaataa

SEQ ID NO: 67729 - protein, 556 aa, Candidatus Blochmannia floridanus
MDNKSNFIYNIINQDLNFKKYTIIHTRFPPEPNGYLHIGHVKSIYLNFNIAKYYHGKCNLRFDDTNPDKESKEYVEAIKSDIQWLGFMWNGEVCYVSDYFEQLYNYAVELIQKGLAYVDELSIYAIREYRGTLKKSGQNSPYRSRSIKDNLFFFSKMRNGEFPEGSVCLRAKINMSDSSMIMRDPVLYRIKYTTHHRVGKSWCIYPTYDFSHCISDAIEGITHSLCTLEFQENRRLYNWILKNISITKHPIQYEFSRLNIKYIITSKRKLNLLVVNNIVDGWDDPRMPTISGLRRRGYTARSICEFCKRIGISRQDSYIELSELESCIRDDLNKHSLRLMAIINPIMVKIINLPTGYIEKIPMPNHPNDCSMGIRYVFFTQEIFIDRFDLDQYCKNSRFPKLTIGREIRLRHAYVIKVDHFKKDTEGNIISVHCYYDPTTLNRKPIDGRKIQGVIHWVSATKNISAEFRLYDKLFIHPTPDIVINILNIVNPRSLVISHGFVELNPIFSNNPGPYQFEREGYFILDYQYSKPTYLVFNRTVTLKKSNKSIRFIKPQ

SEQ ID NO: 67730 - DNA, 1764 bp, Bordetella pertussis Tohama I
  CDS (1)..(1764): transl_table=11
atgacccacgccccgacgccgcctgccgccagcaatttcctgcgcccgatcatcgaagacgacctgcaagcgaaccgcttccagggcaaactgtgggccggcaaacccggcccggccgcgctgcaggcacagggacagcccgacccggcgcgcatccgcacccgctttccgccggagcccaacggctacctgcacatcggccacgccaagagcatctgcgtgaacttcgggctggcgcgcgactacggcggcgtctgccacctgcgcttcgacgacaccaaccccgagaaggaagagcaggagtacgtcgacgccatcatcgaggccgtgcattggctgggcttcgattggcaggccgatggcaatgacaacctgtatttcgccagcgactacttcgaattcatgtacgagttcgccgaggcgctggtgcaggccggccacgcctacgtcgacgagcaaagcgccgaagagatccgcgccagccgcggcacgctgaccgagccgggcaccgactcgccatggcgcgaccgcccggccgacgagtcgctgctgcgcctgcgcgagatgcgcgacggcaagcatcccgacggcagcctggtgctgcgcgcccggatcgacatggcctcgcccaacatcaacctgcgcgacccggtcatgtaccgcgtgcgccatgccacccaccaccgcaccggcaacgcatggtgcatctacccgatgtacagctgggcccatccggtggaagacgccctggaaggcatcacccacagcatctgcacgctggaattcgaagaccagcggccgttctatgactggatcctggcgcgcctggccgagctgggcaagctggcgcgcccgctgccgcaccagtacgagttcgcccggctgaacctgacctacgtggtcaccagcaagcgcaagctgctgcaactggtgcgcgaaggctacgtggatggctgggacgacccgcgcatgccgacgctgttcggcctgcgccggcgcggctacacgccgtcctcgatccggctgttctgcgaccgcaccgcggtatcgaagtcggattcgcgcatcgactacagcctgctcgagcaggcggtgcgcgacgacctcgacccggtggcgccgcgctcggtcgcggtgctggacccgctcaagctggtgatcaccaattacccggaaggccgcagcgagacctgctcggccccgcgcaacccgcacgatccgcaggccggcgtgcgcgaattcccgttcacgcgtgagctgtggatcgagcaggacgacttccgcgaagagccgcccaagaagtacttccgcctgtttcccggcaacacggtgcggctgaagtacggctacgtggtgcgctgcaccggctttaccaaggacgaatcaggcaaggtcgtggaagtgcaggccgaatacctgccggacaccaagagcggcacgccgggcgccgacagcgtcaaggtcaagggcaatatcacctgggtgagcgcggcccacgccgtaccggcccaggtacacctgtacgaccggctgttcgccgacgcgcatcccgacggcggcgacaaggacttcctggcctgcctgaaccccaattccaagcagaccgtgcaggcctggctggagccgggcatcgaggccgtccctggcgccacgtggcagttcgagcggctgggctatttcacggtggacagcaaggactcccgccccgaggcgccggtcctgaaccgcatcgtgaccctgcgcgactcctggcaggcggcctga

SEQ ID NO: 67731 - protein, 587 aa, Bordetella pertussis Tohama I
MTHAPTPPAASNFLRPIIEDDLQANRFQGKLWAGKPGPAALQAQGQPDPARIRTRFPPEPNGYLHIGHAKSICVNFGLARDYGGVCHLRFDDTNPEKEEQEYVDAIIEAVHWLGFDWQADGNDNLYFASDYFEFMYEFAEALVQAGHAYVDEQSAEEIRASRGTLTEPGTDSPWRDRPADESLLRLREMRDGKHPDGSLVLRARIDMASPNINLRDPVMYRVRHATHHRTGNAWCIYPMYSWAHPVEDALEGITHSICTLEFEDQRPFYDWILARLAELGKLARPLPHQYEFARLNLTYVVTSKRKLLQLVREGYVDGWDDPRMPTLFGLRRRGYTPSSIRLFCDRTAVSKSDSRIDYSLLEQAVRDDLDPVAPRSVAVLDPLKLVITNYPEGRSETCSAPRNPHDPQAGVREFPFTRELWIEQDDFREEPPKKYFRLFPGNTVRLKYGYVVRCTGFTKDESGKVVEVQAEYLPDTKSGTPGADSVKVKGNITWVSAAHAVPAQVHLYDRLFADAHPDGGDKDFLACLNPNSKQTVQAWLEPGIEAVPGATWQFERLGYFTVDSKDSRPEAPVLNRIVTLRDSWQAA

SEQ ID NO: 67732 - DNA, 1764 bp, Bordetella bronchiseptica RB50
  CDS (1)..(1764): transl_table=11
atgacccacgccccgacgccgcctgccgccagcaatttcctgcgcccgatcatcgaagacgacctgcaagcgaaccgcttccagggcaaactgtgggccggcaaacccggcccggccgcgctgcaggcgcaggggcagcccgacccggcgcgcatccgcacccgctttccgccggagcccaacggctacctgcacatcggccacgccaagagcatctgcgtgaacttcgggctggcgcgcgactacggcggcgtctgccacctgcgcttcgacgacaccaaccccgagaaggaagagcaggagtacgtcgacgccatcatcgaggccgtgcattggctgggcttcgattggcaggccgatggcaatgacaacctgtatttcgccagcgactacttcgaattcatgtacgagttcgccgaggcgctggtgcaggccggccacgcctacgtcgacgagcaaagcgccgaagagatccgcgccagccgcggcacgctgaccgagccgggcaccgactcgccatggcgcgaccgcccggccgacgagtcgctgctgcgcctgcgcgagatgcgcgacggcaagcatcccgacggcagcctggtgctgcgcgcccggatcgacatggcctcgcccaacatcaacctgcgcgacccggtcatgtaccgcgtgcgccatgccacccaccaccgcaccggcaacgcatggtgcatctacccgatgtacagctgggcccatccggtggaagatgccctggaaggcatcacccacagcatctgcacgctggaattcgaagaccagcggccgttctatgactggatcctggcgcgcctggccgagctgggcaagctggcgcgcccgctgccgcaccagtacgagttcgcccggctgaacctgacctacgtggtcaccagcaagcgcaagctgctgcaactggtgcgcgaaggctacgtggatggctgggacgacccgcgcatgccgacgctgttcggcctgcgccggcgcggctacacgccgtcctcgatccggctgttctgcgaccgcaccgcggtatcgaagtcggattcgcgcatcgactacagcctgctcgaacaggcggtgcgcgacgacctcgacccggtggcgccgcgctcggtcgcggtgctggacccgctcaagctggtgatcaccaattacccggaaggccgcagcgagacctgctcggccccgcgcaacccgcacgatccgcaggccggcgtgcgcgaattcccgttcacgcgcgagctgtggatcgagcaggacgacttccgcgaagagccgcccaagaagtacttccggttgttccccggcaacacggtgcggctgaagtacggctacgtggtgcgctgcaccggttttaccaaggaccaatcgggcaaggtcgtggaagtgcaggccgaatacctgccggacaccaagagcggcacgccgggcgccgacagcgtcaaggtcaagggcaatatcacctgggtgagcgcggcccacgccgtaccggcccaggtacacctgtacgaccggctgttcgccgacgcgcatcccgacggcggcgacaaggacttcctggcctgcctgaacccccattccaagcagaccgtgcaggcctggctggagccgggcatcgaggccgtccctggcgccacgtggcagttcgagcggctgggctatttcacggtggacagcaaggactcccgccccgaggcgccggtcctgaaccgcatcgtgaccctgcgcgactcctggcaggcggcctga

SEQ ID NO: 67733 - protein, 587 aa, Bordetella bronchiseptica RB50
MTHAPTPPAASNFLRPIIEDDLQANRFQGKLWAGKPGPAALQAQGQPDPARIRTRFPPEPNGYLHIGHAKSICVNFGLARDYGGVCHLRFDDTNPEKEEQEYVDAIIEAVHWLGFDWQADGNDNLYFASDYFEFMYEFAEALVQAGHAYVDEQSAEEIRASRGTLTEPGTDSPWRDRPADESLLRLREMRDGKHPDGSLVLRARIDMASPNINLRDPVMYRVRHATHHRTGNAWCIYPMYSWAHPVEDALEGITHSICTLEFEDQRPFYDWILARLAELGKLARPLPHQYEFARLNLTYVVTSKRKLLQLVREGYVDGWDDPRMPTLFGLRRRGYTPSSIRLFCDRTAVSKSDSRIDYSLLEQAVRDDLDPVAPRSVAVLDPLKLVITNYPEGRSETCSAPRNPHDPQAGVREFPFTRELWIEQDDFREEPPKKYFRLFPGNTVRLKYGYVVRCTGFTKDQSGKVVEVQAEYLPDTKSGTPGADSVKVKGNITWVSAAHAVPAQVHLYDRLFADAHPDGGDKDFLACLNPHSKQTVQAWLEPGIEAVPGATWQFERLGYFTVDSKDSRPEAPVLNRIVTLRDSWQAA

SEQ ID NO: 67734 - DNA, 1701 bp, Porphyromonas gingivalis W83
  CDS (1)..(1701): transl_table=11
atgaacgaaaataagaacagcggcatagaggaaaagaagagtcttaacttcatcgaacaaattgtggaatcagacctgtccgaagggaagaatgacggtcgaatccagacacgtttccctccggaacccaacggctatctccatatcggccatgccaaagctatctgcatagacttcgggatagctcagcgatacgggggcgtctgcaacctgcgcttcgacgataccaatccggtgaaagaggacgtggagtacgtggatgccatcagagaagatatagaatggcttggcttccactggggcaatatctactatgcttccgactattttcaggaattgtacgacttcgccgagcgactgatccgcgagggacatgcctatgtggacgaacagactgccgagcagatcgccgcacagaaaggtagcccgactgtgcccggcacggccagtccgttccgcgaccgtccggcagaagagagcctcgacctcttccgtcgaatgaatgtcggagagttcgaagaaggcgccatgaccctacgtgccaagatcgatatggcttcgtccaatatgcacttccgagatccgattatctatcgcatcatcaagcatccgcatcatcgtacaggcaacgaatggaatgtctacccgatgtacgactttgctcacggccagagcgattatttcgaaggagtcacgcattcgatctgcaccctcgaattcgaggtgcatcgtcccctttacaattactttatcgagctgctcagaaaagacagctatgcacctcgtcagatagagttcaaccgcctgaatctgacctatacgatgatgagcaagcgcaagctgctccagctcgtcaaagacgggctggtatcgggctgggacgatccccgtatgcctactttgtgcggctatcgccgtcgtggctatacaccggagtcgatccgcaacttcatagacaaaataggctataccaagtacgatggcattatagacgtagcccttctggagcatgctgttcgggaggacttgaataaacgtgccacaagggtttccggtgtaatcgatccgatcaaactggtgatcacgaactatcccgaggacaagacggaagagatggcagccgtgaacaatccggaagatgagtctgccggcgtacatacgattactttcgctcgcgaactgtacatagagaaggaggatttcatggaggatgctcccaagaaatatttccgaatgacgcccgggcaggaagtacgcttgaagagttcttacatagtccgttgtacgggatgcaaaaaggacgaggacggaaacgtcgtggaagtatatgccgaatacgatccgctgacgctgtccggtatgcctgagagcaaccgcaaagtaaagggtaccatccattgggtatcggcacagcacagtctgccggcagaggtacgactgtacgatcgtctcttcactgacgaaaacccgtcggacatcaaagacaagacactggccgagatgctgaacccggattctctcaaggtgctaaaaaactgccgagtagagcctttcctcgcggatgccgctccgggatcgcacttccagttccagcgcataggttacttcacggtggatccggatagtcgtccgggggcattggttttcaaccgcacggtttcgctgaaagattcttggcagaaagcccaaaagaacgcataa

SEQ ID NO: 67735 - protein, 566 aa, Porphyromonas gingivalis W83
MNENKNSGIEEKKSLNFIEQIVESDLSEGKNDGRIQTRFPPEPNGYLHIGHAKAICIDFGIAQRYGGVCNLRFDDTNPVKEDVEYVDAIREDIEWLGFHWGNIYYASDYFQELYDFAERLIREGHAYVDEQTAEQIAAQKGSPTVPGTASPFRDRPAEESLDLFRRMNVGEFEEGAMTLRAKIDMASSNMHFRDPIIYRIIKHPHHRTGNEWNVYPMYDFAHGQSDYFEGVTHSICTLEFEVHRPLYNYFIELLRKDSYAPRQIEFNRLNLTYTMMSKRKLLQLVKDGLVSGWDDPRMPTLCGYRRRGYTPESIRNFIDKIGYTKYDGIIDVALLEHAVREDLNKRATRVSGVIDPIKLVITNYPEDKTEEMAAVNNPEDESAGVHTITFARELYIEKEDFMEDAPKKYFRMTPGQEVRLKSSYIVRCTGCKKDEDGNVVEVYAEYDPLTLSGMPESNRKVKGTIHWVSAQHSLPAEVRLYDRLFTDENPSDIKDKTLAEMLNPDSLKVLKNCRVEPFLADAAPGSHFQFQRIGYFTVDPDSRPGALVFNRTVSLKDSWQKAQKNA

SEQ ID NO: 67736 - DNA, 1683 bp, Rhodopseudomonas palustris CGA009
  CDS (1)..(1683): transl_table=11
atgacgactgcagatacagcggcgggcgaggcagggcgcgacttcattcgcgacatcgtccaggccgatctcgacagcgggaagcaccggaccatcgtgacccggttcccgccggagcccaacggctatctgcatatcggccatgccaagtcgatcgcgctgaatttcggcatcgcgcaggaattcggcggccgctgccatctgcggttcgacgacaccaatccgaccaaagaagagcaggaatacatcgactcgatccaggccgacgtccgctggctcggcttcgattggggcgagcacatgttctacgcctcggactatttcgagcagctctacgcctgggcggagctgatgatcaaaaacggcgacgcgtatgttgacgatcagtcgcaggacgagatccgcgccagccgcggcacgctgaccgagcccggtaagaacagcccgttccgcgatcgctcggtcgaggagaatctcgacctgttccggcggatgaaggccggcgaattcccgaacggcgcgcgggtgcttcgcgccaagatcgacatggcgtcgggcaacatcaacctgcgcgatccggtgctgtaccgcatcctgcacgcccaccatccgcgcaccggcgacaaatggtcgatctatccgagctacgactacgcgcacggccagtcggatgcgatcgaaggcatcacgcattcgatctgcacgctggagttcgaggatcaccggccgctgtacgaatggctgctgtcgaagctgccggtgccgtcgcagccgcgtcagtatgaattcgcgcggctcaacatcacctacacgctgctgtcgaagcgcgtgctgaccgagctggtgcgcggcggccatgtcgcgggctgggacgacccgcggatgccgacgatcgcgggcatgcggcgtcgcggcgtgccgccggcggcgctgcgcgacttcgtcaagcggatcggcgtcgcgaaagccaacagcgtggtcgatctcggtatgctggagttctgcatccgtgaggaattgaaccgcacggcgcagcggcggatggcggtgctgaagccgctgaaggtggtgatcgagaactacccggaaggccagaccgaagaactcgaggcgatcaaccatccagacgatccgagcctcggcacgcgcaagatcgccttcggccgcgagatctacatcgagcaggacgatttcatggagaacccgccgaagaaattcttccgactgtctccaggcaatgaggtgcggctgcgctacgcctacttcatcaagtgccgcgacgtgatcaagaatgacgccggcgagatcgtcgagctgcgctgcacctacgatccggaaacccgcggcggcaacgcgcccgacggccgcaaggtcaaggcgacgatgcactggctgccggcggcgcagtcggtgaaggcggagatccggatctacaatcagctgttcgccaacccggcgccgagcgcgtcgacctttgccgacgatctcaatccgcagtcgctcgaagtcctgaccgaggcgcggatcgagccggagacggcggcgagcacgtcggccgagccgctgcagttcgagcgccagggttacttcgtccgcgatcgcgactcgaccgcagataagccggtgttcaatcgcaccatcgggttgcgcgatacctttgccaaggaagtcgcgaaggggtga

SEQ ID NO: 67737 - protein, 560 aa, Rhodopseudomonas palustris CGA009
MTTADTAAGEAGRDFIRDIVQADLDSGKHRTIVTRFPPEPNGYLHIGHAKSIALNFGIAQEFGGRCHLRFDDTNPTKEEQEYIDSIQADVRWLGFDWGEHMFYASDYFEQLYAWAELMIKNGDAYVDDQSQDEIRASRGTLTEPGKNSPFRDRSVEENLDLFRRMKAGEFPNGARVLRAKIDMASGNINLRDPVLYRILHAHHPRTGDKWSIYPSYDYAHGQSDAIEGITHSICTLEFEDHRPLYEWLLSKLPVPSQPRQYEFARLNITYTLLSKRVLTELVRGGHVAGWDDPRMPTIAGMRRRGVPPAALRDFVKRIGVAKANSVVDLGMLEFCIREELNRTAQRRMAVLKPLKVVIENYPEGQTEELEAINHPDDPSLGTRKIAFGREIYIEQDDFMENPPKKFFRLSPGNEVRLRYAYFIKCRDVIKNDAGEIVELRCTYDPETRGGNAPDGRKVKATMHWLPAAQSVKAEIRIYNQLFANPAPSASTFADDLNPQSLEVLTEARIEPETAASTSAEPLQFERQGYFVRDRDSTADKPVFNRTIGLRDTFAKEVAKG

SEQ ID NO: 67738 - DNA, 1695 bp, Bdellovibrio bacteriovorus HD100
  CDS (1)..(1695): transl_table=11
gtgtactggtacgctatgagcaagcccaataaaacacctgtagatgcacccaatttcctgaaacaaatcatcgaaaaagacctggagactggcaaagtcaaaggcgaagtggtcacgcgcttcccgccagagccgaacggatacctgcacttgggtcacgccaagtcgatctgtttgaattttggtctggctcaggaataccagggtcgctgccatctgcgttttgacgacaccaatcctgaaacggaagaaaccgaatacgttgaatccatccaggaagacgtcaagtggctgggctatgactggggccaacacctgtattacgcgtctgattacttcgagcagatctatcagtgggctgaacagctgattaaagacggcaaggcctatgtggattcccagaatgaagaggaagtgcgcaagaaccgcggcgacttcacgactccgggtaaggattccccttaccgcaatcgtactgttgaagaaaatctggatttgttccgtcgcatgcgtgccggtgagttcgatgaaggtcagcatattctgcgtgcgaaaatcgacatgcagtctccgaacatgaacatgcgtgacccgttgttgtaccgtatccgcaaggcgcatcaccaccgtactggtgacaagtggtgcatctatccgatgtacgattatgctcaccccttgtctgatgcaatggagcacatcacgcattccatctgtactttggaattccaggatcaccgtccattctatgactggtgtgtgcagaatgttccggtgccggcagagcctcatcaatatgagtttgcacgcatgaacatgacgtatctggtgatgagcaagcgcaagcttttgcaactggtaaaagaaaagctggtttctggctgggatgacccgcgcatgccgactatttccggtgttcgccgtcgtggttacactccggaatccatccgtcgatttgcaaaacgcattggtgtggcgaaatctgaaagcatcatcgaatacgacatcctggaaagctgcgtgcgtgagcacctggatgaaacggctcatcgtgcgatggcggttctggatccaatcaaagttgtgattgaaaacctgccggacggtcataaagagctgattgaaacgtctgtgcatccaaaaaacaccgagttggggaaccgctctttgccgttcactaaagaagtgtacattgatgcggcggacttcatggaaaatccgccggatgattacttccgtctgtctccgggcaaggaagttcgtctgcgcaatgcctatgtgatcaagtgcaaagacgtggtcaaagatgcttccggcaaagtgactgaattgcgctgtgaatatgatcctgtgactttgggcggtaagccgactgccgatggccgcaaagtaaaaggtatcgtccactgggtttcggcaacggattgtgtggatgcggaagtgcgtgtgtacgggcgtctgttcaaagtggcggatccggaaaatgtaccggacggtcaggatttcaaagtgaacctgaatccggactctttgaaggtgatcaagaacgcgaagctggaaaaaggtttgaaggatgcgaaacttgaaaaccgttaccagtttgaacgtgtgggttacttctgcctggacagtaaggactccaagccaggggcgttggtgttcaaccgggttgtcgagctgccatcaagtcactaa

SEQ ID NO: 67739 - protein, 564 aa, Bdellovibrio bacteriovorus HD100
MYWYAMSKPNKTPVDAPNFLKQIIEKDLETGKVKGEVVTRFPPEPNGYLHLGHAKSICLNFGLAQEYQGRCHLRFDDTNPETEETEYVESIQEDVKWLGYDWGQHLYYASDYFEQIYQWAEQLIKDGKAYVDSQNEEEVRKNRGDFTTPGKDSPYRNRTVEENLDLFRRMRAGEFDEGQHILRAKIDMQSPNMNMRDPLLYRIRKAHHHRTGDKWCIYPMYDYAHPLSDAMEHITHSICTLEFQDHRPFYDWCVQNVPVPAEPHQYEFARMNMTYLVMSKRKLLQLVKEKLVSGWDDPRMPTISGVRRRGYTPESIRRFAKRIGVAKSESIIEYDILESCVREHLDETAHRAMAVLDPIKVVIENLPDGHKELIETSVHPKNTELGNRSLPFTKEVYIDAADFMENPPDDYFRLSPGKEVRLRNAYVIKCKDVVKDASGKVTELRCEYDPVTLGGKPTADGRKVKGIVHWVSATDCVDAEVRVYGRLFKVADPENVPDGQDFKVNLNPDSLKVIKNAKLEKGLKDAKLENRYQFERVGYFCLDSKDSKPGALVFNRVVELPSSH

SEQ ID NO: 67740 - DNA, 1758 bp, Yersinia pestis biovar Microtus str. 91001
  CDS (1)..(1758): transl_table=11
ttgtttgccgtaacaaacggttgtttccgggccgggcttgttggattatatgcggttatgtttgttgcgtttgcattgaggaatagaacaatgagtgaggcagaagcccgcccaagtaattttatccgtcaaattattgacgaagatttagccagcggtaaacacacgtcggttcatacccgttttccgccagagcctaacggctatctgcatatcggccatgcaaaatctatttgcctgaattttggtattgctgaagattatcagggccaatgtaatttacgctttgatgacactaatccagtgaaagaagatgtcgagttcgtcgagtcaattaaacgcgacgtagagtggctgggcttcacttggagtggtgatgtacgctattcctcagactactttgatcaactgtatcagtacgctgtggagttgattaacaagggtcttgcgtatgtggatgagctgacccccgagcagatgcgcgaatatcgtggcaccttgactgcgccgggtaaaaatagcccatatcgtgaccgcagtgtggaagagaacctggcgctgtttgaaaagatgcgtgcggggggttttgctgaaggcaccgcctgcttacgggccaaaattgacatggcgtcaccgttcattgtgatgcgtgaccctgtgctgtaccgcatcaaatttgcagaacatcatcaatctggcaataagtggtgcatctacccgatgtatgacttcacccattgcatttccgatgcgctggaggggatcactcattcattgtgtacgttggaattccaggataaccgtcgcttgtatgattgggttctggataatatctcgattgattgtcatccgcgtcagtatgagttctcccgtctgaacctcgaatataccatcatgtctaagcgtaagctgaaccagttggtcacagagaaggtcgttgagggctgggatgatccacgtatgccgaccatttctggcctgcgccgtcgtggttataccgcagcgtctatccgtgagttctgccgccgtattggtgtcaccaagcaggataacaatgtcgaaatgatgtcactggaatcgtgtatccgtgatgatctgaacgaacatgcgccacgggcgatggccgtgcttgacccgattaaggttgttattgaaaatcgcgcggcgggtgaagagtggctgacgatgccaaaccacccgaataaccccgaaatggggagccgtcaggtgccattcgatagcgaaatctacattgatcgggctgatttccgcgaagaagctaacaagcaatataagcgcttggtcttgggcaaagaagtgcgcctgcgtaatgcctacgtgatcaaagctgaacgcgttgagaaagacgcagaaggcaatgtcacgacactttattgcagctatgacgctgagacattaaacaaagatccggctgatggccgcaaagttaaaggggttattcattgggtttctgttgcccatgcgctgcctgcggagatccgtttatacgatcgcttgtttaacgtaccaaacccagcggcagcggaagacttcctgtcaaccatcaaccctgagtccttggttatccgtcagggctttgttgagccaagtctggctgatgcggtatcagataaaacctatcagtttgagcgtgaaggttatttctgtgctgatagccgttattcacgtcccggtgctctggtgtttaaccgtactgtcggcttacgtgatacctgggcggcgaaagccactcagtaa

SEQ ID NO: 67741 - protein, 585 aa, Yersinia pestis biovar Microtus str. 91001
MFAVTNGCFRAGLVGLYAVMFVAFALRNRTMSEAEARPSNFIRQIIDEDLASGKHTSVHTRFPPEPNGYLHIGHAKSICLNFGIAEDYQGQCNLRFDDTNPVKEDVEFVESIKRDVEWLGFTWSGDVRYSSDYFDQLYQYAVELINKGLAYVDELTPEQMREYRGTLTAPGKNSPYRDRSVEENLALFEKMRAGGFAEGTACLRAKIDMASPFIVMRDPVLYRIKFAEHHQSGNKWCIYPMYDFTHCISDALEGITHSLCTLEFQDNRRLYDWVLDNISIDCHPRQYEFSRLNLEYTIMSKRKLNQLVTEKVVEGWDDPRMPTISGLRRRGYTAASIREFCRRIGVTKQDNNVEMMSLESCIRDDLNEHAPRAMAVLDPIKVVIENRAAGEEWLTMPNHPNNPEMGSRQVPFDSEIYIDRADFREEANKQYKRLVLGKEVRLRNAYVIKAERVEKDAEGNVTTLYCSYDAETLNKDPADGRKVKGVIHWVSVAHALPAEIRLYDRLFNVPNPAAAEDFLSTINPESLVIRQGFVEPSLADAVSDKTYQFEREGYFCADSRYSRPGALVFNRTVGLRDTWAAKATQ

SEQ ID NO: 67742 - DNA, 2319 bp, Nasonia vitripennis
  CDS (1)..(2319)
atggcagacgatatcgaattgttcacctctattggtttgacaaaacaaaaagcagcggaaacactcaagaatgcgcaagttactcaaaatttaaaaagcgttatcaacgaggtacagaagcacaaggaaattagtgctgtcaatggggttctattgtatcatcttgcttcgaatttgaaagctcagatcgcacaccggattccatttcttgtacgctacgtggtagatgaaaaactgaatacagtgcagcggttggattgtgctcttgattacttattgaatcacctgaaggaagatgtggacgttaaagagttcgaagaattttgtggaataggagtggtaatctcacctgaagaaatcgaagatgaagttaagaagtatgtaaacaaattcaaggatgaaatcgttgaaaaaaggtacaagtttaacactggtcttattatgcaagaacttagaacttctttgaaatgggcagacggcaaagctatcaaaaatgagattgacattcaattgcttgatttacttggaccaaaaacagagttggataatgttaaggctcctaaaaagtctaaacagccgaatcaatcgcaaccaaaaaatgtgccggatgcctcaaaggaaccagctattaaaaaagttgcggaaccattgagcataaatgaattgataaaaaccaaaattcattttcataaacctggagaaaattttaaaaccgaaggttacgttataacaccaaacactgagaagttattgaaggaacatttggctattactggcggaaaagtaagaacgagatttccaccagaaccaaatggaatcttacacgttggtcatgcaaaggctataaatatcaattttggatatgctgcagcatacaatggttcttgttacttgcgctacgatgatacaaacccagaaaaagaagaagaaaagtttttcactggaattcttgatatcgttcagtggcttggctatgtccctgccaaaattactcattcttcagataattttgatttattgtacgaatgggccttgtgtttgataaagaaaggtttagcttacgtttgtcatcaaaccagcagtgaaatgaaaggttttaaccctgttcctagtccatggcgtgagcgacctgtaagcgaaagcttgagaatctttgaagacatgaaaaatggattgcttgatgagggtgaagctacactacgaatgaaacttactcttgaagaaggaaagcaggatcctgttgcatatcgtattaaatttgctcaccaccatagaacaggaaacaaatggtgtatttatccaacatacgacttcacgcattgcctttgtgatagtattgaacacataacacattcactttgtacaaaagaatttcagtctagacggtcttcgtattattggctttgtaatgctcttgatatatattgtccagtacaatgggagtacggaagattaaatgtgagttatactgttgtttctaaaagaaaaatagcaaaactcattgaaaagaaaatagttgatgactgggatgatccaagattatttactctatctgctctgagaagaagaggcttcactcctgaagctatcaaccgtttctgtgctcaaatgggtgttactggagcacaagttgtgattgatccatctgttcttgaagctgcagttagagatcacctaaatgtttcagcccctcgtcatatggttgtattagaaccacttaaattaaccatagttaattatgagcataatgcaccagttattatggaaatcccagattttccaggagagaaagataaaggagttcattcggttgtttttgatcaaataatctacatcgatgcttctgacttccaagaggaagcagaaagtaattttagacgcttgaccttgaaacagtctgttggcttgaaatacgcaggcattgttgtcaaagtgattgaaatagaacgagacgctaatggaactataacaaatataatggtgcaacaagaacctgtttcagaaaccacgaaacctaaggcatttattcagtgggtatgtcaaccagcaatagccaaagtgcgaatttatgaaaaattatttgagcataaaaatccagaagacataaacgaagtgcctaatggatacttgagtgatattaactacaacagtaaaaaagaaactgtcgcatacattgatcaaaatttgaaaaaaattataaagccgtttgcaaaatatcaatttgaaaggataggatttttctctgttgatcctgattcaaccgctgaaagggctgtattcaacaggaccgtaacgctaaaggagagtaatttgaaatga

SEQ ID NO: 67743 - protein, 772 aa, Nasonia vitripennis
MADDIELFTSIGLTKQKAAETLKNAQVTQNLKSVINEVQKHKEISAVNGVLLYHLASNLKAQIAHRIPFLVRYVVDEKLNTVQRLDCALDYLLNHLKEDVDVKEFEEFCGIGVVISPEEIEDEVKKYVNKFKDEIVEKRYKFNTGLIMQELRTSLKWADGKAIKNEIDIQLLDLLGPKTELDNVKAPKKSKQPNQSQPKNVPDASKEPAIKKVAEPLSINELIKTKIHFHKPGENFKTEGYVITPNTEKLLKEHLAITGGKVRTRFPPEPNGILHVGHAKAININFGYAAAYNGSCYLRYDDTNPEKEEEKFFTGILDIVQWLGYVPAKITHSSDNFDLLYEWALCLIKKGLAYVCHQTSSEMKGFNPVPSPWRERPVSESLRIFEDMKNGLLDEGEATLRMKLTLEEGKQDPVAYRIKFAHHHRTGNKWCIYPTYDFTHCLCDSIEHITHSLCTKEFQSRRSSYYWLCNALDIYCPVQWEYGRLNVSYTVVSKRKIAKLIEKKIVDDWDDPRLFTLSALRRRGFTPEAINRFCAQMGVTGAQVVIDPSVLEAAVRDHLNVSAPRHMVVLEPLKLTIVNYEHNAPVIMEIPDFPGEKDKGVHSVVFDQIIYIDASDFQEEAESNFRRLTLKQSVGLKYAGIVVKVIEIERDANGTITNIMVQQEPVSETTKPKAFIQWVCQPAIAKVRIYEKLFEHKNPEDINEVPNGYLSDINYNSKKETVAYIDQNLKKIIKPFAKYQFERIGFFSVDPDSTAERAVFNRTVTLKESNLK

SEQ ID NO: 67744 - DNA, 2319 bp, Anopheles gambiae str. PEST
  CDS (1)..(2319)
atggaacatctcgtttctctcggtctaaatgagcaaaaaatcaaggaaacgcttaaaaacgcaacccttactagcacaattacacgtgccttctcttacgtcccgccgggtgtggagttaagttcagcacaaaaaccgctgatatttcaggcatgctcaaagataaaaccgcagacggctcaccatttggaacttatagtgagaaaaattttggataacagtttggacactagtctacgtgttgacaccgcactggaatatgttctggctaacgtgacgaaagccactatcgacgaagctactttcgatgcggcttgcggtgtgggagtagttgtgacaccggaagaaatcgagcgggcggttgaaataaccgttgccaaatatcgtagcgatatcgtcgaccaacgttatcgttttaatgtcggaaaattgttgagcgaaattcgaagtgctttgccatgggtggatggtaaagcccttaaaagtgaggtggatgtgcaaatgtttgatttacttggccccaaaacggatgccgatggcgagaaagtgggtaaaaaacgtcgggaaaccccagcctcagatactgcacccaaagcaacctctgtcgttgaaccatcagccgtcaatgctaataatcgaccagaaggccctcgaacgatggttgatctgatgcgtaatgtcgatttccatcgtccaggcgaaaatttcaaaactgatgggtatattattactcccgatacggaacgtctcttgaaggatcatttacagcgaactggtggcaaagtgcgtacccgcttccctcctgagccgaatggaattctgcacattggccacgctaaagctatcaacatcaactttgcttacgcggcagcgaacgatggcatctgcttccttcgttacgatgacaccaatcccgagaaggaagaggaaaaatttgttaaaggcatacgcgacattgtcgaatggctcggttataagccattcaaaattacttactcttcggactacttccaacagttgtacgaatttgctgtgcagctcataagaaaagatatggcttacgtgtgtcatcaaactgctgatcaaatgaagggatttacaaccgaaccatccaagtggcgtaatcgtccaatcgaggaaagcctgcagctgttcgaagacatgaaaaatgggaaaattgatgaaggtgcggcaacattacgcatgaaaatcacgctggaggagggaaaaatggacccggtagcctaccggatcaagtttattccacaccatcggaccggaacaaagtggtgcatctatccgacgtacgactacacacattgtttgtgcgatagtctggaggatatcacccattcgctttgcaccaaggagttccaatcgagaagatcgtcgtattattggctctgtaatgcactcaatatatactgcccagtgcaatgggaatatgcgcggcttaatgttaactacaccgtagtttctaagcgcaaaattaacaagctgatcactgaaaatattgttaacgactgggatgatcctagattattcaccctgtctgctttgcgacgcaagggttatccagccgaagcaatcaacaatttttgtgcccagatgggtctcaccggtgcccaaacgtccattgaccctgctgcactggaagcgtctgccagagatgtattgaatcttgcagcatcacgtacaatggcagtattagaacctctgaagattactatacttgattatccgcatgacgggccaattcaactatcagtgcccaattttccaaacgtgccggagaaaggcgagcacatgatttggttcgatcgtgttgtatatatagagcgaaccgatttcatggaaaatgctgacaaatctttccgtcgactaacgccaggacaaccggttggactgaaatacattggttccatgcttagagtagaaagtgttgttcgaaaatcgggcaccgtcgaggaactagtatgtcgcatagaaccgtgtactgcaaccgaaaaacctaaagcgtatgtacactgggtagctaaaccctgtccagtagaggtacgtttgtatgagaagctgtttatgcacaagaacccagaagacagtaacgatgttcccaatgggtttttgagcgactgtgcttcggacacgattcgttcactgtgcggctatgtcgatgcacatgtcatgaacagtaaagtgtacgataaatatcaattcgaacgcattggttacttctccgtggatccggatagcagaaacggccagcttgttttcaatcgtaccgtcacgcttaaagaagatactggtaaaaatatttag

SEQ ID NO: 67745 - protein, 772 aa, Anopheles gambiae str. PEST
MEHLVSLGLNEQKIKETLKNATLTSTITRAFSYVPPGVELSSAQKPLIFQACSKIKPQTAHHLELIVRKILDNSLDTSLRVDTALEYVLANVTKATIDEATFDAACGVGVVVTPEEIERAVEITVAKYRSDIVDQRYRFNVGKLLSEIRSALPWVDGKALKSEVDVQMFDLLGPKTDADGEKVGKKRRETPASDTAPKATSVVEPSAVNANNRPEGPRTMVDLMRNVDFHRPGENFKTDGYIITPDTERLLKDHLQRTGGKVRTRFPPEPNGILHIGHAKAININFAYAAANDGICFLRYDDTNPEKEEEKFVKGIRDIVEWLGYKPFKITYSSDYFQQLYEFAVQLIRKDMAYVCHQTADQMKGFTTEPSKWRNRPIEESLQLFEDMKNGKIDEGAATLRMKITLEEGKMDPVAYRIKFIPHHRTGTKWCIYPTYDYTHCLCDSLEDITHSLCTKEFQSRRSSYYWLCNALNIYCPVQWEYARLNVNYTVVSKRKINKLITENIVNDWDDPRLFTLSALRRKGYPAEAINNFCAQMGLTGAQTSIDPAALEASARDVLNLAASRTMAVLEPLKITILDYPHDGPIQLSVPNFPNVPEKGEHMIWFDRVVYIERTDFMENADKSFRRLTPGQPVGLKYIGSMLRVESVVRKSGTVEELVCRIEPCTATEKPKAYVHWVAKPCPVEVRLYEKLFMHKNPEDSNDVPNGFLSDCASDTIRSLCGYVDAHVMNSKVYDKYQFERIGYFSVDPDSRNGQLVFNRTVTLKEDTGKNI

SEQ ID NO: 67746 - DNA, 1899 bp, Magnaporthe grisea 70-15
  CDS (1)..(1899)
atggctgacgcaatcacagagggggcggccaagctccagcttgacgaggagacaggcgagatggtctccaagggcgaattgaagaagcgcatgcagaagagagccaagaaagccgcccaagcaaaggccaaagaggctgcccaggccaccgccggcgatgcagagaagaaggcacctgccaaacctgcagcaaaacccgaggaggtggtcattgatgccgatgccatgtttaaacagggtttcctcgacgaagtcttccgcaaccgacccatgaagcccgtattcactcgattccctcccgagcccaacggattccttcacatcggtcacgccaaggctatcgctatcaacttcggatttgcgaggcaccacggcggccaatgctatctgcgttacgacgacacgaaccccgaaaaagaggaggaaaagtacttcacgtccatcgagtccatggtccggtggctgggattctcgccgtacaagattacctactcgagtgacaactttgacaagctctacgagctggctgagaagctaatcaaccttggcaaggcctacgtgtgcaagtgcgacgacgccgagatcaagcttcagcgtggtggcgagaagggcaagtcaccgcggtaccggtgtgcccatgccgaccagaccccggaggacaacctggctcagttccgcgatatgcgtgacggaaagtacaaggagagggaggcattcctgcgcatgaagcaagacatcaccgacggcaaccctcagatgtgggacttggccgcttaccgtgttaagaaagccgagcaccacagaacaggagacaagtggaaaatctacccgacatatgatttcacccactgcttgtgcgattctttcgagggcatcacccactccctctgcacgaccgaattcatccaatcgcgccagagctacgagtggctcaacacaactctcggggtatacgagcctcagcagcgcgaatatggcaggctgggtctcggcggcactgtcctgtcaaaacgcaaaattctcaagcttgtcgagctgggccacgttcgggaatgggacgaccccagactctacactctgacggcaatcaagaggcgcggtgtcccacctggcgccatcctcgaattcgtcaatgagctcggtgtcactacagccgcaactgtgattcaaattaagcggtttgagcagacgattcgccggtaccttgagcgcactgtgccccggttgatgatggttctggacccactacgtgtcgttattgaggacgccgacgatctcgacggcaaacccctctcaatcccattctcttccaaggttcccgagatgggttctcatgacttgaagttcaccaagacagtctacatcgacaggtctgacttccgagaggtcgacagtaaagactacttccgcttggcccctggcaaacccgtgggtctgctgaatgttccgtatcccatcaaggtgaagtcattcagcaaagacaaagcaacgggtgaagtaacagaagttcgggccgaattcgatcgggagaagaaaaagcccaaggcctacattcagtgggtacctgagggttctcgcaaggttgaggcccgtgtgtataatccgttgttcaaatcggagagcccggactccgtagaggggggctttttggcagacatcaatccagagagccagatcatatacccagacgcgctgctagagagcggattcgaagaggtcagacggcgtgcaccatggcctgaagcggctggcgagagcgaactgggcaagggaggaccggagagtgtccggttccaggccactagggtggcttactttgccatggactccgacagcacggaagacaagattgttctcaaccgcattgtgtctctaaaagaagacgccggcaagaactaa

SEQ ID NO: 67747 - protein, 632 aa, Magnaporthe grisea 70-15
MADAITEGAAKLQLDEETGEMVSKGELKKRMQKRAKKAAQAKAKEAAQATAGDAEKKAPAKPAAKPEEVVIDADAMFKQGFLDEVFRNRPMKPVFTRFPPEPNGFLHIGHAKAIAINFGFARHHGGQCYLRYDDTNPEKEEEKYFTSIESMVRWLGFSPYKITYSSDNFDKLYELAEKLINLGKAYVCKCDDAEIKLQRGGEKGKSPRYRCAHADQTPEDNLAQFRDMRDGKYKEREAFLRMKQDITDGNPQMWDLAAYRVKKAEHHRTGDKWKIYPTYDFTHCLCDSFEGITHSLCTTEFIQSRQSYEWLNTTLGVYEPQQREYGRLGLGGTVLSKRKILKLVELGHVREWDDPRLYTLTAIKRRGVPPGAILEFVNELGVTTAATVIQIKRFEQTIRRYLERTVPRLMMVLDPLRVVIEDADDLDGKPLSIPFSSKVPEMGSHDLKFTKTVYIDRSDFREVDSKDYFRLAPGKPVGLLNVPYPIKVKSFSKDKATGEVTEVRAEFDREKKKPKAYIQWVPEGSRKVEARVYNPLFKSESPDSVEGGFLADINPESQIIYPDALLESGFEEVRRRAPWPEAAGESELGKGGPESVRFQATRVAYFAMDSDSTEDKIVLNRIVSLKEDAGKN

SEQ ID NO: 67748 - DNA, 1896 bp, Gibberella zeae PH-1
  CDS (1)..(1896)
atgtccgaccctgtcgctgaggtcaccgaggccactgtcaagctcgtgcttgacgaggtgacaggcgagcaggtcacgcgcaacgagctgaagaagcgaacccagaagcgagctaagaaggctgctgctcaggcatcgcgagaggagaaggcaaagaaccaggaggcaaaccccaagcctgctgcgcccaagcccaaggcccaggagcctacccagctcgaccccgatgctatgttcaagcagggcttcctcgccgatgtatacaaggagagacctgtgaagcctgttgtcacccgattccctcccgagccaaacggataccttcacttgggtcacgccaaggctattgccattgactttggattcgctcgctaccacggtggcaagacgatccttcgattcgatgacacaaaccccgacgaagaggaggagatctattttgaatggatcctgaagatcatcaggtggcttggttttgagcctagcgccatcacacactctagcgacaacttccagaagctattcgatctcgccaaggagcttattaagaaggacaaggcatacgtctgccactgtaacgaagccgagatcaagcttcagcgtggtggaaaggaaggaaaggaaggtccccgataccgttgcgcccatgccgagcaggatgtcgagacaaacctccagaagttccaggatatgcacgatggaaaatacgcaccccagactgctttcctccgcatgaagcaggacatcacaaacggcaaccctcagatgtgggatcttgcggcctaccgcatacctaagaaccagaaggttcaccaccgagcgcccgagtggaagattttccctacctacgatttcacacactgtctttgcgatagtttcgagggtatcacacacagtctgtgcaccaccgagtttattctgtctcgtgaaagctacgagtggctgaacaagtccctcgaggtctacgagccaatgcagcgagagtttggccgacttaatgttagcggaaccatcatgagcaagcgagctctcaagaagcttgttgagggcggatatgttcgagcttgggatgaccctcgtctgtacacactgatcgccatcaagcgtcgcggtatcccccctggcgctcttttggctttcatcaacgagcttggtgttaccacagccaaaacaatcatccagattgcacgattcgagcagaccgtccgccgttacctcgagaacactgtgccacgactcatgcttgtcctggaccctattcccgtgaccattgaggatcacgaggaaactgtagaacttgaggttccttactcccctaaggaccccaagttcggtactcacaaggtccgatttaccaagactgtctacattgaccgatccgatttccgagaggaagacattaagggctacttccgacttgcccctggtaagaccgttggtcttctcaacgctcctcaccctatcaaggctacttcgttcgagaaggatgagtcaggtaaggtcactagcatcaaggctgtgttcgacaaggagagcaagcccaagacctacatccagtgggtgcccgagggctccatcaagttggaggcccgtgtgcaaagccctctgttcaagtctgacgaccctactgcggttgagggcggctttttgaacgacatcaaccccgacagtgaggtcgtctaccctgaggctcttgttgaggagggttttaatgaggtgcgccagcgcgctccttggcctgttacagctggtgagaccaacgaggctagcggccccgagagtgttcgattccaggctatgcgtgtcgcctactttgccatggactcggatagcacagatgacaagattgtgcttaaccgtattgtttctctgaaggaggatcgcgaaaagaactag

SEQ ID NO: 67749 - protein, 631 aa, Gibberella zeae PH-1
MSDPVAEVTEATVKLVLDEVTGEQVTRNELKKRTQKRAKKAAAQASREEKAKNQEANPKPAAPKPKAQEPTQLDPDAMFKQGFLADVYKERPVKPVVTRFPPEPNGYLHLGHAKAIAIDFGFARYHGGKTILRFDDTNPDEEEEIYFEWILKIIRWLGFEPSAITHSSDNFQKLFDLAKELIKKDKAYVCHCNEAEIKLQRGGKEGKEGPRYRCAHAEQDVETNLQKFQDMHDGKYAPQTAFLRMKQDITNGNPQMWDLAAYRIPKNQKVHHRAPEWKIFPTYDFTHCLCDSFEGITHSLCTTEFILSRESYEWLNKSLEVYEPMQREFGRLNVSGTIMSKRALKKLVEGGYVRAWDDPRLYTLIAIKRRGIPPGALLAFINELGVTTAKTIIQIARFEQTVRRYLENTVPRLMLVLDPIPVTIEDHEETVELEVPYSPKDPKFGTHKVRFTKTVYIDRSDFREEDIKGYFRLAPGKTVGLLNAPHPIKATSFEKDESGKVTSIKAVFDKESKPKTYIQWVPEGSIKLEARVQSPLFKSDDPTAVEGGFLNDINPDSEVVYPEALVEEGFNEVRQRAPWPVTAGETNEASGPESVRFQAMRVAYFAMDSDSTDDKIVLNRIVSLKEDREKN

SEQ ID NO: 67750 - DNA, 2388 bp, Candida glabrata CBS 138
  CDS (1)..(2388)
atgtctttggagaagtttgggtacgaggaggcgaagatcaaggagattaccaagaatcagaagattctgagtgagttggagaagcttttgggcgaggtccaggtcggggagttggacaagacgcagagggctatattgcaccagtttgcgacgctactggccaagcggaaggatgccggtgaggtgagcactgctctggttgtggagaatgttgtgaacggtggtatcaagaccaacttgcagatagacgctgcgttcaagtatgtggtggcacacccggatgtggaccaggagacgctggccgccgaggctggtattggtgtgcatgtcggcgaggaggatgtcagacgcaaagttgtggagtatatcgagagcaacaagagcaagattgaagagcagagatacaagcttgtgccagggatcatggcggatgtcaagaagatgccagagttgaagtgggctgaaccacgtttgttcaagcctatcattgatgaagagatcctgaaggccattggtcctaaggacgagagagatgtggtcaagaagcagcctaaggcaaagaagaatgccaagaaggatgacagtggcgacaagagctctgattcaaagggtgagaagagaaccatgttcactgaaggtttcctaggtgacctgcacaaagtcggtgagaacccacaagcttaccctgagttgatggcagaacacttgaaagccactggtggcaaagtccacaccagattcccacctgagccaaatggttacttacatatcggtcattccaaggctatcatggtcaacttcggttacgccaagtaccacgacggtgtgtgctacttgagatttgacgataccaatccagaagctgaagccccagagtactttgagtccattaagagaatggtttcgtggctgggctttaagccatggaaggttacgtactccagtgattacttcgataagctgtacgaattggctgaggttttaataaagaatggcaagggttacgtttgtcactgtactgctgaagaaatcaagcgtggtcgtggtatcaaagaggatggtactccaggtggtgaaagacatgcctgcaaacacagagatcagagtgtagaaaagaacttggaagaattcagagctatgagagatggtaagtacaagccaggtgaagctattctgagaatgaagcaaaacctagaatctccatctccacagatgtgggatttgattgcctacagagtgctaaacgctccacatccaagaactggtaccaaatggaagatttacccaacatacgatttcacacactgtttggttgattctttcgaaaacatcacacactctctatgtactactgaattttacttatcgagggagagttatgaatggctatgtgaccaggttcacgtctttagaccagcacagagagagtatggtcgtctaaacatcaccggtacggttttatccaagcgtaagattgctaagcttgttgatgaacatttcgttagaggttgggatgacccaagattatttactttggaagccattcgtagacgtggtgttccaccaggtgcaatcttatctttcatcaatacacttggtgtcacaacaagcacaaccaatattcaagttgttagatttgagagcgcaatcagaaagtacttggaagattctactccaagattgatgatgattcttgatccaattgaggtcgttgttgaaaacctaccagaggactatgaagaacttgttactattccatacagagctggtaccaaagaattcggtgacagaaatgtcccattcactaataagttttacattgaaagggcagatttctccgaaaatacagaagacaaggaattcttcagacttactccaaaccaaccggttggtttgattaaagttccatacactgtttctttcaagagtgttgagaaggatgctgatggtaagatcactagaattcatgttaagtacgataatgaagacaagccagtgaagccaagaacttacatccaatgggttcctatctccaagaagtacaactccccagtacgtgtttctgaaaccagagtttataaccaactcttcaagtctgaaaatccatccgctcatccagatggttatttgaaagacatcaaccctgaaagtgaggtcatttatgataagtctgtcattgaacataatttcgaccacgttatcaagaactccccatgggttgttgattccgttaagaattctgaattttatgttaaagaagataagtccggaaaggaaatttgtagattccaggctatgagagttggttacttcactcttgacaaggagagcactgatgataagatcattctaaatagaattgtctccctaaaagacaacactaaataa

SEQ ID NO: 67751 - protein, 795 aa, Candida glabrata CBS 138
MSLEKFGYEEAKIKEITKNQKILSELEKLLGEVQVGELDKTQRAILHQFATLLAKRKDAGEVSTALVVENVVNGGIKTNLQIDAAFKYVVAHPDVDQETLAAEAGIGVHVGEEDVRRKVVEYIESNKSKIEEQRYKLVPGIMADVKKMPELKWAEPRLFKPIIDEEILKAIGPKDERDVVKKQPKAKKNAKKDDSGDKSSDSKGEKRTMFTEGFLGDLHKVGENPQAYPELMAEHLKATGGKVHTRFPPEPNGYLHIGHSKAIMVNFGYAKYHDGVCYLRFDDTNPEAEAPEYFESIKRMVSWLGFKPWKVTYSSDYFDKLYELAEVLIKNGKGYVCHCTAEEIKRGRGIKEDGTPGGERHACKHRDQSVEKNLEEFRAMRDGKYKPGEAILRMKQNLESPSPQMWDLIAYRVLNAPHPRTGTKWKIYPTYDFTHCLVDSFENITHSLCTTEFYLSRESYEWLCDQVHVFRPAQREYGRLNITGTVLSKRKIAKLVDEHFVRGWDDPRLFTLEAIRRRGVPPGAILSFINTLGVTTSTTNIQVVRFESAIRKYLEDSTPRLMMILDPIEVVVENLPEDYEELVTIPYRAGTKEFGDRNVPFTNKFYIERADFSENTEDKEFFRLTPNQPVGLIKVPYTVSFKSVEKDADGKITRIHVKYDNEDKPVKPRTYIQWVPISKKYNSPVRVSETRVYNQLFKSENPSAHPDGYLKDINPESEVIYDKSVIEHNFDHVIKNSPWVVDSVKNSEFYVKEDKSGKEICRFQAMRVGYFTLDKESTDDKIILNRIVSLKDNTK

SEQ ID NO: 67752 - DNA, 2415 bp, Kluyveromyces lactis NRRL Y-1140
  CDS (1)..(2415)
atgtcatctgtagacgagttgaccaatctattttccaagattgggttcgaagaagctaaagtaaaggaaatcttaaagaatgctaaagtatccagctccctagagtccttagtaaacttggcatctgatgatttcccatggaacaagaattctagagctttaattcacacgttagcagcctctttaaagggagctgaagttcctcatttgcaatatatcgttgatggtattggtaagaatgatttgaagactgcattgcagatagatgcagctttgaagtacttgaagaccaagggtgaggatgccactgttgtggacttgaacaaagagtccggtgtcggtattgaagttactgaagatcaagttagaaaccgtgttgctaagtacgttgaggataacaaagataccattttgaaggaaagatacaagttagtgcctggtctatttgccaaaatcaaagctctccccgaattaaaatgggctgaaccacgtttgttcaaaccaatcattgacgaagaaatcttgaaggttttgggtccaaaagatgaaagagatatcgtaaagaaggaaaagaaaccaaaggctgaaaagaaggctaatggcaaagcaagcaaggaccaaacagaagaagatggtccaaagagatctatgttcacagaaggtttcttgggtgacttgcataaggttggagaaaatgagcaggcctacccagaactaatggctgagcatctcaaggctaccggtggtaaagtacacactagattcccaccagaacctaacggatatttacatattggtcattctaaggccattatggttaactttggcttcgctaaataccataacggggtatgttatctaagatttgatgataccaaccctgaagcagaagctccggaatatttcgagagtatcaaaagcatggtatcatggttggggttcaaaccatggaaaactacctattcctctgattacttcgatgagttataccaattagctgaaactttgattaagaacggaaaggcttatgtctgtcactgctctgcagaagaaataaaacgtggccgtggtatcaaagaagatggtacacctggtggtgaaagaaaagcttgtgtctccagagaaagacctattgaggaaagcttaactgagttcagaaagatgagagacggattctacaaaccaggtgaagcaatcttaagaatgaaacaagatttgaactctccatcaccacaaatgtgggatttgattgcttatagggtcttggatgctccacatccaagaactggtgacaaatggaaaatttacccaacatacgacttcactcactgtttagtcgattccttagaaaacattacccactccttgtgtaccacagaattttacttgtctagagaaagttacgaatggctatgtgaccaagtgcacgtcttcagaccagctcaaagagaatatggtagattgaacatcaccggtaccgttctatctaagagaaaaattgctaaacttgttactggtggatacgtcagcggatggaatgatcctcgtttattcacattggaagctatccgtagacgtggtgttccaccgggagccattctatctttcattaacactttgggtgtgaccaccagtaccactaatatccaagtcgtaagattcgaaagtgctattagaaagtacttggaagacactacacccagactcatgttcattttggatccagtggaagtggttgtggacaatgtcgatgaagatttcgttgagctatgtaacatcccatacaggccaaacactccagagttcggtgatagaaccgtcccattcaccaagagattctacatcgaaagaagcgacttctcggaagacgttgacaacaaggagttcttcagattaacacctaaccaatcagttggtttaatcaaagtaccatacaccgtatcctaccaatctttagagaaggatgcgaacgggaagatcactaaaattcatgttaaatatgagaacgaggaagccaaaccaaagaaaccaaagacctacattcaatgggtgccaatctccgaaaagcacgactccccagtaagaattgcggaaactagagtttacaaccaattgttcaagtccgaaaacccatcagcgcacccagatggttacttatctgatattaacccagacagcattatcgtgtacaagagttctgtcgctgaatacaacatcaacagcattataaagaactcgccatgggtcgtggacagtgcaaagaagtctgaattctatgtggaagaagaaaagggaagaaaggaagtctgcagattccaagccatgagagttggttatttcaccttggactctgatagcacagatgaaaagatcgtcttgaacaggatcgtttccttgaaagacggtactaaatga

SEQ ID NO: 67753 - protein, 804 aa, Kluyveromyces lactis NRRL Y-1140
MSSVDELTNLFSKIGFEEAKVKEILKNAKVSSSLESLVNLASDDFPWNKNSRALIHTLAASLKGAEVPHLQYIVDGIGKNDLKTALQIDAALKYLKTKGEDATVVDLNKESGVGIEVTEDQVRNRVAKYVEDNKDTILKERYKLVPGLFAKIKALPELKWAEPRLFKPIIDEEILKVLGPKDERDIVKKEKKPKAEKKANGKASKDQTEEDGPKRSMFTEGFLGDLHKVGENEQAYPELMAEHLKATGGKVHTRFPPEPNGYLHIGHSKAIMVNFGFAKYHNGVCYLRFDDTNPEAEAPEYFESIKSMVSWLGFKPWKTTYSSDYFDELYQLAETLIKNGKAYVCHCSAEEIKRGRGIKEDGTPGGERKACVSRERPIEESLTEFRKMRDGFYKPGEAILRMKQDLNSPSPQMWDLIAYRVLDAPHPRTGDKWKIYPTYDFTHCLVDSLENITHSLCTTEFYLSRESYEWLCDQVHVFRPAQREYGRLNITGTVLSKRKIAKLVTGGYVSGWNDPRLFTLEAIRRRGVPPGAILSFINTLGVTTSTTNIQVVRFESAIRKYLEDTTPRLMFILDPVEVVVDNVDEDFVELCNIPYRPNTPEFGDRTVPFTKRFYIERSDFSEDVDNKEFFRLTPNQSVGLIKVPYTVSYQSLEKDANGKITKIHVKYENEEAKPKKPKTYIQWVPISEKHDSPVRIAETRVYNQLFKSENPSAHPDGYLSDINPDSIIVYKSSVAEYNINSIIKNSPWVVDSAKKSEFYVEEEKGRKEVCRFQAMRVGYFTLDSDSTDEKIVLNRIVSLKDGTK

SEQ ID NO: 67754 - DNA, 2385 bp, Debaryomyces hansenii CBS767
  CDS (1)..(2385)
atggcgtcagaagaagaattgatcaacttgtttagcaaagttgggttcaatgataagaaatctaaagaagtttgcaaaaataaaaaggtttcccaatcattagcagaaatcatcaatgagtcaaaggtggaagaaacagatgaaaagaagctttctttgttgcatgcgttagccgttgagagtaaaggaggagatgttcctagacgtgaattaattacgaaggctattattgatggtagattgaagactaacttacaggtcaccgaagcattcaaatatgtcaaggaaaaccccgaaactgccaacaacgaaaccatggaagaaaagtcaggggttggtattgagctcagtgattccgatgttgaaagagagattaaaaagtacatggaagcccataagtctgatattgagactaagagatactcgattgttcctagtctattaggtgacgtcaagaaggtaccagaattgaaatgggccaagccaaacttattcaagccaattattgacagtttggtcttggagatgattggaccaaaggatgagagagatgtcgttaagaaggaaaagaagaagctgactaaaaagcaagttgaaaccaagaaggaagcacagattgagagatcgatgttttccgaagggtttttgggtgacttacacaagcctggtgaaaatccacaaaaatatcctgaattaatgaaagaacatttagaattcaccaagcgtaaagtattcactagattcccaccagaaccaaacggatatttgcacatcgggcattcgaaggcaattatggttaattttggatatgctaagtacaatggtggtaactgctacttaagattcgacgacaccaaccctgaagcggaagaagaagtgtatttcaagtcaattgaaaaaatgattgactggttaggatatgaaccatggaaagttactcattcatccgactattttgatgagttatacgatttagctgagagattaatcagcttaggtaaaggttatgtttgccattgtacggcggaagaagttaaggctcaaagagggttgaaggaagatggtaccttaggtggagaaaggtttgcatgtaagcatcgttcaagaagcgttgaagatagtatggctgaattccgtaagatgaagaacggtgaatataagagtggagaggctaccttgagaatgaagcaagacttggaatcgccatctccacaaatgtgggatcttgttgcgtacagagtcttaaacaagccccaccacaggactggagacaaatggaagatctacccaacatacgattttactcactgtcttgttgattcttttgaaaacattagtcattcattatgtactactgaatttagactttctagagagtcttacgaatggttgtgtgacgagctacacgtttacagaccagcacaaagagaatatggtagattaaatattactggtaccatattgagtaagagaaagattgctaaattagtcaacgaaggtattgttagaggatgggatgatcctagattgtacacgttagaagctatccgtcgtcgtggggttccaccgggcgctattttaagtttcatcaacacgttaggggtcaccacttcaactactaatattcaagcagtgagactcgacagtgctatcagagcattcttggaccaaacgaccccaagattgatgatgattcttgaccctgtcgaagtcgaagttgagaacttaccagaagggtacgaggaaatggtcgaggtgccatacaaaccgggtgacaccgttaagttcggaaccagaaaggttccgttcaccaagcgtttctatattgacagatctgactacagagactctacttccgacgactactttagattagcccctggccaaccagttgggttaattagggtaccattcaatgtttctgtcaaggacgttgtcaaggatgacgcaggtaaggtgacgaagatcatcgcgcactacgacaacgacggtacgttcaaaaagcctaagacttatatccaatgggtcccaaaatcggcctcttcaccaatcaaggtcaacgaggtgaggattcagaaccaattgttcaacagcgagaacccatcagctcacccagacggattcttgaacgatctcaacgagcaatcggaagagatctaccgcgatgcgattgtcgagtcggctttcactgaaattaaggagaaatcgccattgaatattcctatcgaaggaagcgagttcaacatcaaggagaagccgagtgtcgaaacggtgagattccaggccttgagagtgggatacttctgcatggacaaggattcgagcgcggacaaattggtgttgaaccgtattgtcactttgaaggaggactcgtcgaaaaattga

SEQ ID NO: 67755 - protein, 794 aa, Debaryomyces hansenii CBS767
MASEEELINLFSKVGFNDKKSKEVCKNKKVSQSLAEIINESKVEETDEKKLSLLHALAVESKGGDVPRRELITKAIIDGRLKTNLQVTEAFKYVKENPETANNETMEEKSGVGIELSDSDVEREIKKYMEAHKSDIETKRYSIVPSLLGDVKKVPELKWAKPNLFKPIIDSLVLEMIGPKDERDVVKKEKKKLTKKQVETKKEAQIERSMFSEGFLGDLHKPGENPQKYPELMKEHLEFTKRKVFTRFPPEPNGYLHIGHSKAIMVNFGYAKYNGGNCYLRFDDTNPEAEEEVYFKSIEKMIDWLGYEPWKVTHSSDYFDELYDLAERLISLGKGYVCHCTAEEVKAQRGLKEDGTLGGERFACKHRSRSVEDSMAEFRKMKNGEYKSGEATLRMKQDLESPSPQMWDLVAYRVLNKPHHRTGDKWKIYPTYDFTHCLVDSFENISHSLCTTEFRLSRESYEWLCDELHVYRPAQREYGRLNITGTILSKRKIAKLVNEGIVRGWDDPRLYTLEAIRRRGVPPGAILSFINTLGVTTSTTNIQAVRLDSAIRAFLDQTTPRLMMILDPVEVEVENLPEGYEEMVEVPYKPGDTVKFGTRKVPFTKRFYIDRSDYRDSTSDDYFRLAPGQPVGLIRVPFNVSVKDVVKDDAGKVTKIIAHYDNDGTFKKPKTYIQWVPKSASSPIKVNEVRIQNQLFNSENPSAHPDGFLNDLNEQSEEIYRDAIVESAFTEIKEKSPLNIPIEGSEFNIKEKPSVETVRFQALRVGYFCMDKDSSADKLVLNRIVTLKEDSSKN

SEQ ID NO: 67756 - DNA, 2382 bp, Yarrowia lipolytica CLIB122
  CDS (1)..(2382)
atgtccgacgttgccgagctcagcaccaagctggaacatctcggttttgccgagcccaagatcaaggaggtgttgaaaaacaaaaaggtcgccgcctccttcaacgacattctcaacgtagtgaacgtgggcaaggacgagaagcgagctgctctactccacaacctcgcctcgtcctccaaggacgccaaggatgaagccgtgatcaagaagcgaaatgaggtcgcctctgccattgccgacggccgaatcaagaccaacgtgcagctggacgccgcctggaagtgggcccaggacctacacagctccgagagcctcgatcaggctgctggcgtgggcattgaggtcacccgggacgacgtttatcgtgagattgccgcctacattgccgcaaacaaggctcagctcgaggaggagcgatacaaggccctgcctggtgtcatggtggctgccaagaagatccctgctctcaagtgggccaaccctgccgactttaagcccgtgatcgacgagcagctcaaggagcttctgggacccaaggatgagcgagatctcgtcaagaagaaggcgcccaaggccaagcctgctgccaaggatgctgccaagaaggaggagcctgagaaggtgtctgccaccgccatgttcaccaccggtttcctgggcaacctgcacaagactggagagaaccctcaggccaacatggagcgaatggttgagcatctcaaggccaccaagggccaggttttcacccggttccctcccgaacctaacggatacctgcacattggccactccaaggccatcaccgttaactttggctatgcccagttcaacaagggtaagtgctacctgcgatttgacgacacgaaccctgaggccgaggaggagcgattcttcacttccattcgagagaccattgagtggctgggcttcgagccctacaaggtcacctactcgtcggactacttccaggagctgtacgacctagctgagaagctgatcgagtgtggaggtgcgtttgtgtgtcaccagaccgccgaggagatgaaggcttcccgaggagtgtctgagggatctcgaggaggcgagcgagtgccttctccctggagaaacagaaccgtggaggagaacctggtggagttccgaaagatgcgagacggccactacaagcccggagaggcagttttgcgaatgaagcaagatctcaacaaccccaacccccaaatgtgggatctggttgcctaccgagtactcaacgctccccatcaccgaactgccgacaagtggaagatttaccctacctacgacttcacccactgtctggttgattcgctggagaatatttcgcattcgctttgtaccaccgagttctacctctcccgtgagtcatacgagtggctgtgtgacgctgtggacgtctaccgaccagcccagcgagagtatggccgacttaacatcactggaaccgttctttccaagcgaaagattgccaagctcgtttctgagggtcatgttcgaggctgggatgatccccgtctcttcactctggtcgctattcgacggcgaggtattcctcctggagccattctcaactttgtctccactctcggtgtcaccactgccgagtccaacattcagcattctcgatttgagaacaatgtgcggaagtaccttgaggacactactcctcgtctcatgatggtgctggaccccgtcaaggtgaccattgagaacctgcctgaggaccactttgaagagtttgacatgccctttggcaagaatgacgagcggtcgcgaaaggtgcccttcacccgagagctgtacattgaccgaagcgactttgaggagtctgctggcaaggagttcttccgactcactgctactcagcccgtgggtctgctcaaggtgccccacaacatttctctcaaggaggtcaagaaggatgctgctggaaacatcaccgagctgatttgccatctcgacaacgacattcccttcaagaagcccaagacatacatccagtgggtccccgagtgtgctgccaagaagtctcccgtcaagatttccgagacccgaatcttcaagcagctcttcaagtccgagaaccctcagggccaccccgatggataccttgcagatcttgctgaggagtccgaggtcatccacaagcatgctcttgtcgagcccggcttctacgacgtcaaggagaactctccttgggtcactggtgagcatactggcaaggagaagaagggatcccccgagagtgtgcggttccaggctcttcgagtgggatacttttgcatggataaggattctactgagaaggatattgttctgaaccagattgtttctctgaaggaggataaccagaagaagtaa

SEQ ID NO: 67757 - protein, 793 aa, Yarrowia lipolytica CLIB122
MSDVAELSTKLEHLGFAEPKIKEVLKNKKVAASFNDILNVVNVGKDEKRAALLHNLASSSKDAKDEAVIKKRNEVASAIADGRIKTNVQLDAAWKWAQDLHSSESLDQAAGVGIEVTRDDVYREIAAYIAANKAQLEEERYKALPGVMVAAKKIPALKWANPADFKPVIDEQLKELLGPKDERDLVKKKAPKAKPAAKDAAKKEEPEKVSATAMFTTGFLGNLHKTGENPQANMERMVEHLKATKGQVFTRFPPEPNGYLHIGHSKAITVNFGYAQFNKGKCYLRFDDTNPEAEEERFFTSIRETIEWLGFEPYKVTYSSDYFQELYDLAEKLIECGGAFVCHQTAEEMKASRGVSEGSRGGERVPSPWRNRTVEENLVEFRKMRDGHYKPGEAVLRMKQDLNNPNPQMWDLVAYRVLNAPHHRTADKWKIYPTYDFTHCLVDSLENISHSLCTTEFYLSRESYEWLCDAVDVYRPAQREYGRLNITGTVLSKRKIAKLVSEGHVRGWDDPRLFTLVAIRRRGIPPGAILNFVSTLGVTTAESNIQHSRFENNVRKYLEDTTPRLMMVLDPVKVTIENLPEDHFEEFDMPFGKNDERSRKVPFTRELYIDRSDFEESAGKEFFRLTATQPVGLLKVPHNISLKEVKKDAAGNITELICHLDNDIPFKKPKTYIQWVPECAAKKSPVKISETRIFKQLFKSENPQGHPDGYLADLAEESEVIHKHALVEPGFYDVKENSPWVTGEHTGKEKKGSPESVRFQALRVGYFCMDKDSTEKDIVLNQIVSLKEDNQKK

SEQ ID NO: 67758 - DNA, 2331 bp, Apis mellifera
  CDS (1)..(2331)
atggatgtaaaagatgatatacaattatttgaatctattggtttaagtgaacaaaaagcaaaggaaactttaaaaaataaacaagtttctaataatttgaaacttgctataatagaggctaataagtatggaattattacaccagaaattggaattttgttatatcatcttgcttcaaaaattaaaaatcaaattgtagataaattgtcatttcttgctaaatatatagctgaaaaaaaattagatacaattcaaagactagatgctggtttaaattatttgcttaatcatataaaagagaatattgatatatttgattttgaaaaagaatgtggtataaatattgttgtatcaccagaagaaatagaatatgaagtagaaaaagtaataaatgcacataaaatagaaataacagagaaaagatatcattttaatattggtccattaatgcaacaagtacgtaatattttaaaatgggcagatggaaaagcaataaaaaatgaatttgatattcaaatgcttgatttgttaggtccaaaatgtgagtctgatcttgtaccattaagtaaatcaataaaacaagcaaaaatgcgaaaaccagtgaaagaaaaaatggaatcaaaaaatatgacaataacaaatgataaagaagatgctcagacaataaatgaattaatgaaaactaaagttaattttcataaaccaggagaaaattataaaactgaaggatatattataacaccaaatacacacaaattacttcaagaacatttaaaaataacagatggtaaggtaataactagatttccaccagaacctaatggaattttacatattggtcatgcaaaagcaattaatattaattttggatatgcagcagctcatgatggaatctgttacttacgttatgatgatacaaatcctgaaaaagaagaagaaaaattttttattggtattcatgaaatggtagagtggcttggttataaaccagctaaaattactcattcttctgattattttcaacaattgtatgaatgggctgttatgcttattaaaaaagatttagcatatgtctgtcatcaatctagtgaagacataaaaggtttcaatccacctccaagtccctggcgaaatagaccaatttcagaaagtttacaattatttgaagatatgaaaagtggtttacttgaagaaggtgaagccacattacgaatgaaagtaacattagaagaaggtaaacaagatccagttgcatatagaataaaatatactccacatcatagaacaggaaatcaatggtgtatttatccaacttacgactttactcattgtttatgtgacagtatagaaaatataactcattctctttgtacaaaagaatttcaatcaagaagatcatcatattattggctttgtaatgctttagatatttattgtcctgtgcaatgggaatatggtagattaaatattagttatacagttgtttctaaaaggaaaataaataaattaattgaagaaggcattgtatcagattgggatgatccaagattatttacattaacagctcttcgcaggcgaggttttccacctgaagctataaataatttttgtgcacaaatgggtgtaactggtgctcaagtaattgttgatccagctgctttagaggcatctgttagagatgttttaaatataactgcaagtcgacatatggtagttttagatccattaaaaataactattagcaattttcctcacgaaaaatctataaaagtaacagttcttaactttcctaatgatccagacaaaggcaaacatgagattgactttgatgaaattgtatatattgaaacatctgatttcaaggagaaagcagaaaaaaattttagacgtttaacaccaaaccaatccgttggtttaaagcatgtaggaatagtattaacaatcaaggaaattgaaagagatagtaccggtaatattgtgaatcttatagtcaaacaagaatctatttctgaaactaataaacctaaagcctttatacattgggtatcaaatcctatattagcatccattagattatatgaacgtttatttaaacataaaaatcctgaagatattaatgaggtaccaaatggctttttaagtgatattaattcagtcactaaaaaagaaattgttggatatattgataaaagtttagcaaattcagcaaaaatttttgagaaatatcaattcgaacgtataggctttttttctgtagatcctgatacgctaccgggaaagcttgtttttaacagaaccgtaacattaaaagaagatgcaggaaaaatataa

SEQ ID NO: 67759 - protein, 776 aa, Apis mellifera
MDVKDDIQLFESIGLSEQKAKETLKNKQVSNNLKLAIIEANKYGIITPEIGILLYHLASKIKNQIVDKLSFLAKYIAEKKLDTIQRLDAGLNYLLNHIKENIDIFDFEKECGINIVVSPEEIEYEVEKVINAHKIEITEKRYHFNIGPLMQQVRNILKWADGKAIKNEFDIQMLDLLGPKCESDLVPLSKSIKQAKMRKPVKEKMESKNMTITNDKEDAQTINELMKTKVNFHKPGENYKTEGYIITPNTHKLLQEHLKITDGKVITRFPPEPNGILHIGHAKAININFGYAAAHDGICYLRYDDTNPEKEEEKFFIGIHEMVEWLGYKPAKITHSSDYFQQLYEWAVMLIKKDLAYVCHQSSEDIKGFNPPPSPWRNRPISESLQLFEDMKSGLLEEGEATLRMKVTLEEGKQDPVAYRIKYTPHHRTGNQWCIYPTYDFTHCLCDSIENITHSLCTKEFQSRRSSYYWLCNALDIYCPVQWEYGRLNISYTVVSKRKINKLIEEGIVSDWDDPRLFTLTALRRRGFPPEAINNFCAQMGVTGAQVIVDPAALEASVRDVLNITASRHMVVLDPLKITISNFPHEKSIKVTVLNFPNDPDKGKHEIDFDEIVYIETSDFKEKAEKNFRRLTPNQSVGLKHVGIVLTIKEIERDSTGNIVNLIVKQESISETNKPKAFIHWVSNPILASIRLYERLFKHKNPEDINEVPNGFLSDINSVTKKEIVGYIDKSLANSAKIFEKYQFERIGFFSVDPDTLPGKLVFNRTVTLKEDAGKI

SEQ ID NO: 67760 - DNA, 1887 bp, Aspergillus nidulans FGSC A4
  CDS (1)..(1887)
atgacggaagctcttgctgaggctacggccaagctggtcctcgacgaggagaccggcgagatggtctccaagaacgagctcaagaagcggactcagaaacgcgccaagaaggccgccgctgccgccgcgaaagcaaaccaggcccagaagcctgcgacgccaaagcccaaaactgaagtgaaacctgcggaggaaaccccgctggaccctgacgccatgttcaagcagggcttcctcgccaatgtcttccgcgagcgccctatgaagccggtcctcactcgattcccgcccgagccgaacggatatctacacttgggacattgcaaggctattgcggtaaacttcggttttgcgcggtaccatggaggagagacgatccttcggtttgacgacacaaatcctgaagctgaggaggagaagtattttacggctattgaggacatcattcagtggcttggattcaaacctgctagaataacccactcgagcgaccacttccagaagctctatgagcacgccgagaaactcatccagctcggaaaagcctacgtatgccactgcagcgatacagaaatcaagctgcagcgcggcggcgagaaccacggtgcgcgttatcgatgcaaggacgcggagcaggatgtcgagacaaacctcaaaaagttcagggacatgaaggatggcaaatacgaaccccagacggcgttcttgaggatgcgccaggacattgacaaccccaatcctcagatgtgggatcttgccgcctaccgagtcctgaagaaggaacaccacaaagcgcccggctgggttatcttcccaacatacgattttgcgcactgtctctgcgatagcttcgaaggaatcacccacagtctgtgcacgactgagttcgtcttgtcacgggaaagttatgaatggcttaactcgactcttggagtctacgagcccatgcagcgcgagtacggccggttaaacgtcagtggaacgatcatgagcaagcgaggcctgaagaagctggtcgacgggggctatgttcgagcatgggacgacccccgtctgtacactgttattgctctccgtcgacgcggtgtccctccggaggctatcttgtcgtttgttaacgagctcggggtgactaccgctaactctgtcatcaacatcgctcgtttcgaacagtctatccgtacctacctcgaatcgcgtgtaccccgtcttatgctcgttcttgacccgctccctgttgttattgaagactttgataccctcagtgcagaacagctcaacctcgatattcctttctcgcccaaagaccctgcgatgggctcacaccaggtcggcttcaccaaaacggtctacatcgatcgttctgacttccgagaggaagatgccaagggttacttccgtcttgcacctggcaagagtgtcggtctgtggaaggccccgtacccgatcaaggcgaccaccttcactaaggatgccgatggaaaaatcacggaagttcgtgccgtcctggacaaggatggtggaaagccaaagacgtacatccactgggtccctgagggatcgcgcaagcttgaagtccgcatccacgaccaactgttcaagtccgacgagcctgccgctgccgagggtggcttcctcgcggacattaacccgaacagtgagaccatctacgcagacgccatgattgagtcaggtttcgacgaggtgcggcgcagggcaccgtggcctgaagccgcgggtgagacgagcgagggaactcctcgaccagagactgttcgcttccagggcatgcgggtggcctactttgccatggactcggactccaccgacagccacgttgtgctcaaccggattgtatccctgaaacaggatacgggcaaggcgtaa

SEQ ID NO: 67761 - protein, 628 aa, Aspergillus nidulans FGSC A4
MTEALAEATAKLVLDEETGEMVSKNELKKRTQKRAKKAAAAAAKANQAQKPATPKPKTEVKPAEETPLDPDAMFKQGFLANVFRERPMKPVLTRFPPEPNGYLHLGHCKAIAVNFGFARYHGGETILRFDDTNPEAEEEKYFTAIEDIIQWLGFKPARITHSSDHFQKLYEHAEKLIQLGKAYVCHCSDTEIKLQRGGENHGARYRCKDAEQDVETNLKKFRDMKDGKYEPQTAFLRMRQDIDNPNPQMWDLAAYRVLKKEHHKAPGWVIFPTYDFAHCLCDSFEGITHSLCTTEFVLSRESYEWLNSTLGVYEPMQREYGRLNVSGTIMSKRGLKKLVDGGYVRAWDDPRLYTVIALRRRGVPPEAILSFVNELGVTTANSVINIARFEQSIRTYLESRVPRLMLVLDPLPVVIEDFDTLSAEQLNLDIPFSPKDPAMGSHQVGFTKTVYIDRSDFREEDAKGYFRLAPGKSVGLWKAPYPIKATTFTKDADGKITEVRAVLDKDGGKPKTYIHWVPEGSRKLEVRIHDQLFKSDEPAAAEGGFLADINPNSETIYADAMIESGFDEVRRRAPWPEAAGETSEGTPRPETVRFQGMRVAYFAMDSDSTDSHVVLNRIVSLKQDTGKA

SEQ ID NO: 67762 - DNA, 2400 bp, Candida albicans SC5314
  CDS (1)..(2400): transl_table=12
atgtcaacaaaaactgatatttctactgaagaattggtttccttattcagtaaagctggatttgaagaaaaaaagtctgcagagatagtcaagaataaaaaagttgcctccgctttatataatattttaggctccaacttccccaaaactgatgataaaaaattatctttgttacatcaattggctatacatgaaagtaaaaatggaaaagtaccaaatcatgactttatcattgatggaattcaaaaaggggacttgaaaactgctttgcaagtaactgaaggtatcaagtatttacaaaacaatgcaacagttgataaggaaaaatttgatgaagccagtggtgtaggtattgagattactcctgaagaagccaaggtagaaatttcaaagtaccttgactctattaaaactgatttggagagtaaaagatattcaatcttacctaaagttctaggtgaagtgaaaacccagccatctttgaaatgggcaccacctaacttattcaaaccaattttagatgaagagtttttggccagattgggtccaaaagatgaaagagatgttaaaaagaaggaaaaaaaagccaagacaccagctaatgcagctgccaccaaaaagcaagatactggttctgaacctgaacgttctatgttttctgaagggttccttggggatttgcataaaccaggtgaagaacctcaaatgtaccctgaattgttagaagagcataaaaagtttatttgtgataaagtctacacccgtttcccacctgaaccaaatggatttttgcacattggtcactctaaggccattatggttaattttgggtacgctcaattcaacaagggtaattgttacttgaggtttgacgatacaaaccctgaagctgaagaggaagtctatttcaattccatcaaagaaatggtttcttggttgggttataagccatggaagatcacctattcttccgactatttcgatgaattgtacgagttggctattaagttgattaaatcagacaaggcatatatatgtcattgtactccagaagaagtgaaggcttctcgtgggttgaaagaagatggtacattgggaggagaaagagtcgcttgtaaacacagatttcaaactgttgaacataacttgcgtgagtttgaaaacatgaaaaatgggaaatacaacgttggtgaagccacattaagaatgaaacaagatttgaattctccatcacctcaaatgtgggatttggttgcctaccgtgttttgaacacaccacatcaccgaactggtgataaatggaagatttacccaacctatgattttacgcattgtttggttgattcttttgaaaacattacccattcattgtgtaccaccgaatttgtcttgtctagagaatcgtatgagtggttgtgtgatgcattacatgtttatagaccagcacaacgtgaatacggtagattgaacttaactggtaccatcatgtccaagagaaagattgctaaattggtcaatgaaggttatgtcagaggatgggatgacccaagattatacacattagaaggtatcaaaagaagaggtgtccctccaggtgccattttgtctttcataaacaccttgggagttacaacctcgacaacaaatatccaaacggtgagatttgaaagtgccgtgcgtaactaccttgatcaaacaactccaagattgatgatggttttgcacccaattgaggttgttattgataatttggatgaaagctttagtttggacgttgaaataccatacaagccaggtaaagatgaaaagtctatgggataccgtaaacttacattttccaaacatatttacattgatgaaaatgatgttagagctgaacctgccgataaagagttttatagattggctccgggccaaccagttggtttgatgagagttcctttcaatatcagtttcaaatcaattgaagaaaaagatggaaagaaaatcgtccatgttaactatgacgaaggtgtaaaagctaaaccaaaaacctacatccaatggattcctaaagacactgctgttcatattaaagaagttagaatctacaatcaattgttcaaaagtgaaaacccttctgcacatcctgaaggttatttgaaggacattaatcctgatagtgaagaagttttgcgtaatgcagttgttgaagaaaatcttaaagacattgtggcaaaatctccaatgaacattgaaattccaggaagtgcattcaacattaaagaaaacaaaggtaataatactgtcagattccaagcattaagagaaggttacttttgcttggacaaagattccaaagaagatggtttgattcttaatagaattgtcagcttgaaagaagatgctgctaaaaaatga

SEQ ID NO: 67763 - protein, 799 aa, Candida albicans SC5314
MSTKTDISTEELVSLFSKAGFEEKKSAEIVKNKKVASALYNILGSNFPKTDDKKLSLLHQLAIHESKNGKVPNHDFIIDGIQKGDLKTALQVTEGIKYLQNNATVDKEKFDEASGVGIEITPEEAKVEISKYLDSIKTDLESKRYSILPKVLGEVKTQPSLKWAPPNLFKPILDEEFLARLGPKDERDVKKKEKKAKTPANAAATKKQDTGSEPERSMFSEGFLGDLHKPGEEPQMYPELLEEHKKFICDKVYTRFPPEPNGFLHIGHSKAIMVNFGYAQFNKGNCYLRFDDTNPEAEEEVYFNSIKEMVSWLGYKPWKITYSSDYFDELYELAIKLIKSDKAYICHCTPEEVKASRGLKEDGTLGGERVACKHRFQTVEHNLREFENMKNGKYNVGEATLRMKQDLNSPSPQMWDLVAYRVLNTPHHRTGDKWKIYPTYDFTHCLVDSFENITHSLCTTEFVLSRESYEWLCDALHVYRPAQREYGRLNLTGTIMSKRKIAKLVNEGYVRGWDDPRLYTLEGIKRRGVPPGAILSFINTLGVTTSTTNIQTVRFESAVRNYLDQTTPRLMMVLHPIEVVIDNLDESFSLDVEIPYKPGKDEKSMGYRKLTFSKHIYIDENDVRAEPADKEFYRLAPGQPVGLMRVPFNISFKSIEEKDGKKIVHVNYDEGVKAKPKTYIQWIPKDTAVHIKEVRIYNQLFKSENPSAHPEGYLKDINPDSEEVLRNAVVEENLKDIVAKSPMNIEIPGSAFNIKENKGNNTVRFQALREGYFCLDKDSKEDGLILNRIVSLKEDAAKK

SEQ ID NO: 67764 - DNA, 2301 bp, Tribolium castaneum
  CDS (1)..(2301)
atggtccaaaacgaagacttggcgaaccgtctgacaaccaccttcggtctgagtgaacaaaaagccaaagaaacgctaaaaaatgttaccctcacccaaaccctatcaacgattctgcacgaggtgcgcgaagtggtgctccctgaaggtggaggcacccttctctaccacttggccacgaaaatcaagccccaaatcaaccaccacttgccgctaataatcaaatacattgttacaaaaaaattggataatacagtccgggttgaaaaggccatagaatacgctttaagccacatcaaagacattgacttgaaggagtttgagacgtattgtggggtcggtatcgtcgtcacccctgaggaaatcgaaaatgtggttgaaggactgcttaaagaatataaaaatgagttgcttgagaagaggtacaggttcaatgcgggcccccttatgcaaaaagtcagggcgaagctgccctgggctgatggcaaggctgtcaagagcgaaatcgacgtccaaatttttgatttgttgggccccaaaaccgaggaggacttggccccgccccctaaaaccgacaagaaaaagccacctactagaccaaaagtggaagaaaaagtcccccaagacactgctttaacaatcctcgatgtaatgaaaaaaattaattttcacaaaccgggcgaaaactacaaaaccgacggttatgtcgtcactgaaaacacggagaaattgctgaaggagcacctgaaggccacaggggggcgcgtccagacgcggttcccccctgaacccaatgggattctccacattgggcacgccaaggctattaacattaattttggctacgcagctgcccatgatggggtttgttatttgcgctacgacgatactaatcctgagaaagaggaagagaagtttttcaccggaattaaagatatggtcacttggttggggtacaagccgtataaaatcacacattcgtctgattattttgaccagttgtatgagtgggctgttgaattgattaaaaaagggatggcttatgtgtgccaccaaacagctgatgaaatgaaagggtttaaccctcaaccgtctccgtggagggaccgtccggttgaagaaagtctccagttgttccaggacatgaagaatgggaaaattgatgaaggggctgcaaccttacgcatgaaaataaccctagaagaggggaaactggacccagtggcgtacaggatacgtttcaccccccaccacaggacggggaataaatggtgtatttaccccacgtacgactacacgcactgtttgtgcgacagtattgaaaatataacgcattctctttgtacgaaggaatttcagtcaaggaggtcaagctactactggctgtgcaacgctttaaatatttattgtccggtccagtgggaatacggacgcttaaacgtcaactacactgtagtttcgaaacgaaaaatcgccaaactgatcgaagaaggcatcgtgaacgactgggatgacccacgtttgttcacactgacagcgctcagacgtcggggatttcccccagaggctattaataatttctgtgcccaattgggcgtcacgggggctcagagtaccgtcgatccggccatgttggaggcttacgtccgtgattatctcaacaacacagccccgagacgcatggttgtattagacccgcttgaaatagtgattgaaaatttcccctcggggaaaccccccaaagtcaacgtccccaattttccgaataagcccgagttgggggaacacagtgtggcgttcggctcgaggatttacattgaacggagtgattttctcgaagagggaaataagagttaccgaaggttaaccaaaagccagagtgttggtttacgacatgctggttacgtgttagacgtgaaagaagtgaggaaaaatggttcagggcaagtggttacggtggtttgtaaatgcactgaggtcgagaagactgaaactaaacccaaggcgttcattcattgggtttgtgaaccgattgaagttgaagttagactttattcaacactatttaaacataaaaatcctgaggatcccagtgaagtcccgggtggtttcgttaccgattgtaatgacaatacgttaacgattttgcgcagttttgccgataagagtttggaaactgcgaaaatttatgatacgtttcagtttgaaagaaacggatttttctctgttgatcctgatactaggtcaggaaagctgatttttaaccaaactgttggccttaaagaagatgccgggaagtga

SEQ ID NO: 67765 - protein, 766 aa, Tribolium castaneum
MVQNEDLANRLTTTFGLSEQKAKETLKNVTLTQTLSTILHEVREVVLPEGGGTLLYHLATKIKPQINHHLPLIIKYIVTKKLDNTVRVEKAIEYALSHIKDIDLKEFETYCGVGIVVTPEEIENVVEGLLKEYKNELLEKRYRFNAGPLMQKVRAKLPWADGKAVKSEIDVQIFDLLGPKTEEDLAPPPKTDKKKPPTRPKVEEKVPQDTALTILDVMKKINFHKPGENYKTDGYVVTENTEKLLKEHLKATGGRVQTRFPPEPNGILHIGHAKAININFGYAAAHDGVCYLRYDDTNPEKEEEKFFTGIKDMVTWLGYKPYKITHSSDYFDQLYEWAVELIKKGMAYVCHQTADEMKGFNPQPSPWRDRPVEESLQLFQDMKNGKIDEGAATLRMKITLEEGKLDPVAYRIRFTPHHRTGNKWCIYPTYDYTHCLCDSIENITHSLCTKEFQSRRSSYYWLCNALNIYCPVQWEYGRLNVNYTVVSKRKIAKLIEEGIVNDWDDPRLFTLTALRRRGFPPEAINNFCAQLGVTGAQSTVDPAMLEAYVRDYLNNTAPRRMVVLDPLEIVIENFPSGKPPKVNVPNFPNKPELGEHSVAFGSRIYIERSDFLEEGNKSYRRLTKSQSVGLRHAGYVLDVKEVRKNGSGQVVTVVCKCTEVEKTETKPKAFIHWVCEPIEVEVRLYSTLFKHKNPEDPSEVPGGFVTDCNDNTLTILRSFADKSLETAKIYDTFQFERNGFFSVDPDTRSGKLIFNQTVGLKEDAGK

SEQ ID NO: 67766 - DNA, 1743 bp, Clostridium thermocellum ATCC 27405
  CDS (1)..(1743): transl_table=11
atggacgctcaggttgatggcaaagcaaatgaattaaattcaacagaagaaaatgaaaaagtatattcaaattttattcaggatattattgatgaggataatagaacaaatagatatggcggaagagtgcatacgaggtttccgcccgagcccaacggctaccttcatataggacatgccaagtcaatttgccttaatttcggaattgcagaacagaacggcggtttgtgcaatcttagatttgacgatacaaatccttcgaaggaagacactgaatatgttgagtccattaaagccgatgttaaatggcttggttttgactgggaagacagattgtactatgcatcggattattttgacaaaatgtttgaatacgccgttaagctgattaaaatgggaaaggcttatgtttgcgatttgagtgccgatgagataagggaatacaggggaactttgaccgagcccggaaaggaaagcccgtatcgcaacagaagtgttgaagagaatctggatttgtttatgagaatgaaaaacggtgaattcgaggaaggttcgagggttttgcgggcaaaaatagatatggcatcccccaatctcaatatgagggacccggtgatttacagaattataaaggcaagtcatcacaggtccggtgacaagtggtgtatttacccgatgtatgattttgcccatcctatatctgactctcttgagggtataacccattccatctgtacgctggagtttgaagaccacaggcctttgtacaactgggttttggagacccttgacatggagtgcaagacccgtcagatagagtttgcccgtttgaatttgacctatacggtaatgagcaaacgaaaattgctaaggcttgtgcaggaagggcatgtgaggggatgggacgacccaagaatgcctaccatatcaggacttagaagacgtggatatactccttcggccataagaaacttttgtgcccgcataggggttgccaagagcaacagcaccgttgatatatcgctccttgagcattgtatcagagaggaacttaatcagaaggctcaaagggtaatggcggtactgagacctctcaaacttgtcatagacaactatcctgagggaatggttgaagagtttgaggttgagaacaatcccgaggatccgaatgcgggaaccaggaaagtacctttttcaaaagttctttatattgagaaggacgatttttgcgaaaatcctccgaagaaatatttccgcctggcgcccggtcaggaggttagactcaaaggtgcttatatagtaaaatgcgtggatgttgtaaaggatgacaaaaccggagagataacagaagtacattgcacctatgacccccaatcccgtggaggaaatgcttctgacgggcgaaaagtaaaaggtaccattcactgggtttcggcagctcatgccattgatgccgaggtacgcctgtatgatcatttgtttagcgtgcccaatcccggtgctgatgaaaatgttgactttattgaacagctaaatcccaattctctcgaagtgttaaaatcgtgcaagctcgagcccagccttgctggtgcaaaaccgggagatgcgttccagttcctccgtttgggttatttctgtgttgatttggtggattcaaaggaaggctctttggtatttaacagaacggtgacactcaaggatacctgggcaaagatagcaagtaaagagaaagaagataagtaa

SEQ ID NO: 67767 - protein, 580 aa, Clostridium thermocellum ATCC 27405
MDAQVDGKANELNSTEENEKVYSNFIQDIIDEDNRTNRYGGRVHTRFPPEPNGYLHIGHAKSICLNFGIAEQNGGLCNLRFDDTNPSKEDTEYVESIKADVKWLGFDWEDRLYYASDYFDKMFEYAVKLIKMGKAYVCDLSADEIREYRGTLTEPGKESPYRNRSVEENLDLFMRMKNGEFEEGSRVLRAKIDMASPNLNMRDPVIYRIIKASHHRSGDKWCIYPMYDFAHPISDSLEGITHSICTLEFEDHRPLYNWVLETLDMECKTRQIEFARLNLTYTVMSKRKLLRLVQEGHVRGWDDPRMPTISGLRRRGYTPSAIRNFCARIGVAKSNSTVDISLLEHCIREELNQKAQRVMAVLRPLKLVIDNYPEGMVEEFEVENNPEDPNAGTRKVPFSKVLYIEKDDFCENPPKKYFRLAPGQEVRLKGAYIVKCVDVVKDDKTGEITEVHCTYDPQSRGGNASDGRKVKGTIHWVSAAHAIDAEVRLYDHLFSVPNPGADENVDFIEQLNPNSLEVLKSCKLEPSLAGAKPGDAFQFLRLGYFCVDLVDSKEGSLVFNRTVTLKDTWAKIASKEKEDK

SEQ ID NO: 67768 - DNA, 1665 bp, Clostridium difficile 630
  CDS (1)..(1665): transl_table=11
atgtcaaatgaaacgaactcatctaactttataaagaatattattataaacgacttagaaacaggaaaacatgacagtatcataactcgttttccacctgagccaaacggatatttacatattggtcatgcaaaaagtatatgtcttaattttggattagctaaggagtttaatggaaaagctaatttaagatttgatgatacaaacccattaaaagaggatgttgaatatgtagagtccataaaagaagatgtaaagtggttaggatttgattggaacgagttaaattttgcatctaactactttgatgaaatgtataagagagctttaatactaataaaaaagggtaaagcttatgtatgtgatttgacacaagaggaaatgagagaatatcgtggtactctaactgaaccaggaaaagaaagtcctcatagaaacagaactattgaagaaaaccttgatttatttgaaagaatgaaaaatggtgaatttaaagatggtgaaaaaacattaagagccaaaatagatatgtcttctccaaatataaaccttagagacccaattatatatagaatatctcattcaacacaccataatacaggagataaatggtgcatatatcctatgtatgcttttgctcatccaattgaagatgcaattgaaggaataactcactctatatgtactttagagtttgaagaccaaagacctctttatgattggtttgttaaagaatgtgagatggaaaatatacctagacaaatagaatttgctagacttaatataaataatactgtcatgagtaaaaggaaattaaaacaacttgtagatgagggtattgttgatggttgggatgaccctcgtgttcctacaatatccggaatcagacgtaagggatatactgcagaagcattgcgcaatttctgtagtgaaataggggtatcaaaagttaactctacggtagatagtcaaatgcttgattatttcctaagagaaaacttacaaccaaaggctcctcttactatgggagttttaagacctttaaaacttattataactaattacccagaagataagattgagatgcttgaaatagagaataatgctaaagatgaatctcaaggaaagagattagttcctttctctagagaattgtatatagaacaagatgattttatggaagaacctgttaagaaatattttagatttttcccaggaaatgaagtccgtttaaaaggtgcttattttgtaaaatgtactgatgtaattaaggatgaaaatggaaatgtagttgaaatacatggtacttatgaccctgaaactaagagtggctctggctttacaggacgtaaggtaaaatctacaatacattgggttgatgctaaatcagctataccatgtgaatttagattatttgaaccattaattcttgatgatatacctgaaaatgaaggtaaacatttcttagaacaaataaatcctaattcattggaaatattacaaggttttgttgaacctacacagataaaagatgctaaaccttttgataaattccaatttgttagaaatggattctttagtatagataataaatatacaactgatgaaaaatttgtatttaatagaatagttcctctaaaaagttcttttaaaccaggtaaataa

SEQ ID NO: 67769 - protein, 554 aa, Clostridium difficile 630
MSNETNSSNFIKNIIINDLETGKHDSIITRFPPEPNGYLHIGHAKSICLNFGLAKEFNGKANLRFDDTNPLKEDVEYVESIKEDVKWLGFDWNELNFASNYFDEMYKRALILIKKGKAYVCDLTQEEMREYRGTLTEPGKESPHRNRTIEENLDLFERMKNGEFKDGEKTLRAKIDMSSPNINLRDPIIYRISHSTHHNTGDKWCIYPMYAFAHPIEDAIEGITHSICTLEFEDQRPLYDWFVKECEMENIPRQIEFARLNINNTVMSKRKLKQLVDEGIVDGWDDPRVPTISGIRRKGYTAEALRNFCSEIGVSKVNSTVDSQMLDYFLRENLQPKAPLTMGVLRPLKLIITNYPEDKIEMLEIENNAKDESQGKRLVPFSRELYIEQDDFMEEPVKKYFRFFPGNEVRLKGAYFVKCTDVIKDENGNVVEIHGTYDPETKSGSGFTGRKVKSTIHWVDAKSAIPCEFRLFEPLILDDIPENEGKHFLEQINPNSLEILQGFVEPTQIKDAKPFDKFQFVRNGFFSIDNKYTTDEKFVFNRIVPLKSSFKPGK

SEQ ID NO: 67770 - DNA, 1749 bp, Herminiimonas arsenicoxydans
  CDS (1)..(1749): transl_table=11
atgagcaacgatacaaaaaacggcagcaccaatccgaccccggcctcttccaatttcctgcgcggcatcatcgaagccgacctcgccgccggcaaacacgaaaaacgtgtggacaaggacggccagccgctgccaacagtcatcacccgcttcccgccggaacctaacggttacctgcacatcggccacgccaaatcgatctgcctgaacttcggcctggcgcgcgattacgccggccgctgcaacctgcgcttcgacgacaccaatccgaccaaggaagaacaggaatacgtcgacaccatcatcgacagcgtcaaatggctgggcttcgactggcacgtcggcgacaaggaacacctgtacttcgccagcgactacttcgaccagctgtatgcaatggccgaatacctgattaccgccggtcacgcctacgtcgacagccaatccgctgacgacatggcgaagaatcgcggcaacttcggcgaagccggcaagaactcgcctttccgcgatcgccctgcggcagaatcgctggacctgttccgccgcatgaaggccggcgaattcaaagatggcgaacacatcgtgcgcgccaagatcgacatggcctcgcccaacatgaacatgcgcgaccccgcgatctaccgcatccgtcacgcgcatcaccatcgcaccggcgacgcatggtgcgtctacccgatgtacgactacgcgcacccgatcgaagacgcgatagaaaacatcacgcactcgatctgcacgctggaattccaggatcaccgtccgttctacgactgggtactggaacgtctggcagaaggcggtttcttcaccaagccgctgccgcaccaatacgaattcgcccgcctcaacctgacctacgcgatcaccagcaagcgcaagctgctgcaactggtggaagaaaacatcgtcgacggctgggacgatccgcggatgcctaccatcgtcggcatccgccgtcgcggctacacgccggcatcgattcaactttttgcagaacgcatcggtgtcgccaaggtcgacagctggatcgacatgagcacgctcgaaggtgcactgcgcgacgacctcgacgacaaagcaccacgcgccatcgccgtactgcgtccgctcaaactgatcatcgacaatttcccggaagacgaaacagtcgaatgtaccgcgcccgttcacccgcaccatccggaacgcggcaaccgtactttcccgatcagcaaggaactgtggatagaacaggaagacttcatggaagtgccaagcaaaggctacttccgcctcttcccgggcaacaaggtacgcctgcgttacggctacgtcgttgaatgcgtaggcgcggacaaggatgcagacggcaacatcatcgccgtccattgcacctatttccccgacagcaaatccggcaccgaaggctccgccaattacaaggtcaaaggcaacctgcactgggtcagcgccgcgcacgcactcgaagccgaagtacgcttgtacgaccgcctcttcaccgatgcgcatccggatgcaggtggcaaggatttcaaactggcgctgaatccgaactcgaaggaagtgattactgcgtatgtagaaccgggcgtgtcagcagtgcaagcagatgagaagctgcagtttgaacgtcatggatattttgttgcggatcgtgtggacagcaaggctgggaagcctgtgtttaatcgggtggtgacgttgaaggatagttgggggaagtaa

SEQ ID NO: 67771 - protein, 582 aa, Herminiimonas arsenicoxydans
MSNDTKNGSTNPTPASSNFLRGIIEADLAAGKHEKRVDKDGQPLPTVITRFPPEPNGYLHIGHAKSICLNFGLARDYAGRCNLRFDDTNPTKEEQEYVDTIIDSVKWLGFDWHVGDKEHLYFASDYFDQLYAMAEYLITAGHAYVDSQSADDMAKNRGNFGEAGKNSPFRDRPAAESLDLFRRMKAGEFKDGEHIVRAKIDMASPNMNMRDPAIYRIRHAHHHRTGDAWCVYPMYDYAHPIEDAIENITHSICTLEFQDHRPFYDWVLERLAEGGFFTKPLPHQYEFARLNLTYAITSKRKLLQLVEENIVDGWDDPRMPTIVGIRRRGYTPASIQLFAERIGVAKVDSWIDMSTLEGALRDDLDDKAPRAIAVLRPLKLIIDNFPEDETVECTAPVHPHHPERGNRTFPISKELWIEQEDFMEVPSKGYFRLFPGNKVRLRYGYVVECVGADKDADGNIIAVHCTYFPDSKSGTEGSANYKVKGNLHWVSAAHALEAEVRLYDRLFTDAHPDAGGKDFKLALNPNSKEVITAYVEPGVSAVQADEKLQFERHGYFVADRVDSKAGKPVFNRVVTLKDSWGK

SEQ ID NO: 67772 - DNA, 1710 bp, Burkholderia vietnamiensis G4
  CDS (1)..(1710): transl_table=11
atgagcaccgaacgtaacgacgcccccgcggcttccaatttcatccgcaacatcatcgacgacgacaaccgcaccggcaaatggggcggccgcgtcgagacgcgcttcccgcccgagccgaacggctatctgcacatcggccatgcgaagagcatctgcctgaacttcagcgtcgcacgcgactacggcggcgtgtgccacctgcgcttcgacgacacgaacccggaaaaggaaagcgtcgaatacgtcgactcgatcgtcgacgcggtgcgctggctcggcttcgactggcgcaaggacgcggtcgatcatcagtatttcgcgagcgactactacgacaagctctacgagttcgccgagctgctgatccagcgcggcaaggcgtacgtcgacagccagagcgcggacgaaatgcgcgcgaaccgcggctcgctgaccgaaggcggcaagccgtcgccgtatcgcgaccgttcgcccgaggaaaacctcgacctgttccgccggatgaaggccggcgagttcaaggaaggcgagcacgtgctgcgcgcgaagatcgacatggcgtcgccgaacatgaacatgcgcgacccggtgatctaccggatccgctacgcgcaccactatcgcaccggcgacgcatggtgcgtgtatccgatgtacgactacacgcactgcatctcggatgcgctcgaaggcatcacgcattcgctgtgcacgctcgaattcgaggatcaccgtccgctgtacgactgggtgctcaacgagctcgccgaagccggcgtgttcacgcggccgctgccgcaacagatcgaattctcgcgcctgaacctcacgtacgcgatcaccagcaagcgcaagctgctgcaactggtgaccgaaggccacgtcgaaggctgggacgacccgcgcatgccgaccatcgtcgggattcgtcggcgcggcttcacgcctgagagcatccagctgttctgcgagcggatcggcgtgacgaaggtcgactcgtggatcgacatgagcgtgttcgaaggcgcgctgcgcgacgacctcgacgacaaggcggcgcgtacggtcggcgtgctcgatccgctgaagctcgtgatcgacaactatccggaagacctcgaggaagcctgcacggcgcccgtgcatccgcatcatccggatcgcggcgtgcgcacgttcccgatctcgcgcgagctgtggatcgagcgcgacgacttcgccgaagcgccgccgaagggctatttccggctgttcccgggcaacaaggtgcgcctgcgctacggctacgtggtcgaatgcacgggtttcgacaaggacgccgacggcaacgtgacggccgtgcactgcaactacttcccggacagcaagtcgggcaccgacggcgcgaacaactacaaggtcaagggcaacatccactgggtcagcgcgaagcacgcgcagccggccgaagtgcggatctacgatcggttgttcaaggagccgcacccggacgcaggcggcgcgaacttcctcgacgcgctcaacccgaattcgaagaaggtcacgcaggcctacgtcgaaccgggcgccggcgacgtcgcgccggaaacgcgcctgcagttcgagcgccacggctatttcgtcgccgatcgcatcgactcgaagccgggcaagccggtgttcaaccgcatcgtcgggctgcgcgacagctggggcaagccggcctga

SEQ ID NO: 67773 - protein, 569 aa, Burkholderia vietnamiensis G4
MSTERNDAPAASNFIRNIIDDDNRTGKWGGRVETRFPPEPNGYLHIGHAKSICLNFSVARDYGGVCHLRFDDTNPEKESVEYVDSIVDAVRWLGFDWRKDAVDHQYFASDYYDKLYEFAELLIQRGKAYVDSQSADEMRANRGSLTEGGKPSPYRDRSPEENLDLFRRMKAGEFKEGEHVLRAKIDMASPNMNMRDPVIYRIRYAHHYRTGDAWCVYPMYDYTHCISDALEGITHSLCTLEFEDHRPLYDWVLNELAEAGVFTRPLPQQIEFSRLNLTYAITSKRKLLQLVTEGHVEGWDDPRMPTIVGIRRRGFTPESIQLFCERIGVTKVDSWIDMSVFEGALRDDLDDKAARTVGVLDPLKLVIDNYPEDLEEACTAPVHPHHPDRGVRTFPISRELWIERDDFAEAPPKGYFRLFPGNKVRLRYGYVVECTGFDKDADGNVTAVHCNYFPDSKSGTDGANNYKVKGNIHWVSAKHAQPAEVRIYDRLFKEPHPDAGGANFLDALNPNSKKVTQAYVEPGAGDVAPETRLQFERHGYFVADRIDSKPGKPVFNRIVGLRDSWGKPA

SEQ ID NO: 67774 - DNA, 1692 bp, Bradyrhizobium sp. ORS278
  CDS (1)..(1692): transl_table=11
ttgatgaccacgacgacagacacggcagcgacggcagaggcagggcgcgacttcatccgcgacatcgtccaggccgatctcgacagcggcaggcacaagaccgtcgtcacccggttcccgccggagccgaacggctacctgcatatcggccatgccaagtcgatcggtctcaacttcggcatcgcccgggagttcggcggccgctgcaatctgcgcttcgacgacaccaatccgaccaaggaagagcaggaatatatcgattccatccaggccgacgtgcgctggctcggctacgactggggcgacaatctgttctacgcctcggattatttcgagcggctttacgactgggccgagggcctgatcaaggccggcctcgcttatgtcgacgaccagacccaggaggagatccgggcgtcgcgcggcaccttgaccgagccaggcaagaacagcccgttccgcgatcgttcggtcgaggagaatctcgacctgttccggcgcatgaaggccggtgaattcccgaacggcgcgcgcgtgctgcgcgccaagatcgacatggcggccggcaacatcaatctgcgcgaccccgtgctgtaccggatcctgcacgcgcaccatccgcgcaccggcgacacctggaagatctatccgagctacgactatgcacacggtcagtcggacgcgatcgagggcgtgacgcattcgatctgcacgctcgaattcgaggatcaccggccgctgtacgaatggctgctcgacaagctgccggtgccgtcgcatccgcgccagtacgagttcgcgcgcctcaacctgacctacacgctgctgtcgaagcgcgtgctgacgcggctggtgcaggacgggcatgtctccggctgggacgatccgcgcatgccgaccattgccgggctgaagcggcgtggcgtgccgccggcggcggtgcgcgaattcaccaagcgcatcggcattgcaaaagccaacagcgtcgtcgacgtcggcatgctggaattctgcatccgcgaggagctcaaccgaacggcgcagcgccgcatggcggtgctgcgtcccttgaaggtcttgatcgagaactatccggaaggccaggtcgaggagctcgaggcgatcaatcatcccgatgatccctccgccggcacgcgcaagatcgccttcggccgcgagctctatatcgagcaggatgacttcatggagaacccgccgaagaagttcttccgcctgtcgcccggcaatgaggtgcgcctgcgctacgcgtatttcatcaagtgccgcgaggtcatcaagaacgatgccggcgagatcgtcgagctgcgctgcacctatgatcccgagaccaagggcggcaacgcgccggacggacgcaaggtcaaggcgacgatgcactggctgccggccgcgcagtcgctgactgccgagatccgcctctacaaccagctgttcgccaatccaagcccgaacgcggccgatttcaccgccgacctcaatccggactcgctggaggtgctggccgacgcgcgcatcgagccttcgatcgccgccagcaattcggatgcgcctgttcagttcgagcgccagggctacttcgtgcgcgatccggactcgacgcccgacaggctggtgttcaaccgcaccatcggcctgcgcgacaccttcgcgaaggaggtcgcgaaagggtag

SEQ ID NO: 67775 - protein, 563 aa, Bradyrhizobium sp. ORS278
MMTTTTDTAATAEAGRDFIRDIVQADLDSGRHKTVVTRFPPEPNGYLHIGHAKSIGLNFGIAREFGGRCNLRFDDTNPTKEEQEYIDSIQADVRWLGYDWGDNLFYASDYFERLYDWAEGLIKAGLAYVDDQTQEEIRASRGTLTEPGKNSPFRDRSVEENLDLFRRMKAGEFPNGARVLRAKIDMAAGNINLRDPVLYRILHAHHPRTGDTWKIYPSYDYAHGQSDAIEGVTHSICTLEFEDHRPLYEWLLDKLPVPSHPRQYEFARLNLTYTLLSKRVLTRLVQDGHVSGWDDPRMPTIAGLKRRGVPPAAVREFTKRIGIAKANSVVDVGMLEFCIREELNRTAQRRMAVLRPLKVLIENYPEGQVEELEAINHPDDPSAGTRKIAFGRELYIEQDDFMENPPKKFFRLSPGNEVRLRYAYFIKCREVIKNDAGEIVELRCTYDPETKGGNAPDGRKVKATMHWLPAAQSLTAEIRLYNQLFANPSPNAADFTADLNPDSLEVLADARIEPSIAASNSDAPVQFERQGYFVRDPDSTPDRLVFNRTIGLRDTFAKEVAKG

SEQ ID NO: 67776 - DNA, 1647 bp, Thermus thermophilus HB27
  CDS (1)..(1647): transl_table=11
atgggccttgtccccgagtgcttcatcaccgagatcgtggagcaggacctcaaggaggggaagtacgccaagctcgtcacccgctttcccccggagcccaacggctacctccacatcggccacgcccggagcatcgtcctcaacttcggcctcgcccaggactacggcggggagtgcaacctgcgctttgacgacaccaaccccgagacggagaaggaggagtacgcccgggccattgaggaggacgtgcgctggctgggcttccagcccacccgggtcctctacgcctcggactactttgagaccatgtaccaatgcgccttggtcctcatccaggagggcaaggcctacgtggacgacctccccgaggaggagatgagcgagcttcgggcccaggggaagccgagcccctaccgggagcggagcgtggaggagaacctggagctctttgagaggatgcgccggggggagttccccacgggaagccgggtcttaagggccaagattgaccccgcccaccccaacttcaagctccgcgaccccgtgctctaccgcatcgtccacgccccccactaccacgccgggaacaagtgggtcatctaccccatgtacgacttcgcccaccccctggaggacttcatcgagggggtcacccactccctctgcaccctggagtttgagaacaaccgcgccgtctacgactgggtcattgagaacctcaaggggaagtgcgggcttcccacctcccccaggccccaccagtacgagttcgcccggctggacttaagccacaccgtgctctccaagaggaagctcatcaagctggtggaaggggggtacgtctcgggctgggacgacccccggcttcccaccctgaggggcctgaggcggaggggggtgaggcccgaggccatcgtggagttcgtgcgcaagacggggatctccaggaacgaggcccagatagagatggacctctttgaggaggtggtgcgggacgacctgaaccccatcgcccccagggtcttgggcgtggtggaccccttgagggtggtcctcaccaactacgagggggaggagtggatagaagccccctactggccccgggacatccccaaggaggggacgaggccccttcccttctccccggagctctacattgagcgcacggacttcagcctcaacccccctaaaggttggaagcgcctcgccccggggcagagggtgcgcctgaggcacgcctacgtcatagagcttgaggacgtggtggaagaggggggcgaggtgaagctcctcaaggcccggatcgtccccggcaccctgggggcgaaccccgaggacggggtcaggcccaagggggtgatccactgggtctccgcccgccacgccctccccgtggagtttaggctctacggcaggctcttccgcaccaaggacccggaggagggaggggacttcctgcaaaacctcaaccccgaggcccttgtggtgaagcggggcttcattgagccgagcgtggcccaggaccccgaggacacccgctaccagctggagcgcctgggctacttctggcgggaccccgtggactcgaggcccgaggccctggtgatgaaccgcatcgtgcccctaaaagaggggtatagggtctga

SEQ ID NO: 67777 - protein, 548 aa, Thermus thermophilus HB27
MGLVPECFITEIVEQDLKEGKYAKLVTRFPPEPNGYLHIGHARSIVLNFGLAQDYGGECNLRFDDTNPETEKEEYARAIEEDVRWLGFQPTRVLYASDYFETMYQCALVLIQEGKAYVDDLPEEEMSELRAQGKPSPYRERSVEENLELFERMRRGEFPTGSRVLRAKIDPAHPNFKLRDPVLYRIVHAPHYHAGNKWVIYPMYDFAHPLEDFIEGVTHSLCTLEFENNRAVYDWVIENLKGKCGLPTSPRPHQYEFARLDLSHTVLSKRKLIKLVEGGYVSGWDDPRLPTLRGLRRRGVRPEAIVEFVRKTGISRNEAQIEMDLFEEVVRDDLNPIAPRVLGVVDPLRVVLTNYEGEEWIEAPYWPRDIPKEGTRPLPFSPELYIERTDFSLNPPKGWKRLAPGQRVRLRHAYVIELEDVVEEGGEVKLLKARIVPGTLGANPEDGVRPKGVIHWVSARHALPVEFRLYGRLFRTKDPEEGGDFLQNLNPEALVVKRGFIEPSVAQDPEDTRYQLERLGYFWRDPVDSRPEALVMNRIVPLKEGYRV

SEQ ID NO: 67778 - DNA, 1713 bp, Desulfovibrio vulgaris subsp. vulgaris str. Hildenborough
  CDS (1)..(1713): transl_table=11
atgagcgaacagaacccgaacgtttccgaacgaaccaccgaggcgactcccggcctcgacttcgtgcgcagccgcgttgtcgccgacaacagaacgggccgtttcgacggtcgcgtacacacgcgctttcccccggaacccaacggctatctgcatatcgggcacgccaagtccatctgcctcaatttcggcatagcgaacgaatacggcggcaagtgcaacctgcgtttcgacgacaccaaccctgtcaaggaaagccgggaatacgtcgactccatccgcaccgacgtggcatggatgggcttttcgtgggacgaccgtgaattctacgcctcgaactacttcgaacaactctaccagttcgccgaacagctcatcatggctggcaaagcctacgtggacagcctctccgccgaggagatacgcgcccaccggggtacgctcacgcagcccggcaccgaaagcccctaccgcaaccgtagcgttgaagagaacctcgacctcttccgccgcatgagagctggcgaattcgccgacggcacccacgtgctgcgtgccaagatagacatggcttcgcccaacgtggtcatgcgcgaccctacgctgtaccgcatccgccatgcccaccaccatcgtaccggcgacgcatggtgcatctatcccatgtacgacttcacgcactgcatctccgactcgcttgagggcatcacgcattccatctgcaccctcgaattcgagaacaaccgcgaactgtacgactggacgctcgatgccctcggcgtctaccacccgcagcagatagagttcgcccggctcaacctcacctacacggtgctgtccaagcgcaagctcatccagcttgtggaaggcggcttcgtgaagggatgggacgacccgcgcatgcccaccatcagcggcttgcgccgtcgcggcgtgccccccgaggcgctacgcgaattctgcgcccgcatcggcgtcgccaaggcggacagcacggtcgactacgggctgttcgagttctgcatccgcgagcgcctcaacgccaccaccccccgcgtcatgggcgttctcgaccccattcgcgtggtcatcgagaactatcctgaagggcaggtcgaagagttcgacatgccctaccaccccgaagacgcgtctttcggttcgcgcatagtgcccttctcgcgcgtgctgtacatcgaacgtgacgacttcagggaagacccgcccaagaagttcttccgactcgcccccggtgccgaagtgcgcctgcgctacgcctactacatcacctgccgcgaggtggtgaaggacgaggcgggcaacatcgtcgaacttcgctgcacctacgaccccgaatcgcgcggcggttcgtcgcccgacggtcgcaaggtcaaggggacgctgcactgggtctccgctgcccatgccgttgagtcggaagtgcgcctctacgagcaactcttcgccgtatccgaccccgatgacgtgcccgaaggcggtgtcttcaccgacaatctcaatcccgactcgctcaaggtcgtccgcgccatgctcgaaccttcgctgggcggcatcgaacccggcaccaaggtgcaattcgagcgcatgggctacttctgcgccgacccggactccgtgcccggtgcgcccgtgttcaaccgcaccgtgaccctcaaggacacgtgggcgaaactcgagaagaagatgggctag

SEQ ID NO: 67779 - protein, 570 aa, Desulfovibrio vulgaris subsp. vulgaris str. Hildenborough
MSEQNPNVSERTTEATPGLDFVRSRVVADNRTGRFDGRVHTRFPPEPNGYLHIGHAKSICLNFGIANEYGGKCNLRFDDTNPVKESREYVDSIRTDVAWMGFSWDDREFYASNYFEQLYQFAEQLIMAGKAYVDSLSAEEIRAHRGTLTQPGTESPYRNRSVEENLDLFRRMRAGEFADGTHVLRAKIDMASPNVVMRDPTLYRIRHAHHHRTGDAWCIYPMYDFTHCISDSLEGITHSICTLEFENNRELYDWTLDALGVYHPQQIEFARLNLTYTVLSKRKLIQLVEGGFVKGWDDPRMPTISGLRRRGVPPEALREFCARIGVAKADSTVDYGLFEFCIRERLNATTPRVMGVLDPIRVVIENYPEGQVEEFDMPYHPEDASFGSRIVPFSRVLYIERDDFREDPPKKFFRLAPGAEVRLRYAYYITCREVVKDEAGNIVELRCTYDPESRGGSSPDGRKVKGTLHWVSAAHAVESEVRLYEQLFAVSDPDDVPEGGVFTDNLNPDSLKVVRAMLEPSLGGIEPGTKVQFERMGYFCADPDSVPGAPVFNRTVTLKDTWAKLEKKMG

SEQ ID NO: 67780 - DNA, 1728 bp, Acinetobacter sp. ADP1
  CDS (1)..(1728): transl_table=11
atgaagccaaatgatgttgtttcaactctgcccaattctccgacaacgaatactcatacatctgtcgattctgcgcagcaagaacaacaggcaggcttagattttgtcagacaagtcatcacagaagatttgaacgaaggtcgtacccaaactgtggtcactcgttttccacctgaaccaaacggttatttgcatattggtcatgttaaggccatttgtcttaattttggcgttgctgaagaatttggtggttattgtaatctcagatttgatgataccaacccagatgcagaagagcaggaatatgtcgatgggattgccaacgacgtaaaatggcttggttttgaatggaaagatgaaccacgttatgcatcgagctacttcgaccagctttatacgtgggcggtacaactgattaaacaaggtgatgcctatgtcgacttgcaaacacccgaagaaattaagctgaaccgtggtaactttgtagagccaggtaaaaactctccttaccgtgatgcgagtgtagaagaaaaccttcaacattttgaaaaaatgaaagatgggacttatcaggaaggtcaagctgttttacgtgccaaaattgatatggcaagcccgaatgtacatatgcgtgatccaattttgtatcgtattctgcattcagagcaccatcaaacaggtgatacatggaaaatctatccaatgtatgactatgcgcatccgttatctgatgcgattgaaggtgttacgcattcgttatgtacgcttgagttccaagatcatcgtccattttatgactgggtgattgaaaaagttcattcagaagcagtaccacgccagtatgaatcatctcgtttaaacatcgattacaccattacctctaagcgtaagttacgccgtctggtcgaaggtggttttgtaaatggttgggatgatccgcgtatgccaacagtcgtcggtatgcgccgtcgtggatttacctctgaaggcttgcgtgatttttgtaagcgtgtaggtgtatctaaaacggatggtattgtggatgttgcaatgctcgaattctgtattcgtcagtcgctcgaaaatactgcaagccgtggcatggctgtactcaatccgttgaaagtcaccttaaccaatttgccagaaacacttgatcttgtgcatgcacgccatccgaatgtcgatatgggcgaacgtgttattccactaacatctgagctttatattgaccgcaaagactttgaagaagtgccaccaaaaggctttaaacgtttgattccaggtggtgaagtacgtttgcgtcatgcttacgtgatcaaatgcgatgaagtggtcaaagatgaacagggtgaagtcattgagcttaaatgttcaattgatccagacactttaggtaaaaaccccgaaggtcgtaaggtaaaaggggtgattcattgggtatctgcaaccaaaggacttcctgcggaagtgcgtatttatgatcgcctatttacagaagctgcacctgatgcagatgatgactttcttgccaatttgaatcctgactcattacaagtcgttcaggcctatattgagccagcattggcacaagcatcacctgaacaacgctttcagtttgagcgcgaaggttattttgtagcagatcagcatgatcacacttcagaaaaaccagtgtttaaccgtattttagacctaaaagatagcttcaaacctgagaaaaaataa

SEQ ID NO: 67781 - protein, 575 aa, Acinetobacter sp. ADP1
MKPNDVVSTLPNSPTTNTHTSVDSAQQEQQAGLDFVRQVITEDLNEGRTQTVVTRFPPEPNGYLHIGHVKAICLNFGVAEEFGGYCNLRFDDTNPDAEEQEYVDGIANDVKWLGFEWKDEPRYASSYFDQLYTWAVQLIKQGDAYVDLQTPEEIKLNRGNFVEPGKNSPYRDASVEENLQHFEKMKDGTYQEGQAVLRAKIDMASPNVHMRDPILYRILHSEHHQTGDTWKIYPMYDYAHPLSDAIEGVTHSLCTLEFQDHRPFYDWVIEKVHSEAVPRQYESSRLNIDYTITSKRKLRRLVEGGFVNGWDDPRMPTVVGMRRRGFTSEGLRDFCKRVGVSKTDGIVDVAMLEFCIRQSLENTASRGMAVLNPLKVTLTNLPETLDLVHARHPNVDMGERVIPLTSELYIDRKDFEEVPPKGFKRLIPGGEVRLRHAYVIKCDEVVKDEQGEVIELKCSIDPDTLGKNPEGRKVKGVIHWVSATKGLPAEVRIYDRLFTEAAPDADDDFLANLNPDSLQVVQAYIEPALAQASPEQRFQFEREGYFVADQHDHTSEKPVFNRILDLKDSFKPEKK

SEQ ID NO: 67782 - DNA, 1698 bp, Propionibacterium acnes KPA171202
  CDS (1)..(1698): transl_table=11
atggcagaacctactggaaacccggctgagtccagctcggacttcattcatcaggttgttcgcgcggacatccaacaggacacctacggcgggcgcgtccagacccggttcccacctgagcctaacggctacctccacattggccacgcgaaggccatcgtcaccgatttcggcgttgccgaggatttcggcggcacctgcaacctgagacttgatgatactaatccaggcaccgaggaaaccgagtatgtcgagtcgatcattgcagacattgagtggttaggctactccccggcccacgttgtccacgcgtcggactatttcgagcagctttacgagtgggcgaaatacctcgtacgtgagggactggcctacgttgacgaccagtcccccgaaactatccgtgagcaacgcggcggctacggtaagccgggcattgaaagtccctatcgcaaccgtcctgccgaagaatcccttaacctgttgaggcggatgcgtgccggggaattccccgacggttcccgctgcctgcgcgcccgcatcgatatgcaggccgaaaatatgtggctgcgcgacccagtcatgtaccggatccgccaccaagcccaccactccaccggtaccgagtggtgcatctaccccacgtatgactgggcacatggtcagtctgacgctattgagggcgtgactcactcgttgtgctccctagaattcaacagtcatcgtccgctctacgactggttcctttcccacttgcctctggacggccctgcccccaagcagcgcgaatttgcccgtctcgagttgacccacaccatcacctcgaagcgccggctcaagtccctagtaaccaacaacatcgttgacggatgggatgatccgcgcatgcccaccctgcgcggtatgcgtcgccgtggatacccagcagccgccattcgagccttctgccaggccgtcggcactaccaagaacaactcggtcaaggccattgaggagtttgagtccttcgtgcgccgcgagctcaacgccaccgctcagcggcgcatggctgtgttgcaccccctcaagcttgtccttgacggctggccgactgacgacgacggcaacccggtggtggaatggttccagctggtcaataatccggagaatcctgacgacggcacccgtcgcgtccccttcaccggagagctctggattgaggccgatgatttccgcgaggaccctccccgcaaattcttccgcctctcccccggacatgaggtgcgcctgcgcggcgcctatctggtgacagccaccgacgtcgtcaaaaatcctgacggaactattgctgaggttcacgccagttacgacccgcaatcgcgcggcggaaccgcccctgacggccgcaaggtgaagtcgacgatgcactgggtttcggctggccatgccattcccgtgacagccaacctgtacgaccgcttattcagcgctgagattcctgggtcgcagaccggggaagcccttgacgatctcaacccacattcccgcgaaacactcaccgaggtcatggccgaaccggccctggccaatgtggctccgggcgaggtagtgcaattcgagagactgggatacttcgctgcagatcacgacaccgccgtgttccatcgcaccgtcggtctgcgtgacgaatgggcccagctacaaaagcgccaggcctga

SEQ ID NO: 67783 - protein, 565 aa, Propionibacterium acnes KPA171202
MAEPTGNPAESSSDFIHQVVRADIQQDTYGGRVQTRFPPEPNGYLHIGHAKAIVTDFGVAEDFGGTCNLRLDDTNPGTEETEYVESIIADIEWLGYSPAHVVHASDYFEQLYEWAKYLVREGLAYVDDQSPETIREQRGGYGKPGIESPYRNRPAEESLNLLRRMRAGEFPDGSRCLRARIDMQAENMWLRDPVMYRIRHQAHHSTGTEWCIYPTYDWAHGQSDAIEGVTHSLCSLEFNSHRPLYDWFLSHLPLDGPAPKQREFARLELTHTITSKRRLKSLVTNNIVDGWDDPRMPTLRGMRRRGYPAAAIRAFCQAVGTTKNNSVKAIEEFESFVRRELNATAQRRMAVLHPLKLVLDGWPTDDDGNPVVEWFQLVNNPENPDDGTRRVPFTGELWIEADDFREDPPRKFFRLSPGHEVRLRGAYLVTATDVVKNPDGTIAEVHASYDPQSRGGTAPDGRKVKSTMHWVSAGHAIPVTANLYDRLFSAEIPGSQTGEALDDLNPHSRETLTEVMAEPALANVAPGEVVQFERLGYFAADHDTAVFHRTVGLRDEWAQLQKRQA

SEQ ID NO: 67784 - DNA, 1710 bp, Desulfotalea psychrophila LSv54
  CDS (1)..(1710): transl_table=11
atggctacaaatgagcgtatagaagaaaagggcgaagaggaacacaaaaagactctcgactttatcagacagatcattgcagaagacctgcgcacaggaaaacataaacagccggtgacccgttttccgcctgagcccaatggatttctccatatcggtcatgcaaaatcaatctgcctcaattttggcattggccaggagaataacagcccctgccatcttcgttttgacgataccaacccaagcaaggaggagagcatctacgttgactccatcaaaaaggatgtctcctggctcggttttgattggggcgaagacctgttcttttcctccaactactttgagcagatatacgattatgccctgcagctgatcaaaatgggtaaggcctatgtctgccagctcaatgctgagcagatgagagaataccgaggcaccctgaccgagccgggtaaggatagcccctaccgcgatcgcgccattgcagagaacctcgaccttttcgagcgcatggccaggggagagtttgacgagggcagtcacgtgctccgcgccaagattgatatggcctcacccaatatcaacctgcgggatcccattatttaccgcatcctcaagatagagcaccaccgtaccggcgataagtggcagatctatcccatgtacgattttacccacgccctctccgatgccatcgagggaataacccactccctctgtactctggagttccaggaccatcgccctctctacgactgggtactggataccctggcgaccccctgccacccccggcagatagaatttgcccgcctcaaccttacctatacggtaatgagtaagcgaaaactcctgcagatggttcagaaaaactatgtaagtggctgggatgatccccgcatgctgaccatctccggtctgcgtcgtcgaggctatacccctgcatccatccgtaacttctgtgcagaaattggtcttgccaagagagagagctggatcgagatgggcgtattggagaacgagatacgaaacgacctcaaccccagcgcccaacgggccatgtgtgtccttgatccaataaaactaatcattgacaactatcctgaagagaaggaagaggaggtggttgccaaaatccacccacaaaatccagagatgggtaccaagaccctgcccttctcccgagaactctatatcgaacgtaatgattttatggagaaccctccaggaaaattccgccgtctcggaccaggcaaagaggttcgcctgcgctacggctattatatacagtacgcatcccacctaaaggacgagacaacaggggaaatcacagagatccactgtacctacgaccctgaaagccgaggtggttcttcacccgatggccgtaaggtaaagggcaccatccactgggtttctgccaagcatgctcttgactgtaccgttcacctctacgatcgtctctttaacgtggagaatcccgatgcggacaaggaagttgacttccttgagcaccttaacaaagactccaagcttgtcctccgacatgccaaggcggaacctgccctggcgacactccccgttggagagagtgtccagtttgagcgacagggatatttttgcgtagattctgtggactccacagaggagaatattgtcttcaaccgggttgtcaccctgcgtgattcctgggccaagatcaacaaatag

SEQ ID NO: 67785 - protein, 569 aa, Desulfotalea psychrophila LSv54
MATNERIEEKGEEEHKKTLDFIRQIIAEDLRTGKHKQPVTRFPPEPNGFLHIGHAKSICLNFGIGQENNSPCHLRFDDTNPSKEESIYVDSIKKDVSWLGFDWGEDLFFSSNYFEQIYDYALQLIKMGKAYVCQLNAEQMREYRGTLTEPGKDSPYRDRAIAENLDLFERMARGEFDEGSHVLRAKIDMASPNINLRDPIIYRILKIEHHRTGDKWQIYPMYDFTHALSDAIEGITHSLCTLEFQDHRPLYDWVLDTLATPCHPRQIEFARLNLTYTVMSKRKLLQMVQKNYVSGWDDPRMLTISGLRRRGYTPASIRNFCAEIGLAKRESWIEMGVLENEIRNDLNPSAQRAMCVLDPIKLIIDNYPEEKEEEVVAKIHPQNPEMGTKTLPFSRELYIERNDFMENPPGKFRRLGPGKEVRLRYGYYIQYASHLKDETTGEITEIHCTYDPESRGGSSPDGRKVKGTIHWVSAKHALDCTVHLYDRLFNVENPDADKEVDFLEHLNKDSKLVLRHAKAEPALATLPVGESVQFERQGYFCVDSVDSTEENIVFNRVVTLRDSWAKINK

SEQ ID NO: 67786 - DNA, 1665 bp, Mannheimia succiniciproducens MBEL55E
  CDS (1)..(1665): transl_table=11
atgaataataacgaaattcttatcgaagaaacccgcccgacaaactttatccgtcaaattattgatgaagatttggcttcaggtaaacataataacgtttacacgcgttttccgccggaaccgaacggctatttgcatatcggtcatgcgaaatccatttgtttaaactttggtattgcgcaggattatcagggcaaatgtaatttgcgttttgacgataccaatccggtgaaagaagatgtggaatatgtagattcaatcaaacaggatgtggaatggttagggttcaaatgggaaggtgagcctcattatgcgtcggattattttgaccagctttacggctatgccatcgaattaatagagaaaggcatggcttatgtggatgaactgtcgccggaacaaatgcgcgaataccgcggcacgttaaccgaaccgggcaaaaacagcccgtatcgtgaccgcagtattgaagaaaatctgaatttgtttgaaaaaatgaaaaacggcgaatttgcagaaggtgcggcttgtttacgtgcaaaaatcgatatggcgtctccgtttatggtaatgcgcgatcccgtgctttatcgtgtgaaatttgccagccatcaccaaaccggcgacaaatggtgtatttatccgatgtacgatttcactcattgcatttccgatgctattgaacgcattacacattcgttatgtacactggagttccaggataaccgccgtttatacgactgggtgttggagcatatttcaattgagcgtccgctgccgcatcaatatgaattttcacgtttaaatttagaaggcacattaacttctaagcgcaaattattaaaattggtcgcggaaggtgcggtggacggttggaacgatccgcgtatgccgactatttccggtttgcgacgtcgcggttatacaccggccgcattacgtgaattctgtcgccgtatcggggtgaccaagcaggataacgtagtggagttcagcgcattagaaagctgcattcgagacgacttaaataggaatgcgccacgagccatggcggtgttgaatccgctgcgtatcgtgattgaaaacttcactgaaaaagaagtattaactgcgccgaatcatcctaattatccggaattaggcacccatgaaatgtcgtttacgaaagaaatttatattgatcaggcggattttcgtgaagaggccaacaaacaatataaacgcttagtattaggcaaagaagtgcgtttacgtcatgcttatgtcattaaagcggaacgcgtggaaaaagacgaacaaggcggtattaccaccgtttattgttcttatgatcctgaaacgttaggcaaaaacccggcggacggccgcaaagtgaaaggcgtgatccattgggtgtccgcaacggaaaatttacctgcagaattccgtgtctacgggcgtttgttcaatgtgccgaatccgggggcggaagaagatattttagccgctatgaatcctgaatctttagttgtgaaacatggcgtagttgaaatgagtctggctaacgccgagccggaaaaagcgtatcagtttgaacgcgaaggctattattgtgcggataacaaagatagtaaagcaggcaatttagtatttaatttaaccgtaagtttaaaagaaggtttttaa

SEQ ID NO: 67787 - protein, 554 aa, Mannheimia succiniciproducens MBEL55E
MNNNEILIEETRPTNFIRQIIDEDLASGKHNNVYTRFPPEPNGYLHIGHAKSICLNFGIAQDYQGKCNLRFDDTNPVKEDVEYVDSIKQDVEWLGFKWEGEPHYASDYFDQLYGYAIELIEKGMAYVDELSPEQMREYRGTLTEPGKNSPYRDRSIEENLNLFEKMKNGEFAEGAACLRAKIDMASPFMVMRDPVLYRVKFASHHQTGDKWCIYPMYDFTHCISDAIERITHSLCTLEFQDNRRLYDWVLEHISIERPLPHQYEFSRLNLEGTLTSKRKLLKLVAEGAVDGWNDPRMPTISGLRRRGYTPAALREFCRRIGVTKQDNVVEFSALESCIRDDLNRNAPRAMAVLNPLRIVIENFTEKEVLTAPNHPNYPELGTHEMSFTKEIYIDQADFREEANKQYKRLVLGKEVRLRHAYVIKAERVEKDEQGGITTVYCSYDPETLGKNPADGRKVKGVIHWVSATENLPAEFRVYGRLFNVPNPGAEEDILAAMNPESLVVKHGVVEMSLANAEPEKAYQFEREGYYCADNKDSKAGNLVFNLTVSLKEGF

SEQ ID NO: 67788 - DNA, 1656 bp, Legionella pneumophila subsp. pneumophila str. Philadelphia 1
  CDS (1)..(1656): transl_table=11
atgacagaacaaactgaaaaaagagctcactttattagacaactcattatagatgatttggcaaatggaaaacatcagggaatcgttactcgtttccctcctgaaccaaatggatatctccatgttggacatgccaaatctatttgtcttaattttggtttggcagaagagtttaagggaaaatgctttttacgttttgatgacaccaatccaattaaagaagaagaagaatatgtaaacgcgatcattgatgatgttcgttggttgggatttgaatggtgtgccatgacgcattcttcggattactatcatgagctgtatgaattagccatttatcttattaagaaagatatggcttatgtcgatagcttgagtatggaagaaattcgtgcttttcgcggcactctacaagaaccagggcgcgaaagcccttatagaaacagaacaattgaagagaatctggatttgttcgctcggatgaaagctggtgagtttcctgatggaactcatgttttgagagcaaaaatagatatgaaatcaggtaatttaaatatgcgtgatccggttttatatcgtatacgccacgcccggcaccagcgtacaggagatgaatggtgtatttatcccatgtatgattatgctcatcctatttctgatgccctggaaaaaataacacattctttatgtacgttggaattccaggatcatagacctttgtatgattggctggttgataatttacctttgcctgccaaaccagtacaaaccgaatttgccagattaaatttatcccatactgttacgagcaagagaaaattacgtgaattggttgaaaaaaaaatcgttacaggatgggatgacccacgattgcccacattacgcggtatgcgcaaaaggggatacccacctgctgcaattcggcaattctgtgaaataattggcatatcaagaagtgattcagtgattgatatgagtttacttgaggaatgtgtacgcgctgaatttaataaaactgcaaaacgggctctctgtgttatggatcccttaaaagttgttattgtaaattatccggaaaataaagtagaacagcttcaagcagctttctaccctcaaaatcctgagtcagcgagtaggaatttacccttttcccgtgaaatttatattgaaaagtctgattttatggaaaatccgcctaataaatatttccggttatctcctggagctgaagtacgcttacgtcatgcctatgttataaagtgccaggaagttatccgtaatgaccaaggcgaaataacagaattgcattgcacttatgatgaaaatactcttggcaaaaatccggaggatcgcaaggtgaagggtgtcattcattgggtgtcttcatcacatgcctatcctgtcactatttatcaatacgacaggttatttacagatcctaatcctgcacgggaagaggattattttcagtttctgaaccataactctttacaaaccctccagggattttgtgaaccggcaatggctgagcaggcagaaggagatgtgtttcaatttgagcgtttaggttattattgcgtcaattcagtggctgagggctgtgttcaagcctttcatcgggtagtggatttgaaggacacttggggtaaagtgagttga

SEQ ID NO: 67789 - protein, 551 aa, Legionella pneumophila subsp. pneumophila str. Philadelphia 1
MTEQTEKRAHFIRQLIIDDLANGKHQGIVTRFPPEPNGYLHVGHAKSICLNFGLAEEFKGKCFLRFDDTNPIKEEEEYVNAIIDDVRWLGFEWCAMTHSSDYYHELYELAIYLIKKDMAYVDSLSMEEIRAFRGTLQEPGRESPYRNRTIEENLDLFARMKAGEFPDGTHVLRAKIDMKSGNLNMRDPVLYRIRHARHQRTGDEWCIYPMYDYAHPISDALEKITHSLCTLEFQDHRPLYDWLVDNLPLPAKPVQTEFARLNLSHTVTSKRKLRELVEKKIVTGWDDPRLPTLRGMRKRGYPPAAIRQFCEIIGISRSDSVIDMSLLEECVRAEFNKTAKRALCVMDPLKVVIVNYPENKVEQLQAAFYPQNPESASRNLPFSREIYIEKSDFMENPPNKYFRLSPGAEVRLRHAYVIKCQEVIRNDQGEITELHCTYDENTLGKNPEDRKVKGVIHWVSSSHAYPVTIYQYDRLFTDPNPAREEDYFQFLNHNSLQTLQGFCEPAMAEQAEGDVFQFERLGYYCVNSVAEGCVQAFHRVVDLKDTWGKVS

SEQ ID NO: 67790 - DNA, 1734 bp, Azoarcus sp. EbN1
  CDS (1)..(1734): transl_table=11
atgaatccgaacacgcccaaagatggcgccgccagcacgccttccaacttcatccgcaacctcatcgacgaggacaaccggagcgggaaatgggacggccgcgtcgagacgcgctttcctcccgaaccgaacggctacctgcactacggccacgcgaagtcgatctgcctgaacttcggcctcgcgcagagctacggcggcgcctgccatctgcgcttcgacgacaccaatccggaaaaggaagagcaggaatacgttgattcgatcatcgaggcggtgcgttggctcggcttcaactggggcgaacacctgtatttcgcctcggattatttcgatcgcatgtacgcatgcgccgaatacctgatcacgtcgggccgtgcctacgtcgaatcgctgtcggccgaggagatgcgcgcgtatcgcggcacgctgactgaagccgggcgcgagagcccgtaccgcagccgcagcgtcgaggaaaacctcgatcttttccgccgcatgcgcgctggcgagttcaccgacgggcagcacatcctgcgcgcgaaagtcgacatggcctcgccgaacctgaacctgcgcgacccggcgatctaccgcattcgccgcgcgactcaccaccgcaccggcgacgcctggtgcatctacccgatgtacaccttcgcccatccgatcgaggacgcgatcgaaggcatcacgcattcgctgtgcacgctcgagttcgaggaccagcgcccgttctacgactggctgctcgacgcgctcgcgaccggcggtttcttcccccggccgctgccgcagcagatcgagttcgcacggctgaacctcacctacgtcgtgctctcgaagcgcaagctgattcagctcgtcgacgagcaccatgtcgacggctgggacgacccgcgcctgccgacgctcgtcggcgcgcgccgccgcggcttcacggcggcaggcttccgcctcttcgccgagcgcatcggcgtgacgaagtccgacacgtggatcgacgtcagcgtgctcgaggaatgcatgcgcgaggacctcaacgatgctgccgagcggcgcgtggcagtgctcgatccgttgaagctcgtcatcacgaactacccggaagggcacagcgagcagtgcgaggcgccgaaccatccgctcaaacccgaactgggcaagcggccgatgccgttctcgggcgaactgtggatcgagcgcgaggacttcatggaaacgccggccaaaggcttccgccgcctctaccccggcaacatggcgcggctgcgttacggctacgtcgtcaaatgcaccggctgcgagaaggatgccgacggcaacatcaccgcagtgctgtgcgagtatctgcccgacacgaagtccggcacgccgggcgccgacagcgtcaaggtcaagggcaacctgcactgggtatccgtcgcgcacgcgtacgaagcccaggtgcggctctacgaccgactgttcgcccatccctaccccggcaaccggcgcgaaggcgatccggaggatttcgagcgcagctacatcgacgacctcaacgacacgtcgaagctgacgatccacgcgcagctcgaaccggcgctcgcgaacgcccggccggaagaccatttccagttcgagcgccacggctacttcgtcgccgaccgcatcgattcgaccgccggagcaccggtcttcaaccgcaccgtgacgctgaaggactcgtggagcaaggccaaaggataa

SEQ ID NO: 67791 - protein, 577 aa, Azoarcus sp. EbN1
MNPNTPKDGAASTPSNFIRNLIDEDNRSGKWDGRVETRFPPEPNGYLHYGHAKSICLNFGLAQSYGGACHLRFDDTNPEKEEQEYVDSIIEAVRWLGFNWGEHLYFASDYFDRMYACAEYLITSGRAYVESLSAEEMRAYRGTLTEAGRESPYRSRSVEENLDLFRRMRAGEFTDGQHILRAKVDMASPNLNLRDPAIYRIRRATHHRTGDAWCIYPMYTFAHPIEDAIEGITHSLCTLEFEDQRPFYDWLLDALATGGFFPRPLPQQIEFARLNLTYVVLSKRKLIQLVDEHHVDGWDDPRLPTLVGARRRGFTAAGFRLFAERIGVTKSDTWIDVSVLEECMREDLNDAAERRVAVLDPLKLVITNYPEGHSEQCEAPNHPLKPELGKRPMPFSGELWIEREDFMETPAKGFRRLYPGNMARLRYGYVVKCTGCEKDADGNITAVLCEYLPDTKSGTPGADSVKVKGNLHWVSVAHAYEAQVRLYDRLFAHPYPGNRREGDPEDFERSYIDDLNDTSKLTIHAQLEPALANARPEDHFQFERHGYFVADRIDSTAGAPVFNRTVTLKDSWSKAKG

SEQ ID NO: 67792 - DNA, 1722 bp, Neisseria gonorrhoeae FA 1090
  CDS (1)..(1722): transl_table=11
atgccgtctgaagccatctgtttaaagaaaaccatgctcaataaagaccaattcgcggacaaccatttcatccgcaccatcatcgaagacgacctcaaaagcggcaaacacgaagccgtccaaacccgttttccgcccgaacccaacggctatttacatatcggacacgccaaatccatctgcctgaacttcggtttggcgtatatttacgacggtttgtgcaacctgcgtttcgacgacaccaaccccgaaaaagaaaacgacgaatacgtcaacgccatcaaagaagatgtcgagtggctcggtttccattgggcgggcgagccgcgtttcgcttccgactatttcgaccggctttatgactacgccgtcggtttaatcaaagacggcaaagcgtatgtcgatgatttgacgcccgaagaaatgcgagaataccgcggtacgctgaccgaagcgggtaaaaacagcccttaccgcgaccgcagtatcgaagaaaacctcgacctgttcacgcgtatgaaaaacggcgagttccccgacggcagcaaaaccctgcgcctgaaaatcgacatggcggcaggcaacatcaatatgcgcgatcccgtcatctaccgcatccgccgcgcccatcaccataacaccggcgacaaatggtgcatctacccgatgtacgattacacgcattgcatttccgatgccatcgaaggcatcacgcattccttgtgcacgctcgaatttgaagcgcaccgtccgctttacgactgggtgttggacaacatccccgcgctgcacgccacccgtccgcgccaatacgagttttcccgtttggagcttttgtacaccattacctccaaacggaaattgaatcagttggttgtggaaaaacacgtttccggctgggatgatccgcgtatgccgaccatttccggtatgcgccgccgcggctacacgcccgaaggggtgcgcctgtttgccaaacgcgccggtatttccaaatctgaaaacatcgtcgacatgagcgtgttggagggtgcgattcgcgaagagctggaaaactccgccccgcgcctgatggcggttttgaacccgctcaaagtgaccctgaccaactttcaagccggcaaaacccaaagccgccgtgccgcgttccatccgaaccacgaagaaatgggcgatcgcgaagtacctgtttcacaaaccatctacatcgaagccgacgactttgccgaaaatccgcccaaaggcttcaagcgtctgattcccggcggcgaagtacgcttgcgccacggctatgtcatcaagtgcggtgaagtcgtcaaagacgaagcaggcaatgtggttgaactcaaatgcagcatcgaccacgacaccttgggcaaaaatccagaaggccgcaaagttaaaggcgtgattcactgggtttccgccgaacacgccgccgaaatcaaagtccgtctgtacgaccgcctctttaccgtcgagcgtcccggtgccgtgcgcggcgaagacggcgaatacctgccgtttaccgatttcctcaatccggaatccgttaaggaaatcactgcttacgccgaacctgccgcgaaagatttgccggcggaaagccgttggcagttcgagcgtatcggctattttgtgaccgaccgccaagaccacggcaaagacacgccggtgtttaaccgcacggtgacgttgaaagattcttggcagcctaagtaa

SEQ ID NO: 67793 - protein, 573 aa, Neisseria gonorrhoeae FA 1090
MPSEAICLKKTMLNKDQFADNHFIRTIIEDDLKSGKHEAVQTRFPPEPNGYLHIGHAKSICLNFGLAYIYDGLCNLRFDDTNPEKENDEYVNAIKEDVEWLGFHWAGEPRFASDYFDRLYDYAVGLIKDGKAYVDDLTPEEMREYRGTLTEAGKNSPYRDRSIEENLDLFTRMKNGEFPDGSKTLRLKIDMAAGNINMRDPVIYRIRRAHHHNTGDKWCIYPMYDYTHCISDAIEGITHSLCTLEFEAHRPLYDWVLDNIPALHATRPRQYEFSRLELLYTITSKRKLNQLVVEKHVSGWDDPRMPTISGMRRRGYTPEGVRLFAKRAGISKSENIVDMSVLEGAIREELENSAPRLMAVLNPLKVTLTNFQAGKTQSRRAAFHPNHEEMGDREVPVSQTIYIEADDFAENPPKGFKRLIPGGEVRLRHGYVIKCGEVVKDEAGNVVELKCSIDHDTLGKNPEGRKVKGVIHWVSAEHAAEIKVRLYDRLFTVERPGAVRGEDGEYLPFTDFLNPESVKEITAYAEPAAKDLPAESRWQFERIGYFVTDRQDHGKDTPVFNRTVTLKDSWQPK

SEQ ID NO: 67794 - DNA, 1695 bp, Pseudomonas syringae pv. syringae B728a
  CDS (1)..(1695): transl_table=11
atgagcaagcccactccagaacccgctgcccattcaaaggcaggtccagccgtaccgaccaatttcctgcgtcctatcgtgcaggcagacctggactcgggcaagcacagcaaaatcgtgacccgctttccgccggagcccaacggctacctgcacatcggtcacgccaagtcgatctgcgtgaacttcggtctggcccaggagttcggtggcgatacgcacctgcgtttcgatgacaccaacccggccaaggaagaccaggaatacatcgacgccatcatgagtgacgtcaagtggctgggcttcgagtgggcgggcgaagtgcgctacgcctcgcagtatttcgaccagttgcacgactgggcggtcgagctgatcaaggcaggcaaggcctatgtggacgatctgacccccgagcaggcgcgcgaatatcgcggcaccctgaccgagccgggcaagaacagtccgttccgcgagcgtagcgtcgaggaaaacctcgacctgttcgcgcgcatgaaagccggtgagttcgaggatggcgctcgcgtactgcgcgccaaaatcgacatggcctcgccgaacatgaacctgcgtgacccgatcatctaccgcattcgccatgcgcatcaccatcagaccggcgacaagtggtgcatctatccgatctatgacttcacccacggtcagtcggatgccctcgaaggcatcacccactcgatctgcaccctggagttcgaaagccatcgtccgctgtacgactggtttctcgacaacctgccggtgccgtgcaagccgcgtcagtatgagttctcgcgcctgaacctgaactacaccatcaccagcaagcgcaagctcaagcaactggttgacgagaaacacgtcaatggctgggatgacccacgcatgtcgacgctgtcgggcttccgtcgccgtggctacacgcccaaatcgattcgcaatttctgcgaaatgatcggcaccaaccgctctgatggcgtggtcgatttcggcatgctcgaattcagcatccgcgacgacctggaccacagcgcgccgcgcgccatgtgcgtgctgcgcccgctgaaagtggtcatcaccaactacccggaaggccaggtcgagaagctggaactgccgcgccacccgaaagaagatctgggcatgcgcgagctgccgttctcgcgggagctgtacatcgatcgcgacgattacatggaagagccgccgaagggctacaagcgtcttgagcccaacggcgaagtgcgtttgcgtggcagctatgtgatccgtgccgatgaagcgatcaaggatgccgacggcaacatcgtcgagctgcgttgctcctacgacccggaaacgttgggcaagaaccctgaaggccgcaaggtcaagggcgtcgtgcactgggtgccggcagccgagagcgtagagtgcgaagtgcgtctgtacgatcgtctgttccgttcgccgaaccctgaaaaagccgaagagggcgcaagctttctggacaacatcaacccggactccctgcaagtactgaccggttgtcgcgccgagccttcattggcgcaagcgcaaccggaagaccgtttccagttcgaacgcgaaggttatttctgcgcggacatcaaggactccagacccggtcgacctgtcttcaaccgcaccgtgacgttgcgggattcctggacctga

SEQ ID NO: 67795 - protein, 564 aa, Pseudomonas syringae pv. syringae B728a
MSKPTPEPAAHSKAGPAVPTNFLRPIVQADLDSGKHSKIVTRFPPEPNGYLHIGHAKSICVNFGLAQEFGGDTHLRFDDTNPAKEDQEYIDAIMSDVKWLGFEWAGEVRYASQYFDQLHDWAVELIKAGKAYVDDLTPEQAREYRGTLTEPGKNSPFRERSVEENLDLFARMKAGEFEDGARVLRAKIDMASPNMNLRDPIIYRIRHAHHHQTGDKWCIYPIYDFTHGQSDALEGITHSICTLEFESHRPLYDWFLDNLPVPCKPRQYEFSRLNLNYTITSKRKLKQLVDEKHVNGWDDPRMSTLSGFRRRGYTPKSIRNFCEMIGTNRSDGVVDFGMLEFSIRDDLDHSAPRAMCVLRPLKVVITNYPEGQVEKLELPRHPKEDLGMRELPFSRELYIDRDDYMEEPPKGYKRLEPNGEVRLRGSYVIRADEAIKDADGNIVELRCSYDPETLGKNPEGRKVKGVVHWVPAAESVECEVRLYDRLFRSPNPEKAEEGASFLDNINPDSLQVLTGCRAEPSLAQAQPEDRFQFEREGYFCADIKDSRPGRPVFNRTVTLRDSWT

SEQ ID NO: 67796 - DNA, 1701 bp, Pseudomonas fluorescens Pf-5
  CDS (1)..(1701): transl_table=11
atgagcaagcccactgtcgaccctacctcgaattccaagactggaccggccgtaccggtcaacttcctgcgcccgatcatccaggcggacctggactcgggtaagcacacacagatcgtgacccgcttccctccggagcccaatggttacctgcacatcggtcacgccaagtcgatctgcgtgaacttcggtctggcccaggaattcggtggcgtcacgcacctgcgtttcgacgacaccaacccggccaaggaagaccaggaatacatcgacgccattgaaagcgacgtcaagtggctgggttttgagtggtccggcgaagtgcgttatgcctcgcagtacttcgaccagttgcacgactgggccgtggaactgatcaaggcgggcaaggcctatgtctgcgacctgacccctgaccaggccaaggaataccgcggcagcctcaccgagccaggcaagaacagcccgttccgcgatcgctcggtggaagagaacctggactggttcgcccgcatgcgcgctggcgagttcccggacggcgcccgcgtgctgcgggccaagatcgacatggcctcgccgaacatgaacctgcgcgacccgatcatgtatcgcattcgccacgcccatcaccatcagactggtgacaagtggtgcatctaccccaactacgacttcacccacggccagtcggacgccatcgaaggcatcacccactcgatctgcaccctggagttcgaaagccaccgtccgctgtacgagtggttcctcgagcacctgccggtgcccgcgcacccgcgccagtacgagttcagccgcctgaacctgaactacaccatcaccagcaagcgcaagctcaagcaactggtggacgagaagcacgtgaatggttgggacgacccgcgcatgtcgaccctgtcgggcttccgccgccgcggctacaccccggcatcgatccgcaatttctgcgagatggttggcaccaaccgctccgacggcgtggtcgattacggcatgctggaattcagcatccgccaggacctcgacgcgaatgccccgcgcgccatgtgcgtgctgcgtccgttgaaagtcgtgatcaccaactacccggaaggccaggtcgagaacctcgaactgccgcgtcatccgcagaaagaagaactcggcgtgcgccagttgccgttcgcccgtgaaatctacatcgaccgtgacgacttcatggaagagccgccaaagggctacaagcgcctggagccgaacggcgaagtgcgcctgcgtggcagctacgtgatccgtgctgacgaagcgatcaaggatgccgagggcaatatcgtcgagctgcgttgctcctacgacccggacaccctgggcaagaaccctgaaggccgcaaggtcaagggcgtggtccactgggtgccggctgccgccagcgtcgagtgcgaagtgcgcctgtacgatcgtctgttccgctctccgaatccggagaaggccgaggacagcgcgagtttcctggacaacatcaaccctgactccctgcaagtgctcactggttgtcgtgctgaaccctcgttgggcaacgcacagccggaagaccgtttccagttcgagcgcgaaggctacttctgcgcggatatcaaggactcgaaaccaggtgctccggtattcaaccgtaccgtgaccctgcgcgactcctggggtcagtga

SEQ ID NO: 67797 - protein, 566 aa, Pseudomonas fluorescens Pf-5
MSKPTVDPTSNSKTGPAVPVNFLRPIIQADLDSGKHTQIVTRFPPEPNGYLHIGHAKSICVNFGLAQEFGGVTHLRFDDTNPAKEDQEYIDAIESDVKWLGFEWSGEVRYASQYFDQLHDWAVELIKAGKAYVCDLTPDQAKEYRGSLTEPGKNSPFRDRSVEENLDWFARMRAGEFPDGARVLRAKIDMASPNMNLRDPIMYRIRHAHHHQTGDKWCIYPNYDFTHGQSDAIEGITHSICTLEFESHRPLYEWFLEHLPVPAHPRQYEFSRLNLNYTITSKRKLKQLVDEKHVNGWDDPRMSTLSGFRRRGYTPASIRNFCEMVGTNRSDGVVDYGMLEFSIRQDLDANAPRAMCVLRPLKVVITNYPEGQVENLELPRHPQKEELGVRQLPFAREIYIDRDDFMEEPPKGYKRLEPNGEVRLRGSYVIRADEAIKDAEGNIVELRCSYDPDTLGKNPEGRKVKGVVHWVPAAASVECEVRLYDRLFRSPNPEKAEDSASFLDNINPDSLQVLTGCRAEPSLGNAQPEDRFQFEREGYFCADIKDSKPGAPVFNRTVTLRDSWGQ

SEQ ID NO: 67798 - DNA, 1740 bp, Psychrobacter arcticus 273-4
  CDS (1)..(1740): transl_table=11
atgagtgagcaatcaagcaaccatgcacaaaaagacgaacaaaaaaatgactttattcgtaatatcattcgtgatgatgttactgcgcaaaagtaccaacagattatcactcgtttcccacctgagccaaatggttacttacatttgggtcacgtaaaatctatttgcttaaactttggtgtggctgaggagtttggcggtgtctgtaacctgcgttttgatgacaccaaccctaccgcagaaaagcaagacttcattgataacatcgagaacgatgtaaaatggctaggctttgagtgggcaggagaagcgcatcatgcgtcaggctactttgaccagttgtatgcttgggcagtgcaattgattgagcaaggcgatgcgtacgtagacttgcagtcgcctgagcaaatcaaagaaaaccgtggctcatttaatgatgcaggcacagcgtcaccacatcgtgatgccagtgtcgaagaaaacctgcaactctttgatgatatgaaagagggcaaatatgctgaaggtaaagctgttttacgtgccaagattgatatggcaagcccaaatatgaacctgcgcgatcctgttgtttatcgcatcatgcatcaaacgcatcatcaaactggtgataaatggtgcatttatccgatgtatgattttgcccatccgctctctgatgcgctcgaaggcattactcattcattatgtacgctagaatttgaagaccatcgtccattttatgactgggtaatagaaaaggttggctttgagcaagcgccgcatcagtatgagtttagccgcctcaatgttgatcatacattaaccagtaagcgcaaattaaagcagctcgttgatgagaatatcgttagcagttgggacgatccacgcatgccgactattgcaggtatgcgtcgccgtggttatacgccagaaggcttacgtgacttctgtgagcgtgttggtgtgaccaaagtggacagtgttgtagatttccgtctgttagaatttagcattcgtcagtcactagagacgacgactgcacgtggcatggcagtgctcaaaccattaaaagtgacgattactaactttgcggaagctgttagcagttgggagtcgcaaaaggctgatagcgttcaagctcgctttgacgatgcctcgcagactttatggctgactcagccaaaccatcctaatgtcgatatgggcgagcgagagattcctttcactgagaccatttatattgatcaaggcgattatgagattgagccgccagcgggctataagcgtctgtcaccagagaagaatgagattcgtctgcgtaatacctatgtattggcagtaactgagcatattactgatgatagcggcaatgtgattgagctaaaagcaacgattgatccagctactttaggtaacaaccctgaaggtcgcaaggtgaagggtgttattcattgggtatcagcgagccaaggtataccagcgacagtacgcatgtatgagcagttatttagtgttgaagacccaagtagcgttgctgacgtacatcaagcactaaacccaaactcgttgactgagctcaatgcagtggttgaaccatcattggtgaatgcagatgctggtacgcgcttccagtttgagcgtgaaggttactttatttctgatagcgaagatcatagcagtgataagccagtatttaaccaaatcgtgagcttacgtgatagttataaacccgcttaa

SEQ ID NO: 67799 - protein, 579 aa, Psychrobacter arcticus 273-4
MSEQSSNHAQKDEQKNDFIRNIIRDDVTAQKYQQIITRFPPEPNGYLHLGHVKSICLNFGVAEEFGGVCNLRFDDTNPTAEKQDFIDNIENDVKWLGFEWAGEAHHASGYFDQLYAWAVQLIEQGDAYVDLQSPEQIKENRGSFNDAGTASPHRDASVEENLQLFDDMKEGKYAEGKAVLRAKIDMASPNMNLRDPVVYRIMHQTHHQTGDKWCIYPMYDFAHPLSDALEGITHSLCTLEFEDHRPFYDWVIEKVGFEQAPHQYEFSRLNVDHTLTSKRKLKQLVDENIVSSWDDPRMPTIAGMRRRGYTPEGLRDFCERVGVTKVDSVVDFRLLEFSIRQSLETTTARGMAVLKPLKVTITNFAEAVSSWESQKADSVQARFDDASQTLWLTQPNHPNVDMGEREIPFTETIYIDQGDYEIEPPAGYKRLSPEKNEIRLRNTYVLAVTEHITDDSGNVIELKATIDPATLGNNPEGRKVKGVIHWVSASQGIPATVRMYEQLFSVEDPSSVADVHQALNPNSLTELNAVVEPSLVNADAGTRFQFEREGYFISDSEDHSSDKPVFNQIVSLRDSYKPA

SEQ ID NO: 67800 - DNA, 1671 bp, Colwellia psychrerythraea 34H
  CDS (1)..(1671): transl_table=11
atgtcggataccgaaaaccgcccaacaaactttattcgtaatatcattgatgccgatctagatagtggtaaacacacaggtgtgcaaacacgtttcccaccagagccaaatggctttttacatattggccatgcaaaagctatttgcttaaattttggcatagcccaagactataatggtttatgtaatttacggtttgatgataccaaccctgaaaaagaagatattgattacgttcatgctattcaaaaagatgtaaagtggttaggttttgagtgggcaggggaaattcactattcttctaactactttgaccaattacatggttttgcggtagaacttattgaaaaaggtttagcgtatgtttgtttcttaaacgcagaagaaacacgtgagtatcgtggtactttgaataaaccaggtaaaaacagtccttatcgtgatacttcagttgaagaaaatttagccttatttgccaagatgaaaaatggcgaatttgaagaaggcatttgtgccttgcgcgctaaaattgatatgacttcgagctttatgtgcttgcgcgaccctattatttatcgtgtacgttttgcccatcatcatcaaacaggtgataagtggtgcatttatccaatgtatgattttacccattgtttatctgatgcattagaagggatcacccattctatttgtacgttagagtttcaagataaccgacgtttatacgattgggtcattgaacaggtttcagtaccaagcacgccacatcagtatgagttttctcgcttaaaccttgaatacacactgatgagtaagcgtaagttaaatacgttagtagaagaaaaattagttgatagctgggacgacccgcgcatgccaacaattgcagcatttcgtcgtcgtggttatactcccgcgtcaatgcgagagtttgctaagcgaattggtgtaactaaaatggaaaacactattgaaatgagtgttttagaagcatgtattcgtgaagatttaaatgataatgccccgcgtgccatggctgttttagatcctattaaattagtgattgaaaattaccctgaagataagaatgaagatcttattgttaaaaatcacccaagtgatgacgagcaagggacacgtatcgtgccattttctaaagagctttacattgaagctgaagattttagagaagaagccaacaaaaaatataaacgtttggtcatcgacaaagcagtacgtttacgtggtgcttatgtggtaacggcaacacgctgcgataaagatgaacaaggtaacgttaccactgtttattgtacttacaatgaagatacgctaggtaaaaatccaaccgatgggactaaacctaaaggtgtaattcattgggttgatgccaataaatcacttgatgcgatagtacgtttatatgaccgattatttaccgtgcctaaccctgcagcagcagacgattttaattctgttattaaccctcagtctttagtcactattacgggtgctaaagttgagccgtcactagcagaggcgaaacctgaatttgcttatcaatttgagcgtcaaggttacttttgcctagataatgacattaaagagcccggtgcattagtctttaatcgcacggttggcctgcgtgatacttgggcaaaaatcagtcagtaa

SEQ ID NO: 67801 - protein, 556 aa, Colwellia psychrerythraea 34H
MSDTENRPTNFIRNIIDADLDSGKHTGVQTRFPPEPNGFLHIGHAKAICLNFGIAQDYNGLCNLRFDDTNPEKEDIDYVHAIQKDVKWLGFEWAGEIHYSSNYFDQLHGFAVELIEKGLAYVCFLNAEETREYRGTLNKPGKNSPYRDTSVEENLALFAKMKNGEFEEGICALRAKIDMTSSFMCLRDPIIYRVRFAHHHQTGDKWCIYPMYDFTHCLSDALEGITHSICTLEFQDNRRLYDWVIEQVSVPSTPHQYEFSRLNLEYTLMSKRKLNTLVEEKLVDSWDDPRMPTIAAFRRRGYTPASMREFAKRIGVTKMENTIEMSVLEACIREDLNDNAPRAMAVLDPIKLVIENYPEDKNEDLIVKNHPSDDEQGTRIVPFSKELYIEAEDFREEANKKYKRLVIDKAVRLRGAYVVTATRCDKDEQGNVTTVYCTYNEDTLGKNPTDGTKPKGVIHWVDANKSLDAIVRLYDRLFTVPNPAAADDFNSVINPQSLVTITGAKVEPSLAEAKPEFAYQFERQGYFCLDNDIKEPGALVFNRTVGLRDTWAKISQ

SEQ ID NO: 67802 - DNA, 1710 bp, Pseudomonas syringae pv. phaseolicola 1448A
  CDS (1)..(1710): transl_table=11
atgtccaaggatcctatgagcaagcccactccagaacccgctgcccattccaaggcaggcccagccgtaccgaccaatttcctgcgtccaatcgtgcaggcagacctggactcgggcaagcacagtaaaatcatcacgcgctttccgccagagcccaacggttatctgcacatcggtcacgccaagtcgatctgcgtgaacttcggtctggccaaggagttcggtggcgatacgcacctgcgtttcgatgacaccaacccggccaaggaagaccaggaatacatcgacgccatcatgagcgacgtcaagtggctgggcttcgagtgggcgggcgaagtgcgctacgcctcgcagtatttcgaccagttgcacgactgggcggtcgagctgatcaaggcaggcaaggcttacgttgacgatctgacccccgagcaggcgcgcgaataccgcggcaccctgaccgagccgggcaagaacagtccgttccgtgagcgcagcgtcgaggacaacctcgacctgttcgcgcgtatgaaggctggtgaattcgaagatggcgctcgtgtactgcgtgccaaaatcgacatggcctcgccgaacatgaacctgcgtgacccgatcatctaccgcattcgtcatgcgcatcaccatcagaccggcgacaagtggtgcatctacccgatctatgacttcacccacggtcagtcggatgcccttgaaggcatcacccactcgatctgcaccctggagttcgaaagccatcgtccgctgtacgactggttcctcgacaacctgccggtgccgtgcaaaccgcgtcagtatgagttctcgcggctgaacctgaactacaccatcaccagcaagcgcaagctcaagcaactggttgacgagaaacacgtcagtggctgggatgacccgcgcatgtcgacgctgtccggttttcgtcgtcgtggctacacgccgaaatcgattcgcaatttctgcgaaatgatcggcaccaaccgctctgatggggtggtcgatttcggtatgctcgaattcagcattcgcgacgacctggaccacagcgcgccgcgcgccatgtgtgtgctgcgccccctgaaagtggtcatcaccaactacccggaaggtcaggtcgagaagctggaactgccgcgccatccgaaagaagacctgggcatgcgcgagctgccgttttcgcgggagatctacatcgatcgcgacgattacatggaagagccgccaaaaggctacaaacgtcttgaacccaatggtgaagtacgtttgcgtggcagctatgtgattcgcgccgacgaagcgatcaaggacgcagagggcaacatcgtcgaactgcgttgctcctacgatccggagaccctgggcaagaaccctgaaggccgcaaggtcaagggcgttgtgcactgggtgccagcggccgagagcgttgaatgcgaagtgcgtctgtatgaccgcctgttccgctccgccaacccggaaaaagccgaagacggcgcgagctttctggacaatatcaaccctgattccctgcaagtgctgaccggttgtcgtgctgaaccatcattgggacacgcgcaaccggaagaccgtttccagttcgaacgcgaaggttatttctgcgcggacatcaaggactcgaaacctggtcaaccagtcttcaaccgcacggtcacgttgcgggattcctggacctga

SEQ ID NO: 67803 - protein, 569 aa, Pseudomonas syringae pv. phaseolicola 1448A
MSKDPMSKPTPEPAAHSKAGPAVPTNFLRPIVQADLDSGKHSKIITRFPPEPNGYLHIGHAKSICVNFGLAKEFGGDTHLRFDDTNPAKEDQEYIDAIMSDVKWLGFEWAGEVRYASQYFDQLHDWAVELIKAGKAYVDDLTPEQAREYRGTLTEPGKNSPFRERSVEDNLDLFARMKAGEFEDGARVLRAKIDMASPNMNLRDPIIYRIRHAHHHQTGDKWCIYPIYDFTHGQSDALEGITHSICTLEFESHRPLYDWFLDNLPVPCKPRQYEFSRLNLNYTITSKRKLKQLVDEKHVSGWDDPRMSTLSGFRRRGYTPKSIRNFCEMIGTNRSDGVVDFGMLEFSIRDDLDHSAPRAMCVLRPLKVVITNYPEGQVEKLELPRHPKEDLGMRELPFSREIYIDRDDYMEEPPKGYKRLEPNGEVRLRGSYVIRADEAIKDAEGNIVELRCSYDPETLGKNPEGRKVKGVVHWVPAAESVECEVRLYDRLFRSANPEKAEDGASFLDNINPDSLQVLTGCRAEPSLGHAQPEDRFQFEREGYFCADIKDSKPGQPVFNRTVTLRDSWT

SEQ ID NO: 67804 - DNA, 1806 bp, Dechloromonas aromatica RCB
  CDS (1)..(1806): transl_table=11
gtgagcagccccaaccagcccgccaacaccccggcccccgccgccaatttcatcaagaacatcgtcgaagccgacctcgccgccggcaagcacgcccagcgccactgggccggccatccgggtacggcggccgaccacgctgccgcccccctcgatccggccaaactgcgtacccgcttcccgcccgagccgaacggctacctgcatttcggccacgccaagtccattctgctcaatttcggccttgccgagcaatacggcggccgctgccacctgcgctttgacgacaccaaccccgagaaggaagatcaggagtacgtcgactcgatcgtcgatgcggtcaaatggctcggctgttcgtgggaaaaagacggcgaagccaacctttactacgcctcgaattacttcgactggatgttgcaatgcgccgaggcgctgatcgccgccggccacgcctatgtcgatagccagaacgccgaagaaatgcgcgccaaccgcggcacgctgacccagcccggcaagaattcgcctttccgcgaccgttccgtcgccgagaacatggatctgttcaagcgcatgcaggccggcgaatttgctgatggcgcccatatcctgcgcgccaggatcgacatggctgcgccgaacatcaacctgcgcgacccggccatctaccgcatccgccacgccacgcaccacaacactggcgacaagtactgcgtctatccgatgtacaccttcgcccatccgatcgaggatgcgctggagaacatcacccattcgatctgcacgctggaattcgaagaccagcgcccgttctacgactggctgctcgagcgcctggctgaagccggcctgttgcagcgcccgctgccgcagcagatcgagttctcgcgcctcaacctgacctacgtcgtgctctccaagcggaaactcattcagctggttgaggaaaaacacgttaccggctgggacgacccgcgtatgccgacgctggtcggcgcccgtcgtcgcggctattcggccgaaggcttccgcctgtttgccgaccgcatcggcgtttccaagaacgactcgctgatcgactacgtgctgttcgaagacgccatgcgcgaagtgatgaacgagtccgatctacgccgtatcgcggtactcgatccagtcaagctgatcatcgacaattacccggatggccaggtcgaagagtgcttcgcgccgaatcacccgctgcaccccgaacttggccagcgcagcatcccgttcagccgtgagttgtggatcgaaggtgaagacttcatggaagtgccgagcaagggcttccgccgcctgttccccggcaacatggcgcgcctccgttacggctacgtggtcgagtgcaccggctgcgacaaggatgaaaacggtaaggtcatcgccgtccattgcaactacctgccggaaaccaaatccggcacgccaggcgccgacagcgtcaaggttaagggcaatctgcactgggtctctgccgcccaatcctatcaagccgaaattcgcctctacgagcgcctgttcaaggtgcccgcccccggcgcccggcgcgaaggcgatgcgcccgatctggagcgcgatttcctcgacgacatgaatacggattccgccaagaccatcaccgcccagctcgaaccctgtctgcgcgatgccaagccggaagagcgcttccagttcgaacgacacggctactttgtggccgaccgcgttgactccaagcctggcgccccggtcttcaatcgggccgtcaccttgaaggattcgtggggcaaggcgagctaa

SEQ ID NO: 67805 - protein, 601 aa, Dechloromonas aromatica RCB
MSSPNQPANTPAPAANFIKNIVEADLAAGKHAQRHWAGHPGTAADHAAAPLDPAKLRTRFPPEPNGYLHFGHAKSILLNFGLAEQYGGRCHLRFDDTNPEKEDQEYVDSIVDAVKWLGCSWEKDGEANLYYASNYFDWMLQCAEALIAAGHAYVDSQNAEEMRANRGTLTQPGKNSPFRDRSVAENMDLFKRMQAGEFADGAHILRARIDMAAPNINLRDPAIYRIRHATHHNTGDKYCVYPMYTFAHPIEDALENITHSICTLEFEDQRPFYDWLLERLAEAGLLQRPLPQQIEFSRLNLTYVVLSKRKLIQLVEEKHVTGWDDPRMPTLVGARRRGYSAEGFRLFADRIGVSKNDSLIDYVLFEDAMREVMNESDLRRIAVLDPVKLIIDNYPDGQVEECFAPNHPLHPELGQRSIPFSRELWIEGEDFMEVPSKGFRRLFPGNMARLRYGYVVECTGCDKDENGKVIAVHCNYLPETKSGTPGADSVKVKGNLHWVSAAQSYQAEIRLYERLFKVPAPGARREGDAPDLERDFLDDMNTDSAKTITAQLEPCLRDAKPEERFQFERHGYFVADRVDSKPGAPVFNRAVTLKDSWGKAS

SEQ ID NO: 67806 - DNA, 1830 bp, Ralstonia eutropha JMP134
  CDS (1)..(1830): transl_table=11
atgaaattggcaatccgccacgcaacactgaagaccaagcggtccatccagccgctagccggcgccaccatgagccacgacaacaagcctaccgacagcacgcccgcctcgcccgcagtctccaactttctgcggagcatcattgaccaggatctcgcagccggcacgtacgccggccgccaggacagccagggcgagccgctgccgaccgtcatcacccgctttccgccggagcccaacggctacttgcatatcggccatgccaagagcatctgcctgaacttcggcctcgcgcgcgactacggcggccgctgccacctgcgcttcgacgacaccaatccggtcaaggaagacaccgaatacgtcgactcgatcatcgacgcggtgcactggctcggcttttcctgggacagcaagaccccgggcggccagccgcacctgcattatgcgagcgactacttcgaccagctgtacgcatttgccgaaaagctgatcgagcgcggcgccgcctatgtcgacagccagagcgcggagcagatcgccgccaaccgtggcaatttctcggagccgggcaagccgtcgccattccgcgaccgcagcgtcgaggagaacctgcagctgttccgcgatatgcgcgacggcaagtacaaggacggcgagcacgtgctgcgcgcgaagatcgacatgaccgcgccgaacatcgtgatgcgcgatccagtgatctaccgtatccgccatgcccatcaccaccgtactggcgacaagtggtgcatctacccgatgtacgacttcacgcactgtatttcggatgcgatcgagaacatctcgcattcgctgtgcacgctcgagttcgagaacaatcgcccgctgtacgactgggtgctcgagcatctgcgcgacgctggcgtgttccgcgatccgctgccgcaccagtatgaattcgcgcgcctgaacctgacctacgcgatcaccagcaagcgcaagctcaagcaactggtggacgaacagcgcgtggacggctgggacgatccgcgcatgccgaccatcgtcggtatccgccgccgcggctacacgccggaatcgatccagctgttctgcgaccgcgtgggcgtggccaaggccgacagctggatcgacatgagcacgctcgaaggctccgtgcgcgacgacctggacgcgcgcgcagcgcgcggcgtggccgtgctcgacccgctcaagctgatcctcgacaactaccccgaaggccagaccgaggaatgctcggcgccggtgcatccgaagaagccggaattgggcaagcgcgtgttcccgatctcgcgcgagctgtggatcgagcgcgaggacttcaacgagaccccgccgaagggctatttccgcctgttcccgggcaacaaggtgcgcctgaagtacggctatgtgatcgagtgcaccggcgtggacaaggacgctgacggtaacgtcatcgccgtgcacgcaaactaccttcccgacaccaagagcggcacgccgggcgcggacagcgtcaaggtcaagggcgtgatccactgggtcagcgccgccgcggcctacgagtgcgaagtgcgcctgtacgaccgcttgttcaacgacccgaacccggatgccggcggcaagaacttcctcgaagcgctgaaccccgattcgaagaaggtaatcaccgcctatctggagccgagcctgcgtgacgcgaagccggaagaccgcttccagttcgagcgccatggctacttcgtcgccgaccgcaacgattcccagccgggcaagccggtattcaaccgcatcgtcgggttgaaagacagctggggcaagtga

SEQ ID NO: 67807 - protein, 609 aa, Ralstonia eutropha JMP134
MKLAIRHATLKTKRSIQPLAGATMSHDNKPTDSTPASPAVSNFLRSIIDQDLAAGTYAGRQDSQGEPLPTVITRFPPEPNGYLHIGHAKSICLNFGLARDYGGRCHLRFDDTNPVKEDTEYVDSIIDAVHWLGFSWDSKTPGGQPHLHYASDYFDQLYAFAEKLIERGAAYVDSQSAEQIAANRGNFSEPGKPSPFRDRSVEENLQLFRDMRDGKYKDGEHVLRAKIDMTAPNIVMRDPVIYRIRHAHHHRTGDKWCIYPMYDFTHCISDAIENISHSLCTLEFENNRPLYDWVLEHLRDAGVFRDPLPHQYEFARLNLTYAITSKRKLKQLVDEQRVDGWDDPRMPTIVGIRRRGYTPESIQLFCDRVGVAKADSWIDMSTLEGSVRDDLDARAARGVAVLDPLKLILDNYPEGQTEECSAPVHPKKPELGKRVFPISRELWIEREDFNETPPKGYFRLFPGNKVRLKYGYVIECTGVDKDADGNVIAVHANYLPDTKSGTPGADSVKVKGVIHWVSAAAAYECEVRLYDRLFNDPNPDAGGKNFLEALNPDSKKVITAYLEPSLRDAKPEDRFQFERHGYFVADRNDSQPGKPVFNRIVGLKDSWGK

SEQ ID NO: 67808 - DNA, 1698 bp, Thiobacillus denitrificans ATCC 25259
  CDS (1)..(1698): transl_table=11
atgtcgcacgacaacgctcccgcgcccgccgccaacttcatccgcaacatcatcgacgagcagaacgccgaaggaaaatggggcggccgcgtcgagacgcgcttcccgcccgagccgaacggctacctgcacctcggccacgcgaagtccatcttcctcaacttcgggcttgcgcgcgactacggcggcgtctgccacctgcgcttcgacgacaccaaccccgagaaggaagagcaggaatatgtcgacgcgatcactgaatcggtaaagtggctcggcttcgactggggcgagcatctttactatgcgtcgaactacttcgacaccatgtatgcctgcgccgagcacctgatcacggccggccacgcgtacgtcgattcgctcacggccgaggagatgcgcgaataccgcggcacgctcacggaaaagggcaaggacagcccctatcggagtcgttcaatcgaggagaacctggacctcttccgcaaaatgcgcgccggcgaattccccgatggcgcgcatgtgctgcgggccaagatcgacatggcctcgcccaacatcaacctgcgcgatccggcgatctatcgcatcaagcgcgcccaccaccacaacaccggcgacaaatggtgcatctacccgatgtacacctacgcgcatccaattgaagatgcgatcgagcacatcacccactcgatctgcaccctcgaattcgaggaccagcgcccgttctacgactggctgctggacaagctcgccatcggcggcttcttcagccgcccgctgccgcagcagatcgagttcgcgcggctcaacctcacctacgtcatgctttcgaagcgcaagctgatccaattggtcgaagagaagcacgtctccggctgggacgacccgcgcatgccgaccctcgtcggcgcgcggcggcgcggctacacgcccgaaggcctccgccgcttcaccgaccagatcggcgtgtcgaagtccgacggctggatcgactacagcgtgttcgaagcctgccagcgcgatgtcttgaacgattccgcgccgcgtcgcgtcgccgtcctcgacccggtcaagctcgtcatcgacaactaccccgaaggccagagcgaagactgcttcgcccccaaccacccgcagcagccggagctcggcaagcgcgcgattccgttctcgaaagaactgtggatcgagcgcgaggacttcgaggagacgccgcccaagggctacttccgcctcttcccaggcaactcggtgcgtctacgctacggctacgtcgtcaagtgcaccggctttgaccgcgacgccgacggcaacatcgcagccgtgcactgcgaatacctgcccgacaccaagtccggcacccccggcgccgactcggtcaaggtcaagggaaatatccattgggtgagcgcggcccacgcccacgacgcagaagtccgtctctacgaccgcctgttcaagaccgcgcagcccggcgccgaaaccggcaacttcctcgacgacctcaacgccgactcggtgaaggtcatccgcgcgcaactggaaccggcgctcaaggacgccgcgcccgaagcttcgtttcagttcgagcggcacggctacttcgtcgcggatcgggtcgatacgcagccgggcgcgccggtgttcaaccggaccgtgacgttgaaggattcgtgggtgaaggttggcagttag

SEQ ID NO: 67809 - protein, 565 aa, Thiobacillus denitrificans ATCC 25259
MSHDNAPAPAANFIRNIIDEQNAEGKWGGRVETRFPPEPNGYLHLGHAKSIFLNFGLARDYGGVCHLRFDDTNPEKEEQEYVDAITESVKWLGFDWGEHLYYASNYFDTMYACAEHLITAGHAYVDSLTAEEMREYRGTLTEKGKDSPYRSRSIEENLDLFRKMRAGEFPDGAHVLRAKIDMASPNINLRDPAIYRIKRAHHHNTGDKWCIYPMYTYAHPIEDAIEHITHSICTLEFEDQRPFYDWLLDKLAIGGFFSRPLPQQIEFARLNLTYVMLSKRKLIQLVEEKHVSGWDDPRMPTLVGARRRGYTPEGLRRFTDQIGVSKSDGWIDYSVFEACQRDVLNDSAPRRVAVLDPVKLVIDNYPEGQSEDCFAPNHPQQPELGKRAIPFSKELWIEREDFEETPPKGYFRLFPGNSVRLRYGYVVKCTGFDRDADGNIAAVHCEYLPDTKSGTPGADSVKVKGNIHWVSAAHAHDAEVRLYDRLFKTAQPGAETGNFLDDLNADSVKVIRAQLEPALKDAAPEASFQFERHGYFVADRVDTQPGAPVFNRTVTLKDSWVKVGS

SEQ ID NO: 67810 - DNA, 1701 bp, Pseudomonas fluorescens PfO-1
  CDS (1)..(1701): transl_table=11
atgagcaagcccactgtcgaccctacctcgaattccaagaccggccccgttacgccggtcaatttcctgcgcccgatcatccaggcggacctggactcgggtaagcacacgcagatcgtcacccgtttcccgccagagcccaacggctacctgcacatcggccacgccaagtcgatctgtgtgaacttcggcctggcccaggagttcggcggcgtcactcacctgcgtttcgacgacaccaacccggccaaggaagaccaggaatacatcgacgcgatcgaaagcgacgtcaaatggctgggcttcgaatggtccggcgaagtacgctacgcctcgcaatacttcgaccagctgcacgactgggccgtcgagctgatcaaggccggcaaggcctacgtcgacgacctgacgcctgagcaagccaaggaataccgcggcagcctgaccgagccgggcaagaacagcccgttccgcgaccggtcggtggaagagaacctggactggttcgcccgcatgcgcgccggcgagttcccggacggtgcccgcgtactgcgtgccaagatcgacatggcctcgccgaacatgaacctgcgcgacccgatcatgtaccgcatccgccacgctcatcaccaccagaccggtgacaagtggtgcatctacccgaactacgacttcacccacggtcagtcggacgccatcgaaggcatcacccactcgatctgcaccctggagttcgaaagccatcgtccgctgtacgagtggtttctcgacgcactgccagtgccggcgcgtccgcgtcagtacgagttcagccgcctgaacctcaactacaccatcaccagcaagcgcaagctcaagcaactggttgacgagaaacacgtcaacggctgggacgatccgcgcatgtcgacgctgtcgggcttccgccgccgtggctacaccccggcatcgatccgcaacttctgcgagatgatcggcaccaaccgttccgacggcgtggtcgacttcggcatgctcgagttcagcatccgtcaggacctggacgccaacgccccgcgcgccatgtgcgtgctgcgtccgttgaaagtcgtgatcaccaactacccggaagatcaggtcgagaacctcgaactgccgcgtcatccgcagaaagaagaactcggcgtgcgccagctgccgttcgcccgtgaaatctacatcgaccgcgatgacttcatggaagagccgccgaagggctacaagcgcctggagccgaacggcgaagtgcgtctgcgcggcagctacgtgatccgtgccgacgaagcgatcaaggacgccgacggcaacattgtcgagctgcgttgctcgtacgatccggacaccctgggcaagaaccctgaaggccgcaaggtcaagggcgtgatccactgggtgccggccgctgccagcatcgagtgcgaagtgcgtctgtacgatcgcctgttccgttctccgaacccggagaaggccgaagacagcgcgagtttcctggacaacatcaaccctggctcactgcaagtgctgaccggttgtcgtgccgagccttcgctgggcaatgcacagccggaagaccgtttccagttcgagcgcgaaggctacttcgtcgcggatatcaaggactcgaaaccaggtcagccggtattcaaccgtaccgtgaccctgcgcgattcgtggggccagtga

SEQ ID NO: 67811 - protein, 566 aa, Pseudomonas fluorescens PfO-1
MSKPTVDPTSNSKTGPVTPVNFLRPIIQADLDSGKHTQIVTRFPPEPNGYLHIGHAKSICVNFGLAQEFGGVTHLRFDDTNPAKEDQEYIDAIESDVKWLGFEWSGEVRYASQYFDQLHDWAVELIKAGKAYVDDLTPEQAKEYRGSLTEPGKNSPFRDRSVEENLDWFARMRAGEFPDGARVLRAKIDMASPNMNLRDPIMYRIRHAHHHQTGDKWCIYPNYDFTHGQSDAIEGITHSICTLEFESHRPLYEWFLDALPVPARPRQYEFSRLNLNYTITSKRKLKQLVDEKHVNGWDDPRMSTLSGFRRRGYTPASIRNFCEMIGTNRSDGVVDFGMLEFSIRQDLDANAPRAMCVLRPLKVVITNYPEDQVENLELPRHPQKEELGVRQLPFAREIYIDRDDFMEEPPKGYKRLEPNGEVRLRGSYVIRADEAIKDADGNIVELRCSYDPDTLGKNPEGRKVKGVIHWVPAAASIECEVRLYDRLFRSPNPEKAEDSASFLDNINPGSLQVLTGCRAEPSLGNAQPEDRFQFEREGYFVADIKDSKPGQPVFNRTVTLRDSWGQ

SEQ ID NO: 67812 - DNA, 1662 bp, Geobacter metallireducens GS-15
  CDS (1)..(1662): transl_table=11
atgtcaaccgaaacgccccacaccgccaacttcctccgcaccatcgttcaggaggacctgaagggcggcaaacgcgaaaccatcgtcacccgcttcccccctgagcccaacggctatctccacatcggccacgccaagtccatctgcctgaacttcggcctggcaaaggagttcgggggccgctgccacctccgcttcgacgacacgaacccggtaaaggaagaaaccgagtatgtggaatccatcaaggaaagcgtgcggtggctcggcttctcatgggggacgcacctctactacgcctccgagtacttcgagcagctctaccagtgggcagagcacctaatcctccaggggaaggcctacgtggacgacctgacggccgaggagatccgggcccaccgcggcaccctgaccgaggcggggaaggagagcccctggcgcaaccgctccccggaggagaacctggatcttttccgccggatgcgggccggggagtttcccgacggcgccaaggtgctccgggcgaagatagacatggcctcccccaacatgaacctccgggacccggtcatgtaccggatcatccacgcctcccacccccacgtgggtgacgcctggcgcatctaccccatgtacgactacgcccacggccagtccgacgccatcgaggggatcacccactccatctgcaccctggagttcgaggaccacaagcctctctacgagtggttcctggacaacctgccggtgcccaaccgcccccgccagtacgagttcgcgcgcctgaacctcacctacgcggtcatgagcaagcgcaagctcctgcagttggtgaaggacggcgacgtctccggctgggacgacccgcgcatgcctaccatcatggggatccggcgccgtggctacactcccgaggcggtcagaaacttctgcgagaccatcggcgtggggcggagcgacagctggatcgacatgagcatcctggaggagagcgttcgccaggacctgaacgagcgggcaccccgggtcatggcggtgctgaagcccctgcggctcgtcatagaggattatccggaaggggaggcggaggagctcaccatcccgtaccacccccagaagcctgagctggggagccgggtggtccccttctgcagcgagctcttcatcgagcaggatgattttgcggaagttccccccaagggattcaagcgcctctcccccggggaggagatccggctgcggggggcatacatcattaagtgcgtcgacgtggagaaggatgccgagggcgccgtcaccgcggtccgctgtacctacgatcccgaaacccgcagcggtctcccagggtccgagcggaaggtgaagggggtcatccactgggtgtcggcccgccacgccgaaacagcgaaggtgcgcctctacgaccggctcttcaccgaccctaacccctccggcgacgactggaaggaccacctgaatccggcatccatggagattctggccgactgccggctggaaccctcccttgctacagcccaggccgaggaccgcttccagtttgaacggcagggatacttctgcgttgacctgaaggattcacgaccaggggcgccggtcttcaaccggacggtgaccctgcgggattcctggaccaagaaataa

SEQ ID NO: 67813 - protein, 553 aa, Geobacter metallireducens GS-15
MSTETPHTANFLRTIVQEDLKGGKRETIVTRFPPEPNGYLHIGHAKSICLNFGLAKEFGGRCHLRFDDTNPVKEETEYVESIKESVRWLGFSWGTHLYYASEYFEQLYQWAEHLILQGKAYVDDLTAEEIRAHRGTLTEAGKESPWRNRSPEENLDLFRRMRAGEFPDGAKVLRAKIDMASPNMNLRDPVMYRIIHASHPHVGDAWRIYPMYDYAHGQSDAIEGITHSICTLEFEDHKPLYEWFLDNLPVPNRPRQYEFARLNLTYAVMSKRKLLQLVKDGDVSGWDDPRMPTIMGIRRRGYTPEAVRNFCETIGVGRSDSWIDMSILEESVRQDLNERAPRVMAVLKPLRLVIEDYPEGEAEELTIPYHPQKPELGSRVVPFCSELFIEQDDFAEVPPKGFKRLSPGEEIRLRGAYIIKCVDVEKDAEGAVTAVRCTYDPETRSGLPGSERKVKGVIHWVSARHAETAKVRLYDRLFTDPNPSGDDWKDHLNPASMEILADCRLEPSLATAQAEDRFQFERQGYFCVDLKDSRPGAPVFNRTVTLRDSWTKK

SEQ ID NO: 67814 - DNA, 1707 bp, Desulfovibrio desulfuricans G20
  CDS (1)..(1707): transl_table=11
atgagcatcaacccagccgatacggacaaaaaaaaggaagccggcgtcgatttcatccgcgccattgtcaacgaagacatgaagaccggcaaatatcagggccgcgtccacacacgctttcctcccgaacccaacgggtacctgcatctgggccatgcaaaatccatctgcctgaatttcggccttgctcaggaatacggcggcaagtgcaatctgcgactggatgacaccaacccgctcaaggaaacccccgaatacgtcgagtccatcaaaacagatgtgcgctggctgggctttgactgggaagatcgcatgtttcatgcctcggactatttcgaacgtctgttcgaacttgccgtacagcttatcaaggcgggcaaggcatatgtggatgacctgacccccgaacagatacgcgaataccgcggcaccctgaaagagcccggcaaaaacagcccctaccgcgaccgcagcgccgaggaaaacctcgacctgttcatgcgtatgcgcaacggcgaatttgaagacggcagccgcgtactgcgtgccaaaatagacatggcatcgcccaacatggtcatgcgcgatcccacgatctaccgtatacgccgtgcgcaccatcaccgcacgggcgacgcgtggtgcatctatcccatgtacgacttcacgcactgcatttccgattccatcgaaggcatcacccattccatctgcacgctggagtttgaaaacaaccgcgagctgtatgactggatgctgaatacgctggaactctatcatccgcagcagatagaatttgcccggctgaatctgacccacaccgtgctttccaaacgcaaacttatccagctggtggaagaaggtcatgtaaacggctgggacgacccgcgcatgcccacgctgagcggtgtacgccgccgcggcataactcccgaagcgctgcgtgaattctgcgcgcgcatcggcgtggccaaagctgacagcatggtggactacggtctgctggaattctgcgcacgcgaacacctgaaccgcatagccccccgcctgatggcggtgctggatcctgtaaaggtggttatcgaaaactatccggaaggacaggtggaagaatttgaaatgcccctgaatcccgaagacgaatcacagggtacccgcatggttccgttctcgcgtgaactgtacatcgaaagggatgacttccgcgaacaggcacccaacaaaaaattcttccgccttgccatcggcaaggaagtgcggctgcgctatgcctattacatcacctgcaacgatgtggtgaaggacgaacacggcaacataaccgaactgcgctgcacgtacgaccccgccacccgcggcggctggtccgacgacggacgcaaggtcaaagggaccctgcactgggtttccgccgcccacgccgtaccggctcaggtacgcctgtacgacaagctgttcaccgtggaaaatcccaatgccgccgaagaaggcaaaacatttgtggattatctgaatcccgattcactttccgtggtgacgggctaccttgaaccggcactgaaaaacatggaacacggcagccgggtgcagtttgaacgcatcggctatttctgcgtcgaccccgattccacagcggacgctcccgtgttcaaccgtaccgtgacgctgaaggacagctgggccaagatagccaacaagcaggactga

SEQ ID NO: 67815 - protein, 568 aa, Desulfovibrio desulfuricans G20
MSINPADTDKKKEAGVDFIRAIVNEDMKTGKYQGRVHTRFPPEPNGYLHLGHAKSICLNFGLAQEYGGKCNLRLDDTNPLKETPEYVESIKTDVRWLGFDWEDRMFHASDYFERLFELAVQLIKAGKAYVDDLTPEQIREYRGTLKEPGKNSPYRDRSAEENLDLFMRMRNGEFEDGSRVLRAKIDMASPNMVMRDPTIYRIRRAHHHRTGDAWCIYPMYDFTHCISDSIEGITHSICTLEFENNRELYDWMLNTLELYHPQQIEFARLNLTHTVLSKRKLIQLVEEGHVNGWDDPRMPTLSGVRRRGITPEALREFCARIGVAKADSMVDYGLLEFCAREHLNRIAPRLMAVLDPVKVVIENYPEGQVEEFEMPLNPEDESQGTRMVPFSRELYIERDDFREQAPNKKFFRLAIGKEVRLRYAYYITCNDVVKDEHGNITELRCTYDPATRGGWSDDGRKVKGTLHWVSAAHAVPAQVRLYDKLFTVENPNAAEEGKTFVDYLNPDSLSVVTGYLEPALKNMEHGSRVQFERIGYFCVDPDSTADAPVFNRTVTLKDSWAKIANKQD

SEQ ID NO: 67816 - DNA, 1710 bp, Burkholderia thailandensis E264
  CDS (1)..(1710): transl_table=11
atgagcaccgaacgcaccgacgccaccgcgccatccaatttcatccgcaacatcatcgacgacgacaaccgcacgggcaaatggagcggccgcgtcgagacgcgctttccgcccgagccgaacggctatctgcacatcggccatgcgaagagcatctgcctgaacttcagcgtcgcgcgcgactacggcggcgtgtgccacctgcgcttcgacgacacgaatccggaaaaggaaagcgtcgagtacgtgaactcgatcgtcgacgcggtgcgctggctcggcttcgactggcaaaaggccggcgttgaccatcagtatttcgcgagcgactactacgacaggctctatgaattcgccgaactgctgatccagcgcggcaaggcgtacgtcgacagccagagcgccgacgagatgcgcacgaaccgcggctcgctgaccgagccgggcacgccgtcgccgttccgcgaccgctcgcccgacgaaagcctcgacctgttccgcaggatgaaggcgggcgaattcggcgaaggcgagcatgtgctgcgcgcgaagatcgacatgagctcgccgaacatgaacatgcgcgacccggtgatctaccggattcgctacgcgcatcactaccgcacgggcgacaagtggtgcgtctacccgatgtacgactacacgcactgcatctcggacgcgctcgagggcatcacgcactcgctgtgcacgctcgaattcgaggatcaccgcccgctctacgactgggtgctcaacgagctcgccgacgccggcgtgttcgcgcggccgctgccgcagcaaatcgaattctcgcgcctgaacctcacctatgcgatcacgagcaagcgcaaattgctgcagctcgtgacggaaggccacgtcgacggctgggacgatccgcggatgccgacgatcgtcggcgtgcgccgccgcggcttcacgccggagagcatccagctcttctgcgagcggatcggcgtgacgaaggtcgattcgtggatcgacatgagcgtgttcgaaggcgcgctgcgcgacgacctcgacgacaaggcgccgcgcacggtggccgtgctcgatccgctcaagctcgtcatcgacaactatccggaaggtcagaccgaggaatgcacggcgcccgtgcacccgcaccatccggagcgcggccagcgcgcgttcccgatctcgcgcgagctgtggatcgagcgcgaggatttcaacgagaatccgccgaagggctatttccggctgttcccgggcaacaaggtgcggctgcgctacggctacgtgatcgaatgcacgggcgcggacaaggacgagcacggcaacgtgaccgccgttcactgcaactactatccggacagcaagtcgggcaccgagggcgcgaacaactacaaggtcaagggcaacatccattgggtgagcgccgcgcacgcgtgcccggccgaagtgcggatctacgatcgcctgttcaaggagccgcatccggacgcgggcggccgcaacttcctcgaggcgctgaatccggattcgaagaagatcgtccaggcctatctcgagccgggcgcgcgcgatgcgctgccggaagcgcgctatcagttcgagcggcacggctatttcgtcgccgatcgcgtcgattcgaagcccggccagccggtgttcaaccgaatcgtcggcctgcgcgacagctggggcaaaccggcctga

SEQ ID NO: 67817 - protein, 569 aa, Burkholderia thailandensis E264
MSTERTDATAPSNFIRNIIDDDNRTGKWSGRVETRFPPEPNGYLHIGHAKSICLNFSVARDYGGVCHLRFDDTNPEKESVEYVNSIVDAVRWLGFDWQKAGVDHQYFASDYYDRLYEFAELLIQRGKAYVDSQSADEMRTNRGSLTEPGTPSPFRDRSPDESLDLFRRMKAGEFGEGEHVLRAKIDMSSPNMNMRDPVIYRIRYAHHYRTGDKWCVYPMYDYTHCISDALEGITHSLCTLEFEDHRPLYDWVLNELADAGVFARPLPQQIEFSRLNLTYAITSKRKLLQLVTEGHVDGWDDPRMPTIVGVRRRGFTPESIQLFCERIGVTKVDSWIDMSVFEGALRDDLDDKAPRTVAVLDPLKLVIDNYPEGQTEECTAPVHPHHPERGQRAFPISRELWIEREDFNENPPKGYFRLFPGNKVRLRYGYVIECTGADKDEHGNVTAVHCNYYPDSKSGTEGANNYKVKGNIHWVSAAHACPAEVRIYDRLFKEPHPDAGGRNFLEALNPDSKKIVQAYLEPGARDALPEARYQFERHGYFVADRVDSKPGQPVFNRIVGLRDSWGKPA

SEQ ID NO: 67818 - DNA, 1689 bp, Syntrophus aciditrophicus SB
  CDS (1)..(1689): transl_table=11
atgatgcaaccgacgacctcaaaccccagtgattttatccgggacatcatcgatgaagacctgcggacaaacaaacacggcggccgtgttgccacccgtttcccgccggagccgaacggctacatccatatcggtcacgccaagtcggtatgcctcaacttcgggattgcctcgcaataccagggaacctgcaatctccggatggacgatacagacccgatgggcgaatccatggaattcgtggaatcgatcatccacgatgtgcactggctgggatttcactggcaggaccgtctcttttatgcctccgattatttcgagcagctttattccttcgctgttgagctcatcaaaagcggcagcgcctatgtctgcagtctgagtcctgacgagattcgggaacatcgaggaacattcacggaaccgggcaaggaaagcccctatcgaaaccgttccgtagaagagaatctggacctcttttcacggatgcgggccggcgagttcgccgacggcgcccatgtcctgcgggcaaaaatcgatatggcttcttcgaatatagtcatgcgggatccgatcatctatcgcattaaacgggagcctcactacaggactggatcaaactgggtcatttatcccatgtacgacttcgcccactgcctctccgacgctttggaaggaatcacctattcaatttgcacccttgaattcgaaaacaaccgtcccctgtacgactggttcgtagagagactgatcgaaggctcgcgcccgcggcagatcgaattcgcccgccttaatctgagctatactgtgctcagcaagcggcggctcattgaactggtaacccaaaagcatgttcagggctgggatgatccccgcatgccgacggttgcaggcatgcgtcgcaggggctacacacctgaagccatccggacattctgtgccgatatcggcgtggccaaaaacgataatctgattgatatatccctgctggaacactgcgtccgcgaggatctcaatgcccatgcgccaagggcattatgcgtcctgcggcctctgcgggttgtgatcgataattatcctgaagatcaggtcgaagagattgagtgcgccaaccatccgcaaaatcccgggatgggaacgcggatgcttcccttttccagggagctttatatcgaacgagacgactttatggaagatccaccgaaaaaatatcaccgtcttggaccgggacgggaagtccgtctcagaaatgcttacatcatcaaatatgaaagcatggtgaaagacgagaaaaccggcgaagtcagcgagctccactgcacctatgatccagagacccgcaacgcgccgccagcggacggacacaaggttcaaggagtcattcactgggtttcggcacggcacgctgtacctgcccaggtaagattgtacgaccggctgtttagcatcgaggatccgggaaacgaagaagattttatgaaattcctgaatcccggctctctggagatcctgacaacctgctatgcagaatcgagcctgaaaaatgcggaagcggggaacaaatatcagtttgaaagactggggtatttttgtgttgatccggaggcctcagccggcaagcctgtttttaaccgcatcgttccgctgagggattcatggaccaagacagccggtgtaaagaaggattag

SEQ ID NO: 67819 - protein, 562 aa, Syntrophus aciditrophicus SB
MMQPTTSNPSDFIRDIIDEDLRTNKHGGRVATRFPPEPNGYIHIGHAKSVCLNFGIASQYQGTCNLRMDDTDPMGESMEFVESIIHDVHWLGFHWQDRLFYASDYFEQLYSFAVELIKSGSAYVCSLSPDEIREHRGTFTEPGKESPYRNRSVEENLDLFSRMRAGEFADGAHVLRAKIDMASSNIVMRDPIIYRIKREPHYRTGSNWVIYPMYDFAHCLSDALEGITYSICTLEFENNRPLYDWFVERLIEGSRPRQIEFARLNLSYTVLSKRRLIELVTQKHVQGWDDPRMPTVAGMRRRGYTPEAIRTFCADIGVAKNDNLIDISLLEHCVREDLNAHAPRALCVLRPLRVVIDNYPEDQVEEIECANHPQNPGMGTRMLPFSRELYIERDDFMEDPPKKYHRLGPGREVRLRNAYIIKYESMVKDEKTGEVSELHCTYDPETRNAPPADGHKVQGVIHWVSARHAVPAQVRLYDRLFSIEDPGNEEDFMKFLNPGSLEILTTCYAESSLKNAEAGNKYQFERLGYFCVDPEASAGKPVFNRIVPLRDSWTKTAGVKKD

SEQ ID NO: 67820 - DNA, 1647 bp, Francisella tularensis subsp. holarctica
  CDS (1)..(1647): transl_table=11
atgactagtgaaattaaagtaaataaaactaattttataaaaaatatcattaagaaagacctcgaaacaaacaaagtctcaagtattttgacgcgttttcctcctgagcctaatggttatcttcatattggccatgcaaaatcaatatgtcttaattttggtattgcacaagaatttgatggtaagtgtaatctacgctttgatgatactaatcctgataaagaagacattgagtatataaacgcaatccaagaagatgtcgagtggcttggttttaaatgggaaaatcaaccacgttttgcctctgaatattttgataagatgtatgagctagctatattgcttataaaaaaaggcaaagcttatgtctgcgatttgtcagcagaagaaatacgcgcgtaccgtggcacgctaaaagagccaggaaaaaatagtccatacagagaacgcagtatcactgaaaaccttgaattatttgaagagatgaaaaatggtaaatttgctgaaggtagtaaaactttgagagcaaaaattgatatgtcttctggtaatatcaaccttagagatcctgccttatacagaataaaattctcacaccaccctaaaactggtgacaaatggtgtatttatccgatgtatacatttgctcatccacttgaggatgcaatcgaaaaaataactcattcgttatgtactttggaattccaagatcaaagaccattctatgactgggttattgaggaaacagaatttagtataaaaccacagcaaattgaattttcaagacttaatcttaattacacaattacaagtaagcgaaaactaaaatatttggttgataataaacttgtcaatggctgggatgacccacgtatgccaactataaaaggctatcgccgtagaggttatacccctgagtctatacgcaatttctgtgagatgataggaatatctaaacaagattctgttattgacgtatcggttttagaagatgctataagagatgatttaaacaaaagtgtcttaagaaaaaacgttgtcctagatccaataagagtaagcataaaagatatgccaaatcatcatttagatgtaccaaaccacccacaagatccagaatttggacgccgcgagatcacaatatcttcacaaatattcattgaaagagatgactttgtcttcaagctagaaaaagatatgaaaaaacttagtcctaatggtagagtgcgtttactaaatagctatgtaattgagtgtcaagaagtaattactgatactagtggcgaagtcatagaactaaaatgctcttatctaccagaaactttaggtggtaaaaaaccaaatgatggtatcaagcctaatggcattatccattgggttgatgctaataattgccttgatgctgaagttaggatttatgatcgcttatttaatgatgaaaatccagcaaatgctgatcgaattgaagatgttttaaatccagactcattacaagttattaaaaatgccaaagttgaaagatctcttgaaagtgtcaaagctgaagaacgctttcagtttaacagagttggttattttattgctgacttaaaagattgctctaacgacacattagtatttaatcgtattgcaactcttagaaactga

SEQ ID NO: 67821 - protein, 548 aa, Francisella tularensis subsp. holarctica
MTSEIKVNKTNFIKNIIKKDLETNKVSSILTRFPPEPNGYLHIGHAKSICLNFGIAQEFDGKCNLRFDDTNPDKEDIEYINAIQEDVEWLGFKWENQPRFASEYFDKMYELAILLIKKGKAYVCDLSAEEIRAYRGTLKEPGKNSPYRERSITENLELFEEMKNGKFAEGSKTLRAKIDMSSGNINLRDPALYRIKFSHHPKTGDKWCIYPMYTFAHPLEDAIEKITHSLCTLEFQDQRPFYDWVIEETEFSIKPQQIEFSRLNLNYTITSKRKLKYLVDNKLVNGWDDPRMPTIKGYRRRGYTPESIRNFCEMIGISKQDSVIDVSVLEDAIRDDLNKSVLRKNVVLDPIRVSIKDMPNHHLDVPNHPQDPEFGRREITISSQIFIERDDFVFKLEKDMKKLSPNGRVRLLNSYVIECQEVITDTSGEVIELKCSYLPETLGGKKPNDGIKPNGIIHWVDANNCLDAEVRIYDRLFNDENPANADRIEDVLNPDSLQVIKNAKVERSLESVKAEERFQFNRVGYFIADLKDCSNDTLVFNRIATLRN

SEQ ID NO: 67822 - DNA, 1773 bp, Saccharophagus degradans 2-40
  CDS (1)..(1773): transl_table=11
atggcaaatgggctcacgttcttcgcttccgccctgtacactgccaacactttcgcactagatagagcatgtatttttatgactgacaccccactgggttccgcagagaccgaagcaggtaacgacaagccgcttaacttcctagagcaaatcatcaaaaaagatatagatgaaggtcggtgtaatggccttgttacgcgttttccacccgaaccaaacggctatttacacattggccacgccaaatctatctgcttaaattttggccttgctgagcgctttggcggtgtgtgtaacttgcgttttgatgatacgaacccagccaaagaagaaatggagtatgtagaagcaattaaagccgacgttgaatggctaggcttcacttggggcggcgacatcaagtacgcatcgaactatttcgaccaattttatggttgggcacagcatctaattaaaaacggcaaagcttatgtgtgtgacttaaatgccgagcaagctagggaataccgcggtaccttaaaagagggcggtaagccatcgccatatcgcgagcgcagtgttgaggaaaacctcgacctactagagcgcatgaaaaacggtgaattcgacgaaggcgctaaaaccctacgtgcaaaaattgatatgtcgcacggcaatatcaatatgcgcgaccctatcctctaccgcattcgtaagcaaagtcatcaccaaacgggcgataaatggtgtatttatccatcttacgatttcgcccacgggcaagaagatgccatcgagggtgtaacgcactctatctgcacattggaatttgctgatcaccgccctttgtacgagtggttcattgagaaccttcctgtgccgagtaagcccaagcaatatgagtttggccgtttaaacctaaactacacggttacctccaagcgcaaacttaaacagcttgttgatgaaggtgtagttactggttgggatgatccgcgcatgcctaccatagccggttatcgtcgtcgcggttacacgccagcggctattcgcaagttttgcgaaatgattggtgttactaaatctgatggtgtagttgatgtggcgatgcttgagcatgcaatacgcgacgatttagataaaaatgcaccccgtgcaatgtgcgtgcttaaccctctaaaagttactttaactaactacccaagcgataaaaccgaagtgtttaccgctgccggccaccccaaccgcgacgacctacaaagtagggagctgccgtttggccaagtggtgtatatcgataaagaagactttagagaagaagccaataaaaaatacaagcgtttggttattggcaagcgtgttcgcttgcgcaacgcttatgttattgaagctgatgaagctattaaaaatgatgcgggagaaataattgaagtaaaagcgcgcattattgaaaacacggtaggtaacgacccagaagacggcgtcaagcccaaaggcgtaattcactgggttgcagcacatgattgtgtggatgccgaagtgcgtctttacgatcgcctgtttgtagatgaggcgcccgacgcaggtaataaagactttatggaaaccatcaacccagagagcttaactgtacttactaattgtaagttagaaaaaagccttgctatggcaaccgcaggtcaaggctttcagtttgagcgcgaagggtatttttgtcgtgacgctaaagagcctggcttagtgtttaatcgcactattggcctgcgcgatagctggggcaaaaaagacgcataa

SEQ ID NO: 67823 - protein, 590 aa, Saccharophagus degradans 2-40
MANGLTFFASALYTANTFALDRACIFMTDTPLGSAETEAGNDKPLNFLEQIIKKDIDEGRCNGLVTRFPPEPNGYLHIGHAKSICLNFGLAERFGGVCNLRFDDTNPAKEEMEYVEAIKADVEWLGFTWGGDIKYASNYFDQFYGWAQHLIKNGKAYVCDLNAEQAREYRGTLKEGGKPSPYRERSVEENLDLLERMKNGEFDEGAKTLRAKIDMSHGNINMRDPILYRIRKQSHHQTGDKWCIYPSYDFAHGQEDAIEGVTHSICTLEFADHRPLYEWFIENLPVPSKPKQYEFGRLNLNYTVTSKRKLKQLVDEGVVTGWDDPRMPTIAGYRRRGYTPAAIRKFCEMIGVTKSDGVVDVAMLEHAIRDDLDKNAPRAMCVLNPLKVTLTNYPSDKTEVFTAAGHPNRDDLQSRELPFGQVVYIDKEDFREEANKKYKRLVIGKRVRLRNAYVIEADEAIKNDAGEIIEVKARIIENTVGNDPEDGVKPKGVIHWVAAHDCVDAEVRLYDRLFVDEAPDAGNKDFMETINPESLTVLTNCKLEKSLAMATAGQGFQFEREGYFCRDAKEPGLVFNRTIGLRDSWGKKDA

SEQ ID NO: 67824 - DNA, 1791 bp, Methylobacillus flagellatus KT
  CDS (1)..(1791): transl_table=11
atggttaccatgtctgaaaaaccccctgttgctccagcttccaatttcattcgcaatatcattgagcgcgaccttgaacaagggacttatgccagccgccgctgggcaggctcgcccggcgacgccgtgcatcaagccactggcgggccggatccggccaaaatccgcacccgttttccgccggaacccaatggttacctgcatattggtcatgccaagagcatttgtctcaatttcggcttggcacgagatttcggcggtgtgtgccatatgcgcttcgacgacaccaatccagaaaaggaagaacaggaatacgtcgacagtattaccgagtccgtgaagtggctgggctttgattgggaggcgtttggtacatcccatctctattttgccagcaactatttcgacttcatgtatcgggctgcggaatacctgatcgaatcgggtaatgcctatgtcgaccagcaatctgccgaagaaatgcgcattaaccggggcacgttgacggaacccggcaagaactccccctggcgtgaccgcccgatgcaggaaagcctaaccctgttccgcgaaatgcgcgacggtaagcatgcggacggcagcatggtgctgcgcgccaagatcgatatggcttcaccaaatatcaatttgcgcgatcctgcgatttaccgcatcaagcgcgcgcatcaccacaacactggcgacaaatggtgcatctacccgatgtatacctatgctcatccactggaagacgcctacgagggtgtcacccattccatctgtacgctggagttcgaggatcaacgccctttctacgattgggtgctggaaaagctggcggaaggcggcctgctcgctcacccgctgcccaaacagtatgaatttgcccgtctcaacctcacctacgtcgtgctttccaaacgcaagctgatcgaactggtggagaagcaattggtcaatggctgggatgacccccgcatgcctaccctggtcggagcgcgtcgtcgcggctatgcacctgaaggtttccgcctatttgctgaacgtatcggtgtttccaaggcagattcctggattgaatacactattctcgaggattgcatgcgcgaagtactcaatgcatcggcagaacgccgcattgccgtactcgacccggtcaagctcgtcattgacaattatccggaaggccaatccgaagattgccacgcccctaaccatccgcaaaagccggagctcggccatcgcgtcgtaccgctttcgcgcgaattatggatagagcgcgaagacttcatggaagagccggtcaaaggctatttccgcctatttccgggcaacatggtgcgcctgcgctatggctatgtcgtcaaatgcacaagctacgagaaggatgccgctggccatgttactgtcgtacattgtgaatacctgccagacaccaagtccggcacgccaggtgctgactcggtcaaggtcaaaggcaatatccactgggtttcagcggcgcatgcctatgctgccgaagtacgcctgtacgaccggctgttcaaggaggcccatccaggccaaggcaaacatgaggacggctcggatcgcgactacttggacgacatcaatccgaactcagtgaaaacgattacggcacagttggaacctgcattgaaggatgccaaaccggaagagcgcttccagtttgagcggcatggctatttcgtcgcggacagcaaggatagccagccaggcaagccggtgttcaaccgcaccgtgaccctgcgtgatgcctggcagaaataa

SEQ ID NO: 67825 - protein, 596 aa, Methylobacillus flagellatus KT
MVTMSEKPPVAPASNFIRNIIERDLEQGTYASRRWAGSPGDAVHQATGGPDPAKIRTRFPPEPNGYLHIGHAKSICLNFGLARDFGGVCHMRFDDTNPEKEEQEYVDSITESVKWLGFDWEAFGTSHLYFASNYFDFMYRAAEYLIESGNAYVDQQSAEEMRINRGTLTEPGKNSPWRDRPMQESLTLFREMRDGKHADGSMVLRAKIDMASPNINLRDPAIYRIKRAHHHNTGDKWCIYPMYTYAHPLEDAYEGVTHSICTLEFEDQRPFYDWVLEKLAEGGLLAHPLPKQYEFARLNLTYVVLSKRKLIELVEKQLVNGWDDPRMPTLVGARRRGYAPEGFRLFAERIGVSKADSWIEYTILEDCMREVLNASAERRIAVLDPVKLVIDNYPEGQSEDCHAPNHPQKPELGHRVVPLSRELWIEREDFMEEPVKGYFRLFPGNMVRLRYGYVVKCTSYEKDAAGHVTVVHCEYLPDTKSGTPGADSVKVKGNIHWVSAAHAYAAEVRLYDRLFKEAHPGQGKHEDGSDRDYLDDINPNSVKTITAQLEPALKDAKPEERFQFERHGYFVADSKDSQPGKPVFNRTVTLRDAWQK

SEQ ID NO: 67826 - DNA, 1749 bp, Ralstonia metallidurans CH34
  CDS (1)..(1749): transl_table=11
atgagccacgacaccaaacccaacgacacgcccgccgcctccaacttcctgcggagcatcatcgaccaggacctcgccaccggcacctacgccggccgcgcggacaagcaaggcgacccgctgccgacagtcatcacgcgcttcccgccggagccgaacggctacctgcacattggtcacgccaagagcatctgcgtgaacttcgggctggcccgcgactatgccggccgctgccatctgcgcttcgatgacacgaacccggtgaaggaagacaccgagtacgtcgactcgatcatcgatgccgtgcactggctcggcttctcctgggatagcgcccaggcgggcagcacgccgcacctgtacttcgcgagcgactacttcgaccagctctacaagtttgccgagacgctgatcgagcgcggcgtggcctatgtggacagccagagcgccgagcagatcgccgccatgcgcggcaacttttccgagccgggcaagccgtcgccgttccgcgaccgctcggtcgaggagaacctgaagctgttccgcgagatgcgcgacggcaagtacgccgacggcgagcacgtgctgcgcgcgaagatcgacatgaccgccccgaacatcgtgatgcgcgatccggtgctctaccgcatccgccacgcccatcaccaccgtaccggcgacaagtggtgcatctacccgatgtacgacttcacgcattgcatctcggacgcgatcgagaacatcacgcattcgctgtgcacgctcgagttcgaaaacaaccgcccgctctatgactgggtgctcgagcacctgcgcgacgctggcgtgttcgccaatccgctgccgcatcaatacgaattcgcgcgcctgaacctgacctacgcgatcaccagcaagcgacgcctgaagcagctcgtggacgagcagcgcgtgaccggctgggacgatccgcggatgcccaccatcgtcggtatccgccgccgcggctacacgcccgagtcgatccagctcttctgcgatcgcgtgggtgtgtcaaaggccgatagctggatcgacatgagcacgctcgaaggcgcggtccgtgatgacctcgacgcgcgggcaccgcgcagcgttgccgtgctggacccgctcaagctgatcctggacaactacccggaaggccagagcgaggaatgctcggcgccggtgcacccgaagcagcctgaaatgggccgccgcgtgttcccgctgtcgcgtgagctgtggatcgagcgcgaagacttcaacgagaacccgccgaagggctacttccgtctgttcccaggcaacaaggtgcgcctgcgctacggttatgtgatcgaatgcaccggcgtcgacaaggatgccgacggcaacgtgattgccgtgcacgcgaactacctgccggaaaccaagagcggcacgcctggcgcggacagcgtaaaggtcaagggcaacatccactgggtcagcgcgcctcacgcgtgtgaagccgaagtccgcctgtacgaccgtctgttcaacgatccgaacccggatgccggtggcaagaacttcctggacgcgctgaatccggaatcgaagaaggtcgtgaccgcctatctggagccgggcctacgcgatgccaaaccagaggaccgtttccagttcgagcggcacggttacttcgtggcggaccgagtggattcgcagccgggcaagccggtgttcaaccgcacggttggactcaaggacagctggggcaagtga

SEQ ID NO: 67827 - protein, 582 aa, Ralstonia metallidurans CH34
MSHDTKPNDTPAASNFLRSIIDQDLATGTYAGRADKQGDPLPTVITRFPPEPNGYLHIGHAKSICVNFGLARDYAGRCHLRFDDTNPVKEDTEYVDSIIDAVHWLGFSWDSAQAGSTPHLYFASDYFDQLYKFAETLIERGVAYVDSQSAEQIAAMRGNFSEPGKPSPFRDRSVEENLKLFREMRDGKYADGEHVLRAKIDMTAPNIVMRDPVLYRIRHAHHHRTGDKWCIYPMYDFTHCISDAIENITHSLCTLEFENNRPLYDWVLEHLRDAGVFANPLPHQYEFARLNLTYAITSKRRLKQLVDEQRVTGWDDPRMPTIVGIRRRGYTPESIQLFCDRVGVSKADSWIDMSTLEGAVRDDLDARAPRSVAVLDPLKLILDNYPEGQSEECSAPVHPKQPEMGRRVFPLSRELWIEREDFNENPPKGYFRLFPGNKVRLRYGYVIECTGVDKDADGNVIAVHANYLPETKSGTPGADSVKVKGNIHWVSAPHACEAEVRLYDRLFNDPNPDAGGKNFLDALNPESKKVVTAYLEPGLRDAKPEDRFQFERHGYFVADRVDSQPGKPVFNRTVGLKDSWGK

SEQ ID NO: 67828 - DNA, 1689 bp, Myxococcus xanthus DK 1622
  CDS (1)..(1689): transl_table=11
atgacgacgacgaacgaaacgcagggcctgaacttcctccaggaaatcatcgaggaagaccagcggacgggaaagtacgcgggccgcgtgcacacccgcttcccgcccgagcccaacggctacctccacatcggccacgccaagtccatctgcctcaacttcgggctggcgcagcaatacggaggcaagtgcaacctgcgcttcgacgacaccaaccccgtcaccgaggacaccgactacgtcgaggccatccagcgtgacgtgaagtggctgggcttcgagtgggaggaccggaagttcttcgcgtccgactacttcccgaagctctacgacttcgccgtgcagctcatcaagcagggcaaggcgtacgtgtgcagcctgtcccctgaggagattcgcgagtaccgcggcgacttcaccacgccggggcgcaacagtccgtaccgcgagcgctccgtggaggagaacctggacctgttccaccgcatgcgcgcgggcgagttctccgacggccagcacaccctgcgggcgaagatcgacatggcgtcgcccaaccccgtgctgcgcgacccgcccatctaccgcatccgtcacgcgcaccatcaccgcaccggcgacgcgtggcccatctacccgctctacgacttcgcgcactgcctgtcggacgcgattgagggcatcacccactccatctgcacgctggagttcgagaaccggcgcgtgctgtacgactggattgtcgacaacctcgtcagcggggaccggccgtaccagtacgagttcaaccggctaaacctcaactacacggtgatgagcaagcgcaagctgctcaagctggtgacggagggcttcgtggccgggtgggatgacccccggatgatgacgattaccggcctgcgccgccgtggcttcacgccggcgtccatccgggacttcgccacgcgcgtgggcgtgggcaaggcgcagcagctcatcgacatgagcctgttggagctgtgcatccgcgaggacctcaacgagacggctccgcgcgccatggcggtgatgcgcccgttgaaggtggtcctggagaactacccggaggggcagacggagctgctggaggtgcagaaccatccgcagaagccggagatggggacgcgccaggtgcctttcatgcgcgagctgtacatcgaggcggacgacttcatggaggacccgccgaaggggttcttccggttggcgcccggcaaggaggtgcggctgcgctcggcgtacttcatcaagtgcgagcaggtcatcaaggacgccgcgggtaacgtggtggagttgcgttgctcgtatgacccggccacgcgcggcggcaacgcgccggatggccgcaaggtgaagggcacgctgcactgggtacccggcaacgcgcccgtcgcggaggtccgcctctatgaccggctcttctccgtggaggcgccggacgcggacgactccaaggacttcaccacgttcctcaacccgaccagcctccagacgctgcgcgacgcccgcgtcgagccgatgctggtggatgccgccgtggagtcgcgctaccagttcgagcgcaccgggtacttctacgtggacccgaaggactcgaagccgggcaagcccgtcttcaaccgtacggtgacgctgaaggactcatggacgaaggagcaggccaaggggaagtag

SEQ ID NO: 67829 - protein, 562 aa, Myxococcus xanthus DK 1622
MTTTNETQGLNFLQEIIEEDQRTGKYAGRVHTRFPPEPNGYLHIGHAKSICLNFGLAQQYGGKCNLRFDDTNPVTEDTDYVEAIQRDVKWLGFEWEDRKFFASDYFPKLYDFAVQLIKQGKAYVCSLSPEEIREYRGDFTTPGRNSPYRERSVEENLDLFHRMRAGEFSDGQHTLRAKIDMASPNPVLRDPPIYRIRHAHHHRTGDAWPIYPLYDFAHCLSDAIEGITHSICTLEFENRRVLYDWIVDNLVSGDRPYQYEFNRLNLNYTVMSKRKLLKLVTEGFVAGWDDPRMMTITGLRRRGFTPASIRDFATRVGVGKAQQLIDMSLLELCIREDLNETAPRAMAVMRPLKVVLENYPEGQTELLEVQNHPQKPEMGTRQVPFMRELYIEADDFMEDPPKGFFRLAPGKEVRLRSAYFIKCEQVIKDAAGNVVELRCSYDPATRGGNAPDGRKVKGTLHWVPGNAPVAEVRLYDRLFSVEAPDADDSKDFTTFLNPTSLQTLRDARVEPMLVDAAVESRYQFERTGYFYVDPKDSKPGKPVFNRTVTLKDSWTKEQAKGK

SEQ ID NO: 67830 - DNA, 1659 bp, Clostridium perfringens ATCC 13124
  CDS (1)..(1659): transl_table=11
atgtcaaatgctgagcactcatcaaactttataagaaatataataatagatgatttagatagcaaaaaacatgatacaataataactcgttttccacctgaacctaatggatatttacatataggtcatgcaaagtctatagttttaaactttgaattaggaaaagagtttaacggaagaactaacctaagatttgatgatacaaatccaactaaagaggatacggaatacgttgaatctattaaagaagatgttcattggttaggttataactggagcgaattacattttgcatcaaactactttgatgaaatgtataaaagagctctacttttaattaaaaaaggtaaagcttatgtttgtgatttaactccagaagaaatcaaagaatatagaggtactcttactgagcctggtaaggaaagtccatatagaaatagatcagttgaagaaaacttagatttatttgaaagaatgagaaaaggtgaatttgaggacggttcaaaagttttaagagctaaaatagatatgagctcacctaacataaactttagagatcctataatttatagaattgctcatgctagtcaccataatacaggtgataaatggtgtatctaccctatgtatgactttgctcatccattagaagatgctattgaaggaataactcactctatttgtactttagaatttgctgatcacagaccattatatgattggttcgttaaagaatgtgaaatggaaagtgttccaagacaaattgagtttgcaagacttaatatcacaaacactgttatgagtaaaagaaaattaaagcaattagttgatgaaggcatagttgatggttgggatgacccaagaatgcctactgttgctggacttagaagaagaggttacactcctaagtcaataagaaacttctgtaaagctataggagttgctaaggcagattctactgttgattctcaaatgcttgagcatttcataagagaagatcttcaagaaactgctccaagagctatggctgttataaatccacttaaattagttataacaaactatcctgagggagaatcagaaattcttgaaatagaaaataatccaaaggatgaatcagctggtaaaagagctgttacattctcaagagaagtttatattgaaagagaagatttcatggaaaatcctccaaagaaatatttcagattattcccaggaaacgaagtaagattaaaaggtgcttattttgtaaaatgtaacgaagtaataaaagatgaaaatggtgaagttacagaaattcactgtacttatgacccagaaactaagagtggaactggatttactggaagaaaagttaaaggaacaatccactgggttgatgctaataactgtattcctgctgaatttagattatatgaaccattaatcttagatgattgtgaagaaaatgaaggaaagcacttccttgagcaaataaatcctaactcattaactatatgtaagggattcattgagccaagtgctaaagatgctaaacctcaagataaatatcaattatttagacatggatacttcaatgttgatcctaatttcacaagtgatgataatttagtattcaacagaatagtttcattaaagagttcatttaaattaaaataa

SEQ ID NO: 67831 - protein, 552 aa, Clostridium perfringens ATCC 13124
MSNAEHSSNFIRNIIIDDLDSKKHDTIITRFPPEPNGYLHIGHAKSIVLNFELGKEFNGRTNLRFDDTNPTKEDTEYVESIKEDVHWLGYNWSELHFASNYFDEMYKRALLLIKKGKAYVCDLTPEEIKEYRGTLTEPGKESPYRNRSVEENLDLFERMRKGEFEDGSKVLRAKIDMSSPNINFRDPIIYRIAHASHHNTGDKWCIYPMYDFAHPLEDAIEGITHSICTLEFADHRPLYDWFVKECEMESVPRQIEFARLNITNTVMSKRKLKQLVDEGIVDGWDDPRMPTVAGLRRRGYTPKSIRNFCKAIGVAKADSTVDSQMLEHFIREDLQETAPRAMAVINPLKLVITNYPEGESEILEIENNPKDESAGKRAVTFSREVYIEREDFMENPPKKYFRLFPGNEVRLKGAYFVKCNEVIKDENGEVTEIHCTYDPETKSGTGFTGRKVKGTIHWVDANNCIPAEFRLYEPLILDDCEENEGKHFLEQINPNSLTICKGFIEPSAKDAKPQDKYQLFRHGYFNVDPNFTSDDNLVFNRIVSLKSSFKLK

SEQ ID NO: 67832 - DNA, 1647 bp, Haemophilus somnus 129PT
  CDS (1)..(1647): transl_table=11
atggaaaatacggaacataaaccaacaaattttattcgccaaattattgatgaagatttagctagcggaaaacatcataatgtttatactcgttttccccctgagccgaacggctatttacatattggccatgctaaatcgatttgtttaaatttcggtattgcacaagattatcagggtaaatgtaatttacgttttgacgacaccaatccggtaaaagaagatgtggaatacgttgacagtattaagcaagatgtaaaatggttaggttttgaatgggagggggagcctcgctatgcttccgactatttcgatcaactgtatagttatgcaattgaattaattcaaaaagggttggcttatgttgatgaactttcacccgagcaaattcgtgagtatagaggaacacttacatcagcaggtaaaaacagtccttatcgtgatcgcagtgtagaagaaaacttggcgttatttgaaaaaatgaaaaaaggcgagtttgcagaaggtgcggcaagtttaagagcgaaaattgatatggcatctccttttatggttatgcgtgatcctgtgctatatcgcatcaaatttgcaagtcatcatcaaacaggtgataaatggtgcatttacccgatgtacgattttacccattgcatttccgatgccattgaaagaattactcattcattatgtacgctagaatttcaagataaccgtcgtttatatgactgggtcttggataatatttcgattgagcgtccgttaccgcatcaatatgaattttcacgtttgaatttagaatatacgttgacatctaaacgtaagctactgaaattggttaatgatgggattgttgacggttggaatgatccacgtatgcctactatttctgggttacgtcgtcgaggttatacccctgcatcattgcgtgagttttgtcgtcgtataggggtaactaaacaggataacgtggtggaatacagtgcattggaaagctgtattcgtgatgatttaaacacaaacgcacctcgtgcaatggcagtgttaaacccgctaaaaattgtgattgaaaattttgatgggaaagaaatacttaccgcacctaatcacccaaatcgtgaagaattgggaacgagggaacttccttttaccaaagaaatttatatcgatcaggctgatttccgtgaagaagcgaataaacaatataagcgtctggtgttgggtaaagaagtgcggttgcgtaatgcttatgtgattaaagcggaacgtgttgaaaaagatgcggaaggttgtgtaaccacagtatattgtacttatgatcccgaaacattaggtaaaaatcctgagggacgcaaagtaaaaggtgttattcaatgggtgtcagcaacggataatttatcggcagaatttcgtttgtatgacaaattgtttactgtagcgaatccgggagcagtggaagacattaatgaagtgttaaatccaaattccttaatcattaagcgtggagtagtcgaacaaagccttgctaatgccaaagctgaacaagcgtatcaatttgaacgggaagggtattattgtgccgatagcaaagacagtaatgcagataacttagtttttaatctaactgtcagtctgaaagaagggttttaa

SEQ ID NO: 67833 - protein, 548 aa, Haemophilus somnus 129PT
MENTEHKPTNFIRQIIDEDLASGKHHNVYTRFPPEPNGYLHIGHAKSICLNFGIAQDYQGKCNLRFDDTNPVKEDVEYVDSIKQDVKWLGFEWEGEPRYASDYFDQLYSYAIELIQKGLAYVDELSPEQIREYRGTLTSAGKNSPYRDRSVEENLALFEKMKKGEFAEGAASLRAKIDMASPFMVMRDPVLYRIKFASHHQTGDKWCIYPMYDFTHCISDAIERITHSLCTLEFQDNRRLYDWVLDNISIERPLPHQYEFSRLNLEYTLTSKRKLLKLVNDGIVDGWNDPRMPTISGLRRRGYTPASLREFCRRIGVTKQDNVVEYSALESCIRDDLNTNAPRAMAVLNPLKIVIENFDGKEILTAPNHPNREELGTRELPFTKEIYIDQADFREEANKQYKRLVLGKEVRLRNAYVIKAERVEKDAEGCVTTVYCTYDPETLGKNPEGRKVKGVIQWVSATDNLSAEFRLYDKLFTVANPGAVEDINEVLNPNSLIIKRGVVEQSLANAKAEQAYQFEREGYYCADSKDSNADNLVFNLTVSLKEGF

SEQ ID NO: 67834 - DNA, 1671 bp, Shewanella sp. MR-7
  CDS (1)..(1671): transl_table=11
atgagtcatgtggacactgaagtacgtccgagtaactttatccgtaatatcattgatgaggacctgaaaagcggtaagcacactcgtgtgcagacgcgttttcctcccgagccaaatggttatctgcatataggtcatgctaagtccatctgtttgaacttcggcattgcgcgcgattaccaaggcctatgtaatttacgttttgatgataccaatcctgaaaaagaagacatcgattatgtgaattcgattcaggcggatgtgcattggttggggttccaatgggatggtgaagtccgttattcctctaactatttcgaccaattacatcaatatgcggttgagttaatcaacaaaggcttagcctatgtgtgtttcctcaatgccgatgaaacccgtgaataccgtggcaccttaaaagagccgggcaaaaacagcccgtatcgcgatactcctgttgaagaaaacctgcaattattcgaaaaaatgcgtaagggtgaattcaaagaaggtgagtgtgcattgcgtgccaaaatcgacatggcatcgcctttcatgtgtatgcgcgatccggtgatttaccgtattcgtttcgctcaccatcatcaaacgggtgacaagtggtgcatttacccaatgtacgacttcactcactgtatttcggatgcgctggagcacattactcactcgttatgtacgcttgagttccaagacaaccgccgtctttacgattgggttctcgacaatttagatgatttccaagcgccgaaccgtactcgtcagtacgagttttctcgcttaaatcttgaatatacgctgatgtctaagcgtaaattaaatgacttagtgacgcgtaagttagtttctggatgggatgacccacgtatgccaacgattgctggcctgcgtcgtcgtggttataccccagcatctatccgcgagttttgccaacgtattggtatcactaagcaagaaaacatgattgaagccgcgatgctcgatgcctgcatccgtgaagagctcaacgagcatgcgccacgtgcgatggccgtactgcgcccattaaaagttgtgattgagaactacccagaaggtcaactcgagacgattcaagcggcttctcacccaagcgatgaaagcatgggcacacgtgaacttgcctttggccgcgaactgtatatcgatgtggcggacttcagagaagaagccaataagcaatacaagcgtctagtcatgggtaaagaagtgcgtctgcgtaacgcttatgtgattaaggctgagcgttgtgacaaagacagcgaaggcaatatcaccacggtttactgtagctacgatgcggataccttgggtaaaaaccctgccgatggtcgcaaggtgaaaggcgtaatccattgggtggaagcgactacggctaaacctgcggaattccgtttataccaacgcttgttcacggatccaaatcctgcggcagcagagactgtggatgaagtgcttaaccctaactcacttgaagtggtgaatggtttagttgaagccagtcttgtgaatgcgccagcggaaaaagcatatcagtttgagcgtgaaggttatttctgtgctgacaataaagactcatcagccgagcatttagtctttaacctaacggttgcactgcgtgactcgtttgaatag

SEQ ID NO: 67835 - protein, 556 aa, Shewanella sp. MR-7
MSHVDTEVRPSNFIRNIIDEDLKSGKHTRVQTRFPPEPNGYLHIGHAKSICLNFGIARDYQGLCNLRFDDTNPEKEDIDYVNSIQADVHWLGFQWDGEVRYSSNYFDQLHQYAVELINKGLAYVCFLNADETREYRGTLKEPGKNSPYRDTPVEENLQLFEKMRKGEFKEGECALRAKIDMASPFMCMRDPVIYRIRFAHHHQTGDKWCIYPMYDFTHCISDALEHITHSLCTLEFQDNRRLYDWVLDNLDDFQAPNRTRQYEFSRLNLEYTLMSKRKLNDLVTRKLVSGWDDPRMPTIAGLRRRGYTPASIREFCQRIGITKQENMIEAAMLDACIREELNEHAPRAMAVLRPLKVVIENYPEGQLETIQAASHPSDESMGTRELAFGRELYIDVADFREEANKQYKRLVMGKEVRLRNAYVIKAERCDKDSEGNITTVYCSYDADTLGKNPADGRKVKGVIHWVEATTAKPAEFRLYQRLFTDPNPAAAETVDEVLNPNSLEVVNGLVEASLVNAPAEKAYQFEREGYFCADNKDSSAEHLVFNLTVALRDSFE

SEQ ID NO: 67836 - DNA, 1707 bp, Solibacter usitatus Ellin6076
  CDS (1)..(1707): transl_table=11
atgaccactgcaaacccagagccggcagccggcccttcgaatttcattcgtgacatcatcctggatgacctgaacacaaataagtaccaggggcgcgtgcacacgcggtttcctccggagccgaacgggtacctgcacatcggccacgccaaatcgatctgcctgaatttcggactggcggcggagttcggcggcaagacgaatttgcgtttcgacgacaccaatcccagcaaagaagagacggagtacgtcgattcgattatcgactctgtgcgctggctgggcttcgattgggaagaccggcttttctacgcgtcggattatttccatcagttgtacgattgggcgctgcagatgatccgcgagggcaaggccttcgtgtgcgacctcaccgccgacgaaatccgccagtaccgcggcacgcccacggaaccgggcaaggagagcccgtaccgcaatcgcagcgtggaggagaacctggacctgttcgcgcgcatgaaagccggcgagtttcccgatggcagccgtaccctgcgcgccaagatcgacatggcgtcgccgaatttcaacctgcgcgacccgatcatgtaccgcatcgtgcacgccgagcatcatcgcaccggcaacgagtggtgcatctatccgatgtacgactacgcgcacgggcagagtgattccatcgaacgcatcactcactccatctgcacgctggaattcgaagaccaccggccgctctacgattggtacatcgaggcgctgggaatctaccatccgcagcagatcgaattcgaccggctgaatatcacctacacgctgctgagcaagcggaaactgctgcagttggtgcaggacgggcacgtaagcgggtgggacgatccgcgcatgcccacgcttgtcggcatccggcggcgcggctacacgcccgaggcgatgcgcaatttctgcgcggcgattgggctttccaagaccaacggcatcatcgaactcggaaggctggaatatttcgtccgcgaagatttgaacaagcgcgcgcagcgcgtgatggcggtgctgcggcccctgaaggtagtgatcgataactacccggagggccaggtagaagagatggaggctgtgaacaatcccgaggatgcgtcggccgggacgcgtaaggtaccgttctcgcgggaactctacatcgagcaggacgatttccgcgaagacccaccgaaggaattcttccggctggcccccggccgcgaagtgcggctgcgctacggctacttcatcaagtgcacgggcgtggtgaagaatgcggccggcgagatcacggaagttcactgcacctacgacccggagacgcgcggcggcaacgcaccggacgggcgcaaggtgaaggcgaccatccattgggtgtcggcggctcaggccgtgtccggcgaggtgcggatgtacgacacgctgttcctcaaggaagatccgaaccaggtggcagaggggcaggacttcacggcgaatctgaatccgaagtcgctcgagatcattcgcgatgcgaagctggagccgagcctggctaacgcggcgccgggtacgcgactgcaattcgagcgcctcggctacttctgcgtggacagcgattcgacgcccggaaatccggtcttcaaccgcacggtagcgttgaaggacacgtgggcgaagatcgagaagcggggcacgccgaagaaatga

SEQ ID NO: 67837 - protein, 568 aa, Solibacter usitatus Ellin6076
MTTANPEPAAGPSNFIRDIILDDLNTNKYQGRVHTRFPPEPNGYLHIGHAKSICLNFGLAAEFGGKTNLRFDDTNPSKEETEYVDSIIDSVRWLGFDWEDRLFYASDYFHQLYDWALQMIREGKAFVCDLTADEIRQYRGTPTEPGKESPYRNRSVEENLDLFARMKAGEFPDGSRTLRAKIDMASPNFNLRDPIMYRIVHAEHHRTGNEWCIYPMYDYAHGQSDSIERITHSICTLEFEDHRPLYDWYIEALGIYHPQQIEFDRLNITYTLLSKRKLLQLVQDGHVSGWDDPRMPTLVGIRRRGYTPEAMRNFCAAIGLSKTNGIIELGRLEYFVREDLNKRAQRVMAVLRPLKVVIDNYPEGQVEEMEAVNNPEDASAGTRKVPFSRELYIEQDDFREDPPKEFFRLAPGREVRLRYGYFIKCTGVVKNAAGEITEVHCTYDPETRGGNAPDGRKVKATIHWVSAAQAVSGEVRMYDTLFLKEDPNQVAEGQDFTANLNPKSLEIIRDAKLEPSLANAAPGTRLQFERLGYFCVDSDSTPGNPVFNRTVALKDTWAKIEKRGTPKK

SEQ ID NO: 67838 - DNA, 1671 bp, Shewanella sp. ANA-3
  CDS (1)..(1671): transl_table=11
atgagtcatgtggacactgaagtacgtccgagtaactttatccgtaatatcattgatgaggatctgaaaagcggtaagcacaccagtgtgcagacgcgttttcctcccgagccaaatggttatctgcatattggtcatgctaagtctatctgtttgaacttcggcatcgcgcgcgattaccaaggcctttgtaatttacgttttgatgataccaatcctgaaaaagaagacatcgattatgtgaattctattcaggcggatgtgcgttggttgggattccagtgggatggtgaggttcgttattcctctaactatttcgaccaattacaccaatacgcggttgagttgatcaataaaggcttagcctatgtgtgtttcctcaatgccgatgaaacccgcgaataccgtggcaccttaaaagagccgggtaaaaacagcccgtaccgtgacacttccgttgaagaaaacctgcaattgtttgaaaaaatgcgtaagggtgaattcaaagaaggtgagtgtgcgctgcgtgccaaaatcgacatggcatcgcctttcatgtgtatgcgcgatccggtgatttaccgtattcgtttcgctcaccatcatcaaacgggtgacaagtggtgcatttacccaatgtacgacttcactcactgtatttctgacgcgctggagcacattactcactcgttatgtacgcttgagttccaagacaaccgtcgtctttacgattgggttctcgacaatttagatgattttcaagcgccgaaccgtacccgtcagtacgaattttctcgcttaaatcttgaatatacgctgatgtctaagcgtaaattaaatgacttagtgacgcgtaagttagtttctggatgggatgacccacgtatgccaacaattgctggcctgcgtcgtcgtggttataccccagcgtctatccgcgagttttgccaacgtattggtatcactaagcaagaaaacatgattgaagcggcaatgctggatgcttgtatccgtgaagagcttaacgagcatgcgccacgtgcgatggccgtactgcgcccattaaaagtcgtgattgagaactacccagaaggtcaaatcgagacgattcaagcggcttctcacccaagcgatgaaagcatgggcacacgcgaacttgcctttggccgcgaactgtatatcgatgtggcggacttcagagaagaagccaataagcagtacaagcgtctagtgatgggcaaagaagtgcgcctgcgtaatgcttatgtgattaaggctgagcgttgtgacaaagacagcgaaggcaatatcaccacggtttactgtagctacgatgcggataccttgggtaaaaaccctgccgatggtcgcaaggtaaaaggcgtaatccattgggttgaagcgactacggccaaacctgcggaattccgtttataccaacgcttgttcacggatccaaatcctgcagcagcagagaccgtggatgaagtgcttaaccctaactcacttgaagtggttaatggtttagttgaggcaagtcttgttaatgcgccagcggaaaaagcataccagtttgaacgtgaaggttatttctgtgctgacaataaagactcatctgccgagcatttagtctttaacctaacagttgcactgcgtgactcgtttgaatag

SEQ ID NO: 67839 - protein, 556 aa, Shewanella sp. ANA-3
MSHVDTEVRPSNFIRNIIDEDLKSGKHTSVQTRFPPEPNGYLHIGHAKSICLNFGIARDYQGLCNLRFDDTNPEKEDIDYVNSIQADVRWLGFQWDGEVRYSSNYFDQLHQYAVELINKGLAYVCFLNADETREYRGTLKEPGKNSPYRDTSVEENLQLFEKMRKGEFKEGECALRAKIDMASPFMCMRDPVIYRIRFAHHHQTGDKWCIYPMYDFTHCISDALEHITHSLCTLEFQDNRRLYDWVLDNLDDFQAPNRTRQYEFSRLNLEYTLMSKRKLNDLVTRKLVSGWDDPRMPTIAGLRRRGYTPASIREFCQRIGITKQENMIEAAMLDACIREELNEHAPRAMAVLRPLKVVIENYPEGQIETIQAASHPSDESMGTRELAFGRELYIDVADFREEANKQYKRLVMGKEVRLRNAYVIKAERCDKDSEGNITTVYCSYDADTLGKNPADGRKVKGVIHWVEATTAKPAEFRLYQRLFTDPNPAAAETVDEVLNPNSLEVVNGLVEASLVNAPAEKAYQFEREGYFCADNKDSSAEHLVFNLTVALRDSFE

SEQ ID NO: 67840 - DNA, 1734 bp, Azoarcus sp. BH72
  CDS (1)..(1734): transl_table=11
atgaatccgaacgacaacaaggacggcgcgcccgccgctcccagcaacttcatccgcaaccagatcgacgaagacaaccgcagcggcaagtggagcggccgcgtcgagacgcgcttcccgcccgagcccaacggctacctgcactacggccacgccaagtcgatctgcctgaacttcgggctggcggaaagctatggcggcgcctgccacctgcgcttcgacgacaccaacccggagaaggaagagcaggaatacgtcgattccatcatcgaggcggtgcagtggctcggcttcgactggcgtgagcacctctacttcgcctccgactacttcgacatcatgtacgcctgcgccgaatcgctgatcaaggccggcaaagcctatgtcgattcgctgtcggccgaggaaatgcgcgcgctgcgcggcacgctgaccgagccgggcaaggacagcccgttccgcacccgcagcatcgacgagaacctcgacctcttccgccgcatgcgcgccggcgagttcgccgaaggcacgcacgtcctgcgcgccaggatcgacatggcgagccccaacatcaacctgcgcgatccggcgatctaccgcatccgccgtgccacccaccaccgcaccggcgacaactggtgcatctacccgatgtacaccttcgcgcacccgatcgaggacgcgatcgagaacatcacccattcgatctgcacgctcgaattcgaggaccagcgcccgttctacgactggctgctcgacgcgctcgcttccgccggccacttcccacgcccgctgccgcagcagatcgagttcgcccgcctcaacctcacctacgtggtgctctccaagcgcaagctgatccagctggtggacgaaggccatgtggacggctgggacgacccgcgcctgcccacgctggtcggcgcgcgccgccgcggcttcaccgccgaaggcttccgcctgttcgcagaacgcatcggcgtgaccaagtcggactcctggatcgacatgagcacgctggaagaatgcatgcgcgagcacctcaacgaggccgccgaacgccgcgtcgcggtgctcgacccgttgaagctcgtcatcaccaactacgccgaaggcgccagcgagcagtgccacgcgcccaaccatccgctcaagcccgaactcggcaagcgcgacatgcccttcggccgcgagctgtggatcgagcgcgaggacttcatggaagagccggtgaagggcttccaccgcctctaccccggcaacaccgtgcgcctgcgctacggctacgtggtgaagtgcaccggctgcgagaaggacgccgacggcaacgtgaccgccgtgctcgccgaatacatggcggactccaagtccggcacgcccggcgccgacaactacaaggtcaagggcaacctgcactgggtgtcggccgcccacggctacgccgccgagatccgcctctacgaccgcctgttcgcccatccgcaccccggccagcgccgcgagggcgatcccgaaggctacgagcgcagcttcctcgaagacatcaacccggactccaagcgcgtcatccgcgcctggctggaacccgcgctgcgcgccgccaagccggaagaacgcttccagttcgaacgccacggctacttcgtcgccgaccgccgcgactcggtggacggcgcgccggtgttcaaccgcacggtgacgctgaaggattcgtgggccaagggcggaaagtga

SEQ ID NO: 67841 - protein, 577 aa, Azoarcus sp. BH72
MNPNDNKDGAPAAPSNFIRNQIDEDNRSGKWSGRVETRFPPEPNGYLHYGHAKSICLNFGLAESYGGACHLRFDDTNPEKEEQEYVDSIIEAVQWLGFDWREHLYFASDYFDIMYACAESLIKAGKAYVDSLSAEEMRALRGTLTEPGKDSPFRTRSIDENLDLFRRMRAGEFAEGTHVLRARIDMASPNINLRDPAIYRIRRATHHRTGDNWCIYPMYTFAHPIEDAIENITHSICTLEFEDQRPFYDWLLDALASAGHFPRPLPQQIEFARLNLTYVVLSKRKLIQLVDEGHVDGWDDPRLPTLVGARRRGFTAEGFRLFAERIGVTKSDSWIDMSTLEECMREHLNEAAERRVAVLDPLKLVITNYAEGASEQCHAPNHPLKPELGKRDMPFGRELWIEREDFMEEPVKGFHRLYPGNTVRLRYGYVVKCTGCEKDADGNVTAVLAEYMADSKSGTPGADNYKVKGNLHWVSAAHGYAAEIRLYDRLFAHPHPGQRREGDPEGYERSFLEDINPDSKRVIRAWLEPALRAAKPEERFQFERHGYFVADRRDSVDGAPVFNRTVTLKDSWAKGGK

SEQ ID NO: 67842 - DNA, 1722 bp, Neisseria meningitidis FAM18
  CDS (1)..(1722): transl_table=11
atgccgtctgaagccatctgttcaaagaaaactatgctcaataaagaccaatttgcggacaaccattttatccgcaccttcatcgaagaagacctcaaaagcggcaaacacgaaaccatccaaacccgttttccgccggagcccaacggctacctgcacatcggacacgccaaatccatctgcctgaacttcggtttggcgtatatttacgacggcttgtgcaacctgcgttttgacgataccaaccccgaaaaagaaaacgacgaatacgtcaacgccatcaaagaagacgttgagtggctcggtttccattgggcgggcgagccgcgtttcgcttccaactatttcgaccagctttatgactacgccgtcggtttggttaaagacggcaaagcgtatgtcgatgatttgacgccagaagaaatgcgcgaataccgcggtacgctgaccgaagcaggcaaaaacagcccttatcgcgaccgcagtatcgaagaaaacctcgacctgttcacgcgcatgaaaaacggtgagttccccgacggcagcaaaaccctgcgcctgaaaatcgacatggcatccggcaacatcaatatgcgcgatccggtcatctaccgcatccgccgcgcccatcaccacaacaccggcgacaaatggtgcatctatccgatgtacgactacacgcattgtatttccgatgccatcgaaggcatcacgcattccttgtgtacgctcgaatttgaagcccatcgtccgctgtatgactgggtgttggacaacatccccgcgccgcacgccacacgtccgcgccaatacgagttttcacgcttggagcttttgtacaccattacctccaaacggaaattgaatcagttggttgtggaaaaacacgtttccggctgggacgatccgcgtatgccgaccatttccggtatgcgccgacgcggctacacgcccgaagggctgcgcctgtttgccaaacgcgccggtatttccaaatctgaaaacatcgtcgatatgagcgtgttggaaggcgcgattcgcgaagagttggaaaattccgccccacgcctgatggcggtgttgaacccgctcaaagtgaccctgaccaactttgaaaccggcagaacccaaagccgccgtgccgcgttccatccgaaccacgaggaaatgggcgagcgcgaagtacctatttcacaaaccatctatattgaagccgacgactttgccgaaaatccgcccaaaggcttcaaacgcctgattcccggcggcgaagtacgcttgcgccacggctatgtcatcaagtgcgatgaagtcgtcaaagacgaagcaggcaatgtggttgaactcaaatgcagcatcgaccacgacaccttgggcaaaaatccagaaggccgtaaagttaaaggcgtgattcattgggtttccgccgaacacgccgccgaaatcaaagtccgtctgtacgaccgcctctttaccgtcgagcgtcccgatgccgtgcgcggcgaagacggcgaatacctgccgttcaccgatttcctcaatccggaatccgtcaaggaaatcaccgcctacgccgaacctgccgccaaagatttgccggcagaaagccgttggcagttcgagcgtatcggctacttcgtaaccgaccgtaaagaccacggcaaagacacgccggtgtttaaccgcacggtcacgctgaaagattcttggcagcctaagtaa

SEQ ID NO: 67843 - protein, 573 aa, Neisseria meningitidis FAM18
MPSEAICSKKTMLNKDQFADNHFIRTFIEEDLKSGKHETIQTRFPPEPNGYLHIGHAKSICLNFGLAYIYDGLCNLRFDDTNPEKENDEYVNAIKEDVEWLGFHWAGEPRFASNYFDQLYDYAVGLVKDGKAYVDDLTPEEMREYRGTLTEAGKNSPYRDRSIEENLDLFTRMKNGEFPDGSKTLRLKIDMASGNINMRDPVIYRIRRAHHHNTGDKWCIYPMYDYTHCISDAIEGITHSLCTLEFEAHRPLYDWVLDNIPAPHATRPRQYEFSRLELLYTITSKRKLNQLVVEKHVSGWDDPRMPTISGMRRRGYTPEGLRLFAKRAGISKSENIVDMSVLEGAIREELENSAPRLMAVLNPLKVTLTNFETGRTQSRRAAFHPNHEEMGEREVPISQTIYIEADDFAENPPKGFKRLIPGGEVRLRHGYVIKCDEVVKDEAGNVVELKCSIDHDTLGKNPEGRKVKGVIHWVSAEHAAEIKVRLYDRLFTVERPDAVRGEDGEYLPFTDFLNPESVKEITAYAEPAAKDLPAESRWQFERIGYFVTDRKDHGKDTPVFNRTVTLKDSWQPK

SEQ ID NO: 67844 - DNA, 1668 bp, Haemophilus somnus 2336
  CDS (1)..(1668): transl_table=11
atgagcgaaataacagttgaaatggaaaatacggaacataaaccaacaaattttattcgccaaattattgatgaagatttagctagtggaaaacatcataatgtttatactcgttttccacctgagccgaacggctatttacatattggccatgctaagtcgatttgtttaaatttcggtattgcacaagattatcagggtaaatgtaatttacgttttgacgataccaatccggtaaaagaagatgtggaatacgttgacagtattaagcaagatgtaaaatggttaggttttgaatgggagggggagcctcgctatgcttccgactatttcgatcaactgtatagttatgcaattgaattaattaaaaaagggttggcttatgttgatgaactttcccccgagcaaattcgtgagtatagaggaacacttacatcagcaggtaaaaacagtccttatcgtgatcgcagcatagaagaaaacttggcgttatttgaaaaaatgaaaaaaggcgagtttgcagaaggcgcggcaagtttaagagcgaaaattgatatggcatctccttttatggttatgcgtgatcctgtgttatatcgcatcaaatttgcaagtcatcatcaaacaggcgataaatggtgcatttacccgatgtacgattttacccattgcatttccgatgccattgaaagaattactcattcattatgtacgctagaatttcaagataaccgccgtctatatgattgggtattggataatatttcgattgagcgtccattaccgcatcaatatgaattttcacgtttgaatttagaatacacattgacatctaaacgtaagctactgaaattggttaatgatgggattgttgacggttggaatgatccgcgtatgcctactatttccggtttacgtcgtcgaggttatacccctgcatcattgcgtgagttttgtcgtcgtataggggtaactaaacaggataacgtggtggaatacagtgcattagaaagctgtattcgtgatgatttaaacacaaacgcacctcgtgcaatggcagtgttaaacccactaaaaattgtgattgaaaattttgatgggaaagaaatacttaccgcacctaatcacccaaatcgtgaagaattgggaacgagggaactcccttttaccaaagaaatttatattgatcaggctgatttccgtgaagaagcgaataaacaatataagcgtctggtgttgggtaaagaagtgcggttgcgtaatgcttatgtgattaaagcggaacgtgttgaaaaagatgcggaaggttgtgtaaccacagtatattgtacttatgatcccgaaacattaggtaaaaatcctgagggacgcaaagtaaaaggtgttattcaatgggtgtcagcaacggataatttatcggcagaatttcgtttgtatgacaaattgtttactgtagcgaatccgggagcagtggaagacattaatgaagtgttaaatccaaattccttaatcattaagcatggagtagttgaacaaagccttgctagtgccaaagctgaacaagcgtatcaatttgaacgggaagggtattattgtgccgatagcaaagacagtaatgcagataacttagtttttaatctaactgtcagtctgaaagaagggttttaa

SEQ ID NO: 67845 - protein, 555 aa, Haemophilus somnus 2336
MSEITVEMENTEHKPTNFIRQIIDEDLASGKHHNVYTRFPPEPNGYLHIGHAKSICLNFGIAQDYQGKCNLRFDDTNPVKEDVEYVDSIKQDVKWLGFEWEGEPRYASDYFDQLYSYAIELIKKGLAYVDELSPEQIREYRGTLTSAGKNSPYRDRSIEENLALFEKMKKGEFAEGAASLRAKIDMASPFMVMRDPVLYRIKFASHHQTGDKWCIYPMYDFTHCISDAIERITHSLCTLEFQDNRRLYDWVLDNISIERPLPHQYEFSRLNLEYTLTSKRKLLKLVNDGIVDGWNDPRMPTISGLRRRGYTPASLREFCRRIGVTKQDNVVEYSALESCIRDDLNTNAPRAMAVLNPLKIVIENFDGKEILTAPNHPNREELGTRELPFTKEIYIDQADFREEANKQYKRLVLGKEVRLRNAYVIKAERVEKDAEGCVTTVYCTYDPETLGKNPEGRKVKGVIQWVSATDNLSAEFRLYDKLFTVANPGAVEDINEVLNPNSLIIKHGVVEQSLASAKAEQAYQFEREGYYCADSKDSNADNLVFNLTVSLKEGF

SEQ ID NO: 67846 - DNA, 1674 bp, Haemophilus influenzae R2846
  CDS (1)..(1674): transl_table=11
atgatgagctatacagagacatctttgggtgcagaaaatacccgcactcacaattttattacccaaattattgatgaagatttagcttcgggtaaacataaaagcgttcatacccgttttccgccagagccgaatggctatttgcatattggtcacgcaaagtctatttgcttgaattttggcttggcaaaagaataccaaggtttatgtaacctacgttttgacgataccaatccagtaaaagaagacgtggaatatgtagattctatcaaagcggatgtggaatggttaggttttaaatgggagggcgaaccgcgttatgcatctgattattttgatgcgctttatggctatgcgattgaattgattaaaaaaggcttggcttatgtggatgagctttctccagaagaaatgcgtgaatatcgtggtaccttaaccgagccgggtaaaaacagcccatatcgtgaccgcactattgaagaaaacttagcgttatttgaaaaaatgaagaacggtgagtttgcagaggggaaagcaagtttacgtgcaaaaattgatatggcatcgccatttatggtcatgcgtgatccagtaatttatcgtattaaatttgcaagccatcaccaaacaggtgacaaatggtgcatttacccaatgtacgatttcactcactgtatctctgatgccattgagcgtattacacactcaatctgtacattagaattccaagataaccgtcgtttatatgactgggtattggaaaatatcagtattgagcgtccattaccgcatcaatatgaattctcacgtttaaatttagaaggcactttaacctctaaacgtaaattattgaaattggtaaatgatgaaatcgtggatggttggaacgatccacgtatgccaaccatttcaggtttacgccgtcgtggttatacaccagcttcgttacgtgaattttgtcgccgtattggtgtgactaaacaagataacgtggtggaatattctgcacttgaagcctgcattcgtgaggatttaaatgaaaatgcaccacgcgcaatggcagtgattgatcctgttcgtgtggtaattgaaaattttgaaagcgaagcggttttaactgccccaaatcatccaaatcgtcctgaattaggggagcgtcaattgccgtttacgaaagaactttatattgatcgagctgacttccgtgaggaagcgaacaaacaatataaacgtttagtattaggtaaagaagtgcgcttgcgtaacgcttatgtgattaaagctgaacgcgtggaaaaaaatgaaagtggcgaaatcaccacgattttctgtacttacgatcctgaaactttaggtaaaaatccatcagatggacgtaaagtgaaaggtgtcattcattgggtttctgcggttaataatcatccagctgaattccgtttgtatgatcgcttatttactgtgccaaatccaggggctgaagatgatatcgaaagcgtgttaaacccaaattctttagtgataaaacaaggttttgtagagcaaagcctcgcaaatgcagaagcagagaaaggttaccaatttgaacgtgagggttatttctgtgcagatagtaaagatagccgacctgaacatttggtatttaacttaacagtaagcttaaaagaaggcttctaa

SEQ ID NO: 67847 - protein, 557 aa, Haemophilus influenzae R2846
MMSYTETSLGAENTRTHNFITQIIDEDLASGKHKSVHTRFPPEPNGYLHIGHAKSICLNFGLAKEYQGLCNLRFDDTNPVKEDVEYVDSIKADVEWLGFKWEGEPRYASDYFDALYGYAIELIKKGLAYVDELSPEEMREYRGTLTEPGKNSPYRDRTIEENLALFEKMKNGEFAEGKASLRAKIDMASPFMVMRDPVIYRIKFASHHQTGDKWCIYPMYDFTHCISDAIERITHSICTLEFQDNRRLYDWVLENISIERPLPHQYEFSRLNLEGTLTSKRKLLKLVNDEIVDGWNDPRMPTISGLRRRGYTPASLREFCRRIGVTKQDNVVEYSALEACIREDLNENAPRAMAVIDPVRVVIENFESEAVLTAPNHPNRPELGERQLPFTKELYIDRADFREEANKQYKRLVLGKEVRLRNAYVIKAERVEKNESGEITTIFCTYDPETLGKNPSDGRKVKGVIHWVSAVNNHPAEFRLYDRLFTVPNPGAEDDIESVLNPNSLVIKQGFVEQSLANAEAEKGYQFEREGYFCADSKDSRPEHLVFNLTVSLKEGF

SEQ ID NO: 67848 - DNA, 1674 bp, Haemophilus influenzae R2866
  CDS (1)..(1674): transl_table=11
atgatgagccatacagagatatctttgggtgcagaaaatactcgcactcacaattttattacccaaattattgatgaagatttagcttcgggtaaacataaaagcgttcatacccgttttccgccagagccgaatggctatttgcatattggtcacgcaaagtctatttgcttgaattttggcttggcaaaagaatatcaaggtttatgcaacctacgttttgacgataccaatcctgtaaaagaagatgtggaatatgtagattccatcaaagctgacgtggaatggttaggttttaaatgggagggcgaaccgcgttatgcatctgattacttcgatgtgctttatggctatgcgattgaattgattaaaaaaggcttggcttatgtggatgagctttcgccagatgaaatgcgtgaatatcgtggtaccttaaccgaacctggtaaaaacagcccatatcgtgaccgcactattgaagaaaacttagcgttatttgaaaaaatgaagaacggtgagtttgcagagggtaaagcaagtttacgtgcaaaaattgatatggcttcgccatttatggtcatgcgtgatccagtaatttatcgtattaaattcgctagccatcaccaaacaggtgacaaatggtgtatttacccaatgtacgatttcacgcactgtatctctgatgcaatcgaacgtatcactcattcaatctgtacattagaattccaagataaccgtcgtttatatgactgggtattggaaaatatcagtattgaacgtccattaccgcatcaatatgaattttcacgtttaaatttagaaggcactttaacctctaaacgtaaattattgaaattggtaaatgatgaaatcgtggatggttggaacgatcctcgtatgccaaccatttcaggtttacgccgtcgtggttatacaccagcttcgttacgtgaattttgtcgccgtattggtgtgactaaacaagataacgtggtggaatattctgcacttgaagcctgcattcgtgaggatttaaatgaaaatgcaccacgcgcaatggcagtgattgatcctgttcgtgtggtaattgaaaattttgaaagcgaagcggttttaactgccccaaatcatccaaatcgtcctgaattaggggaacgtcaattgccgttcacgaaagaactttatattgatcgcgcagacttccgtgaagaagcgaacaaacaatataaacgtttagtattaggtaaagaagtgcgtttgcgtaacgcttatgtgattaaagctgaacgtgtagaaaaagatgcaagtggcgaaatcaccacgattttctgtacttacgatcctgaaactttaggtaaaaatccagcagatggacgtaaagtgaaaggtgtcattcattgggtttctgcggttaataatcatccagctgaattccgtttgtatgatcgcttatttactgtgccaaatccaggggctgaagatgatatcgaaagcgtgttaaacccaaattctttagtgataaaacaaggttttgtagagcaaagcctcgcaaatgcagaagcagagaaaggttaccaatttgaacgtgagggttatttttgtgcagatagtaaagatagccgccctgaacatttggtgtttaatttaacggtaagtctaaaagagggcttctaa

SEQ ID NO: 67849 - protein, 557 aa, Haemophilus influenzae R2866
MMSHTEISLGAENTRTHNFITQIIDEDLASGKHKSVHTRFPPEPNGYLHIGHAKSICLNFGLAKEYQGLCNLRFDDTNPVKEDVEYVDSIKADVEWLGFKWEGEPRYASDYFDVLYGYAIELIKKGLAYVDELSPDEMREYRGTLTEPGKNSPYRDRTIEENLALFEKMKNGEFAEGKASLRAKIDMASPFMVMRDPVIYRIKFASHHQTGDKWCIYPMYDFTHCISDAIERITHSICTLEFQDNRRLYDWVLENISIERPLPHQYEFSRLNLEGTLTSKRKLLKLVNDEIVDGWNDPRMPTISGLRRRGYTPASLREFCRRIGVTKQDNVVEYSALEACIREDLNENAPRAMAVIDPVRVVIENFESEAVLTAPNHPNRPELGERQLPFTKELYIDRADFREEANKQYKRLVLGKEVRLRNAYVIKAERVEKDASGEITTIFCTYDPETLGKNPADGRKVKGVIHWVSAVNNHPAEFRLYDRLFTVPNPGAEDDIESVLNPNSLVIKQGFVEQSLANAEAEKGYQFEREGYFCADSKDSRPEHLVFNLTVSLKEGF

SEQ ID NO: 67850 - DNA, 1743 bp, Xylella fastidiosa Dixon
  CDS (1)..(1743): transl_table=11
atgtccgagatcaccaccaccgacgcccaagcccaacctgagaagaaagactttatccggcagatcatcagagaagacttagcccacggcacacacactcacatccacacccgtttccccccagaacccaacgggtacctgcacattggccacgccaaagcaatctgcctggattttggcgtcgccgcggaattcggcggacactgcaccctccgcatggacgacaccaatccgagcaaagaagaccccgccttcgccgctgcaatccaggaagacgtctcttggctaggcttccattggaacgcactacgacatacatcggattatttcgaagtgctgtacctagccgcagaaaaactcattgccgatgggaaagcctacgtctgtgacctcaatagcgaacaggtacgcgaataccgcggcaccctgacagaagcgggccgtccctcaccatggcgtgaacgcagccctgatgaaaatttagaactattccgacaaatgcgcgccggcacgtttccagacggaacacgtaccctgcgtgccaaaatcgacatggctagcggcaacatcaacctgcgggacccagcgctctaccgcattaaacacgtcgaacatcaaaacaccggcaacacctggccgatctaccccatgtatgacttcgcacacgcactgagcgatgcgatcgaaggcattacccattcattgtgcaccctcgagttcgaagaccaccgccccctgtacgactggtgtatcaaccatgtcgacctaccaaacaactcacacctactcaaaccgttactggacaaaggcttccctcaagagcccagccaacctcggcaaatcgagttttcgcgcctgaacatcaactacaccgtgatgagcaaacgcaagctcaccgcactggtagacgaaaaactcgtcgaagggtgggacgacccccgcatgtacaccctgcaaggcctacgccgccgtggttacaccccagcggcgatgcgcctattcgtagagcggatcggcatcagcaaacagaactcaatcattgatttttcagtactagaaaactgcttacgcgagaacctggacaccattgcaccacgccggatggcaaccattgcaccaatgaagctcgtgctgaccaacctacccgaagaccatgaagaacaactgatcttccccaaccatcccaaagacgacacacaaggcacccgaacagtgccgttctcacgcgaactatggatcgaacgcgatgatttttccgaagtcccccccaagggctggaaacggctggttccaggcggagaagtacgcctacgcggtgccggcatcgcacgtatagatgaggtggtgaaaaacgcagaaggccacatcatcgcactacacggctggcttgatccgacctcacgtcccggcatggaaggcgctcaccgcaaagtcaaaggcaccatccactgggtcagcgcaccacacgctgtagcagcggaaatccgcctgtacgaccggctgttctccattgaaaaacccgacgacaacaccgacggaaaaacctaccgcgacttcctcaacccagactccaaacgcgtcgtgcatggctacatcgaaccagcggcagcacaaaccgcaccagaacacgcattccaatttgaacgcttgggctacttcgtcacagaccggcatgaccacgatgccacacaccccgtctttaatcgcagcgtcacgctgcgcgacacctggcagcgcgactga

SEQ ID NO: 67851 - protein, 580 aa, Xylella fastidiosa Dixon
MSEITTTDAQAQPEKKDFIRQIIREDLAHGTHTHIHTRFPPEPNGYLHIGHAKAICLDFGVAAEFGGHCTLRMDDTNPSKEDPAFAAAIQEDVSWLGFHWNALRHTSDYFEVLYLAAEKLIADGKAYVCDLNSEQVREYRGTLTEAGRPSPWRERSPDENLELFRQMRAGTFPDGTRTLRAKIDMASGNINLRDPALYRIKHVEHQNTGNTWPIYPMYDFAHALSDAIEGITHSLCTLEFEDHRPLYDWCINHVDLPNNSHLLKPLLDKGFPQEPSQPRQIEFSRLNINYTVMSKRKLTALVDEKLVEGWDDPRMYTLQGLRRRGYTPAAMRLFVERIGISKQNSIIDFSVLENCLRENLDTIAPRRMATIAPMKLVLTNLPEDHEEQLIFPNHPKDDTQGTRTVPFSRELWIERDDFSEVPPKGWKRLVPGGEVRLRGAGIARIDEVVKNAEGHIIALHGWLDPTSRPGMEGAHRKVKGTIHWVSAPHAVAAEIRLYDRLFSIEKPDDNTDGKTYRDFLNPDSKRVVHGYIEPAAAQTAPEHAFQFERLGYFVTDRHDHDATHPVFNRSVTLRDTWQRD

SEQ ID NO: 67852 - DNA, 1743 bp, Xylella fastidiosa Ann-1
  CDS (1)..(1743): transl_table=11
atgtccgagatcaccaccaccgacgcccaagcccaacctgagaagaaagactttatccggcagatcatcagagaagacttagcccacggcacacacactcacatccacacccgttttcccccagaacccaacggttacctgcacattggccacgccaaagcaatctgcctggattttggcgtcgccgcggaattcggcggacactgcaccctccgcatggacgacaccaatccgagcaaagaagaccccgccttcgccgctgcaatccaggaagacgtctcttggttaggcttccattggaacgcactacgacatacatcggattatttcgaagtactgtacctagctgcagaaaaactcattgccgatggaaaagcctacgtctgtgacctcaatagccaacaggtacgcgaataccgcggcaccctgacagaagcgggccgtccctcaccatggcgtgaacgcagccctgatgaaaatttagaactattccgacaaatgcgcgccggcacgtttccagacggaacacgtaccctgcgtgccaaaatcgacatggctagcggcaacatcaacctgcgggacccagcgctctaccgcattaaacacgtcgaacatcaaaacaccggcaacacctggccgatctaccccatgtatgacttcgcacacgcactgagcgatgcgatcgaaggcattacccattcattgtgcaccctcgagttcgaagaccaccgccccctgtacgactggtgtatcaaccatgtcgacctaccaaacaactcacacctactcaaaccgttactggacaaaggcttccctcaagagcccagccaacctcggcaaatcgagttttcgcgcctgaacatcaactacaccgtgatgagcaaacgcaagctcaccgcactggtggacgaaaaactcgtcgaagggtgggacgacccccgcatgtacaccctgcaaggcctacgccgccgtggttacaccccagcagcgatgcgcctattcgtagagcggatcggcatcagcaaacagaactcaatcattgatttttcagtactagaaaactgcttacgcgagaacctggacaccattgcaccacgccgaatggcaaccattgcaccactgaagctcgtgctgaccaacctacccgaagaccatgaagaacaactgatcttccccaaccatcccaaagacgacacacaaggcacccgaacagtgccgttctcacgcgaactatggatcgaacgcgatgatttttccgaagtcccccccaagggctggaaacggctggttccaggcggagaagtacgcctacgcggtgccggcatcgtacgtatagatgaggtggtgaaaaacgcagaaggccacgtcatcgcactacacggctggcttgatccgacctcacgtcccggcatggaaggcgctcaccgcaaagtcaaaggcaccatccactgggtcagcgcaccacacgctgtagcagcggaaatccgcctgtacgaccggctgttctccattgaaaaacccgacgacaacaccgacgggaaaacctaccgcgacttcctcaacccagactccaaacgcgtcgtgcatggctacatcgaaccagcggcggcacaaaccgcaccagaacacgcattccaatttgaacgcttgggctacttcgtcacagaccggcatgaccacgatgccacacaccccgtctttaatcgcagcgtcacgctgcgcgacacctggcagcgcgactga

SEQ ID NO: 67853 - protein, 580 aa, Xylella fastidiosa Ann-1
MSEITTTDAQAQPEKKDFIRQIIREDLAHGTHTHIHTRFPPEPNGYLHIGHAKAICLDFGVAAEFGGHCTLRMDDTNPSKEDPAFAAAIQEDVSWLGFHWNALRHTSDYFEVLYLAAEKLIADGKAYVCDLNSQQVREYRGTLTEAGRPSPWRERSPDENLELFRQMRAGTFPDGTRTLRAKIDMASGNINLRDPALYRIKHVEHQNTGNTWPIYPMYDFAHALSDAIEGITHSLCTLEFEDHRPLYDWCINHVDLPNNSHLLKPLLDKGFPQEPSQPRQIEFSRLNINYTVMSKRKLTALVDEKLVEGWDDPRMYTLQGLRRRGYTPAAMRLFVERIGISKQNSIIDFSVLENCLRENLDTIAPRRMATIAPLKLVLTNLPEDHEEQLIFPNHPKDDTQGTRTVPFSRELWIERDDFSEVPPKGWKRLVPGGEVRLRGAGIVRIDEVVKNAEGHVIALHGWLDPTSRPGMEGAHRKVKGTIHWVSAPHAVAAEIRLYDRLFSIEKPDDNTDGKTYRDFLNPDSKRVVHGYIEPAAAQTAPEHAFQFERLGYFVTDRHDHDATHPVFNRSVTLRDTWQRD

SEQ ID NO: 67854 - DNA, 1668 bp, Croceibacter atlanticus HTCC2559
  CDS (1)..(1668): transl_table=11
atgtctgaagaaaaatcgctcaatttcatagagcatatcatagaggaagatttacaaaatgggtattctaaggaagatctaagatttagatttccaccagaaccaaacggctatttacacattggccactgtaaggctatttgcttaaactttggtttaggtgagcgttacaatgctccagtgaatttaaggtttgatgatactaacccaatgaaagaagaacaagaatatgtagatgctatcaagcaagacatagagtggcttgggtttacttgggataaagaatgttattcttcagattactttcaacaactttatgattgggctgtacaacttattaaggaaggaaaagcttacgtagattctcaatctagtgaagctatggcagaacaaaaaggtactcctacgcaagtgggaaaacctggaccttatagagacagatctgttgaagaaaacttagatctatttgaaaagatgaagaatggtgagtttgaaaacggccaacacgtcttacgagcaaaaatagatatggaaagcccaaacatgcttctgcgtgatcctataatgtatcgtgttttaaatagagcacaccataggacaggaaatgattggcacatatacccaatgtacgattgggctcatggcgaaagtgattatatagaaagtgtttcccatagtctttgttcattagagtttaaaccacacagaccgctttatgaatggtttgtagataatatttatactagtaatacaaaacctaaacaaagagagtttgcgcgtcttaatttaagttataccataatgagtaagcgtaaattactcacattagttgaagataacgtagtttctggttgggatgatccaagaatgccaacaatatcagggtatagaagacgtggttatacaccagaatctattaagaattttatagataccgttggagtagctaaacgcgaaaatgtgattgatgtttctttattagaatttaagattagagaagatcttaacaagaaagcagatcgtgtaatgggtgttttagacccattaaaacttgtaattacaaattatccagaaggagaagaagaatggttaatggcagaaaataatccagaagacgtttctgcaggtgagcacgaagttccattttcaagagagttatatattgaaaaagatgactttaaagaagaagcaaaccgtaaattcttcagattaaaattaggtggagaagttagattaaagaacggttacattattaaagcagaagaagctattaaagatgccgatggtaatattactgaagttcattgtacatatgatcctaagagtaaaagcggtagcggtacagaagaatctttaagaaaagtaaaaggtaccctacattgggtttcaattaagcatgccgttaaagcagaagttaggttatacgacaggttgtttaatgatgaatctccagatggacataaggacaaagattttatggaatttttaaatccagattcgttaaagaccattactggttatgttgagcctcatttaaaaacacttaaaccattagatacagtacaatttcaacgtataggatacttctgtgttgataaagatacgacagacaccaatttagtatttaatagaactgtaacgcttagagactcttggaaaggtaaataa

SEQ ID NO: 67855 - protein, 555 aa, Croceibacter atlanticus HTCC2559
MSEEKSLNFIEHIIEEDLQNGYSKEDLRFRFPPEPNGYLHIGHCKAICLNFGLGERYNAPVNLRFDDTNPMKEEQEYVDAIKQDIEWLGFTWDKECYSSDYFQQLYDWAVQLIKEGKAYVDSQSSEAMAEQKGTPTQVGKPGPYRDRSVEENLDLFEKMKNGEFENGQHVLRAKIDMESPNMLLRDPIMYRVLNRAHHRTGNDWHIYPMYDWAHGESDYIESVSHSLCSLEFKPHRPLYEWFVDNIYTSNTKPKQREFARLNLSYTIMSKRKLLTLVEDNVVSGWDDPRMPTISGYRRRGYTPESIKNFIDTVGVAKRENVIDVSLLEFKIREDLNKKADRVMGVLDPLKLVITNYPEGEEEWLMAENNPEDVSAGEHEVPFSRELYIEKDDFKEEANRKFFRLKLGGEVRLKNGYIIKAEEAIKDADGNITEVHCTYDPKSKSGSGTEESLRKVKGTLHWVSIKHAVKAEVRLYDRLFNDESPDGHKDKDFMEFLNPDSLKTITGYVEPHLKTLKPLDTVQFQRIGYFCVDKDTTDTNLVFNRTVTLRDSWKGK

SEQ ID NO: 67856 - DNA, 1656 bp, Pseudoalteromonas tunicata D2
  CDS (1)..(1656): transl_table=11
atggcggaaattgaacatcgcccaagcaactttattcgtactattatcgataaagatctcgcatcaggaaaacacactagcacatatactcgttttccacctgaaccaaatggctaccttcatattggtcatgcaaaatcaatttgtttaaactttggtattgcacaagattaccagggtaaatgtaatttacgttttgatgatactaacccagaaaaagaagatatcgactttgtaaattcaattcaagaagatgtaaagtggttaggttttcagtgggatggcgacattcagtattcatcaaactacttcgacaaactgtatggctatgcagttgagttaatcactaaaggccttgcgtatgtttgttttttaacaccagagcaggcacgagagtatcgcggtacgttaaccgagccgggtaaaaacagtccttatcgtgatacaagtgttgaagaaaacttagctttatttgcaaaaatgaaagaaggcggttttaaagagggtgagtgtgttttacgtgccaaaattgatatggccagctcattcatggtattgcgtgacccaattatttatcgtattcgttttgctcaccatcaccaaaccggtgataaatggtgtatttacccaatgtacgatttcacgcattgtatttctgatgcgcttgaagggatcactcattcactgtgtacattagaattccaggataaccgtcgtttatatgattgggtacttgataatatttctatcgattgtcacccacagcaaattgagttttctcgtttaaatcttgaatatactttgatgtcaaaacgtaaactacaaagtttagttgaagataagcatgttgatggttgggacgacccgcgtatgccaaccattgctggtcttcgtcgtcgtggttatccagcttcttcattacgtgaatttagtaaacgtattggtattactaagcaagaaaacatggtcgaaatgggcatgttagaagcgtgtgttcgtgaagatttaaatgaatctgctggtcgtgcgatggctgttcttaatccagtgaaagttgtgattgagaattaccctgctgatcaagtcgaaatgctgacagcagcgaatcatccaaataaagaagagatgggtcatcgtgaactaccgtttactcaaacgctttttattgaagctgatgattttaaagttgaagctaataaacaatttaaacgtttagtcttgggtaaagaagttcgtttacgtaatgcttatgtaataaaagcagagcgaatcgaacaagatgagcagggaaatattacaacaattttctgtagttacgatcctgagactttaggtaaaaatccagctgatggccgtaaggttaaaggcgtgatccattgggtgtctgcaagtcatggtataaacgcagaagttcgattatatgatcgcttgtttaacgtgccaaacccagcaactgctgaagattatgcgacagttattaatcctagctctttagtaattgtgaaaaatgcagtacttgagccttctttagcactggcagctaaagagcaatcgtatcaatttgaacgtacaggttatttctgtcgtgataataaatctgatgagttggttttcaaccaaacagttggattacgtgatacgtgggaaaataattga

SEQ ID NO: 67857 - protein, 551 aa, Pseudoalteromonas tunicata D2
MAEIEHRPSNFIRTIIDKDLASGKHTSTYTRFPPEPNGYLHIGHAKSICLNFGIAQDYQGKCNLRFDDTNPEKEDIDFVNSIQEDVKWLGFQWDGDIQYSSNYFDKLYGYAVELITKGLAYVCFLTPEQAREYRGTLTEPGKNSPYRDTSVEENLALFAKMKEGGFKEGECVLRAKIDMASSFMVLRDPIIYRIRFAHHHQTGDKWCIYPMYDFTHCISDALEGITHSLCTLEFQDNRRLYDWVLDNISIDCHPQQIEFSRLNLEYTLMSKRKLQSLVEDKHVDGWDDPRMPTIAGLRRRGYPASSLREFSKRIGITKQENMVEMGMLEACVREDLNESAGRAMAVLNPVKVVIENYPADQVEMLTAANHPNKEEMGHRELPFTQTLFIEADDFKVEANKQFKRLVLGKEVRLRNAYVIKAERIEQDEQGNITTIFCSYDPETLGKNPADGRKVKGVIHWVSASHGINAEVRLYDRLFNVPNPATAEDYATVINPSSLVIVKNAVLEPSLALAAKEQSYQFERTGYFCRDNKSDELVFNQTVGLRDTWENN

SEQ ID NO: 67858 - DNA, 1668 bp, Oceanospirillum sp. MED92
  CDS (1)..(1668): transl_table=11
atgagtaatacagaaaacactaagccaactaactttattcatcaggtgatagagcaggacctggagcaggggacaaacggtggtaaagtcgttacccgttttccgccggagccaaacggttatctgcatatcgggcatgctaaatctatctgcctgaactttggtaccgctgaaaaatacaatggcgaatgtaacctgcgttttgacgataccaacccgactaaagaagatcaggaatacgttgacgcgatcaagagtgatgttgaatggcttggctttaaatgggccggcgaagttcgctatgcgtctaattactttgatcagttctacgagtgggctcagcacttggtgcgtgaaggtaaagcctatgtgtgtgatctgagcccggaagaagcgaaagagtatcgtggctgggcaactgagccaggtaaagacagcccttaccgtgatcgtaccccagaagaaaatctggatctgcttgagcgcatgcgcaagggagagtttgatgaaggcagctgtgtgctgcgtgccaaaattgatatggcttcatcaaatatgaacctgcgcgacccgattctctaccgtattcgtaaagagtcccatcaccagacaggtgataagtggtgcatctatccgagttacgattttgcgcatggtcaggaagatgcaattgagggtgttacccactctatttgtacacttgagtttgctgatcatcgtccgttgtacgagtggtttatcgagaacctgccagtaccttctcagccacgtcagtacgaatttggccgattgaacctgaactacaccgtaaccagtaaacgtaagctgaaacagctggttgatgaaggccatgtaagcggctggaacgacccgcgtatgccaacgatctctggtttgcgtcgtcgtggctattctcctcaggcgattcgcaatttctgcgatagtctggcggtagcaaaaactgacggtacggttgatatggctcagttcgagtactttgtccgcgaagatctggataaaaatgcgccgcgtgccatgtgtgttgtccgtcctcttaaagtgactgtcacgaattaccctgaagatcaggaagagtggtttgaactaccgaatcaccctaaagatgaaagcatggggatgcgtaaagtaccgttcagccgtaacctgattattgaacaggaagattttgctgaagtacctccacgcaagtggaagcgtttgacgcagggtgtagctgttcgcctgcgtggttcatatgtgatcacgtgtgaagaagttattaaagacgctgaaggcaacgtaatcgagctgaagtgtacttatgatcctgcaacgaaaggtgctaaccctgaaggttataaagctaaaggtgtcgtgcactggttatctgctgataactcagttccatgtgaagttcgcgaatatgatcgtctgttcgcagaagagaatcctgacggtgacaaagagcgcgatttccttgagttcatcaatccagaatcgcttgtgcttgttgaaggcagccgttgtgaagtcggcctggcaaatgctgctgttgaaagccgtttccagtttgagcgtactggctacttctgtgtggattctgaatccagcgaagataagctggtattcaaccgtacagtcggccttcgcgattcctggggtaagtag

SEQ ID NO: 67859 - protein, 555 aa, Oceanospirillum sp. MED92
MSNTENTKPTNFIHQVIEQDLEQGTNGGKVVTRFPPEPNGYLHIGHAKSICLNFGTAEKYNGECNLRFDDTNPTKEDQEYVDAIKSDVEWLGFKWAGEVRYASNYFDQFYEWAQHLVREGKAYVCDLSPEEAKEYRGWATEPGKDSPYRDRTPEENLDLLERMRKGEFDEGSCVLRAKIDMASSNMNLRDPILYRIRKESHHQTGDKWCIYPSYDFAHGQEDAIEGVTHSICTLEFADHRPLYEWFIENLPVPSQPRQYEFGRLNLNYTVTSKRKLKQLVDEGHVSGWNDPRMPTISGLRRRGYSPQAIRNFCDSLAVAKTDGTVDMAQFEYFVREDLDKNAPRAMCVVRPLKVTVTNYPEDQEEWFELPNHPKDESMGMRKVPFSRNLIIEQEDFAEVPPRKWKRLTQGVAVRLRGSYVITCEEVIKDAEGNVIELKCTYDPATKGANPEGYKAKGVVHWLSADNSVPCEVREYDRLFAEENPDGDKERDFLEFINPESLVLVEGSRCEVGLANAAVESRFQFERTGYFCVDSESSEDKLVFNRTVGLRDSWGK

SEQ ID NO: 67860 - DNA, 1710 bp, Flavobacteria bacterium BBFL7
  CDS (1)..(1710): transl_table=11
ttgtttcatctaaatatattgaaaagagccatgagtgatactactaaaactaataacttcatagaagatattatagaagacgatttaaacaatggtctttctcaagataaattacgtttccgttttccaccagaacctaacgggtttttacacataggtcacgctagtgcaatatgtttaaactttggactaggagagaagtacaaaaggccagtaaatctgcgttttgatgatactaatcctgcaaaagaagaagcaaaatatgtagctgcaatccaaaaagacgtagaatggttaggttataaatgggataatctgtgttatgcatcagactattttcaagagctttatgactgggcagttcaaatgattaaagatgggaaagcatatgtagattcccaatctagtgaagaaatggccgctcaaaaagggacacctactcaacctggagtagatggaccttaccgtaatagaagtgtagaagaaaacctatcactttttgaaggtatgaagaatggagaatatgctgaaggagaacacatcctgcgtgctaaaattgatatgcagtctaataatatgctcatgcgtgatcctatcatgtatcgtgtggttgataaagcacaccatagaaccggtactgattggaaaatctatcctatgtacgattggacacatggagaaagtgattatctagagcaaatctcacactctttctgtacgcttgaatttaagcctcatagagagctttatgactggttccttgatcaggttatagataaagataaaatacgtcctaaacaacgtgaatttgcccgtagaaacgtatcacataccgttaccagtaaacgtaaacttcaaaaactggtagaagctggtgttgttaacggatgggatgatccacgtatgacgaccatatctggtttaagacgtcgtggttacactccagcatcattaaaaaactttgcagagtctataggaatcgcaaaacgtgataatctagtagatatgaatcacctcgagtttcatttaagagatgatttaaataaaactgcagatcgtgtgatgtgcgtattagatccagtaaaactggttattactaattatccagacgatcagatagagatccttcaggcagaaaatagtcaggaagacgagtctcgtggttttagagaagttcctttctcaaaagaactttatatagaacgtgaagattatagagaagaggcaaataagaaattcttccgtcttaaaaatggaaaagaagtacgtcttaaaaacggatatatcattaaaggtgaaggttgccttaaagatgcagatggtaatattacagagattcacgcgacctatgatccagattctaaaagtggaagtggtactgaggccagtatgcgtcgagtaaaaggaacacttcattgggtaagcgcagcacaagctgttcctgttgaggtacgtttatacgatcgtttatttacagtaccatcaccagatacagataaggaaaaagactttatggagtttgttaatcctaattcgctagaagttattactgccatggcagaacctgcaatgaaaaatttaaaagtaggtgacattgtacaatttcaacgtatgggatatttctgtgttgatccagattcttcagatgagaagatggtattcaaccgtacagtaaccttgcgagatacttgggcaaagctagaagactag

SEQ ID NO: 67861 - protein, 569 aa, Flavobacteria bacterium BBFL7
MFHLNILKRAMSDTTKTNNFIEDIIEDDLNNGLSQDKLRFRFPPEPNGFLHIGHASAICLNFGLGEKYKRPVNLRFDDTNPAKEEAKYVAAIQKDVEWLGYKWDNLCYASDYFQELYDWAVQMIKDGKAYVDSQSSEEMAAQKGTPTQPGVDGPYRNRSVEENLSLFEGMKNGEYAEGEHILRAKIDMQSNNMLMRDPIMYRVVDKAHHRTGTDWKIYPMYDWTHGESDYLEQISHSFCTLEFKPHRELYDWFLDQVIDKDKIRPKQREFARRNVSHTVTSKRKLQKLVEAGVVNGWDDPRMTTISGLRRRGYTPASLKNFAESIGIAKRDNLVDMNHLEFHLRDDLNKTADRVMCVLDPVKLVITNYPDDQIEILQAENSQEDESRGFREVPFSKELYIEREDYREEANKKFFRLKNGKEVRLKNGYIIKGEGCLKDADGNITEIHATYDPDSKSGSGTEASMRRVKGTLHWVSAAQAVPVEVRLYDRLFTVPSPDTDKEKDFMEFVNPNSLEVITAMAEPAMKNLKVGDIVQFQRMGYFCVDPDSSDEKMVFNRTVTLRDTWAKLED

SEQ ID NO: 67862 - DNA, 1656 bp, gamma proteobacterium HTCC2207
  CDS (1)..(1656): transl_table=11
atgactgatatcgaaaaacccacaaattttatccagcaaattattactgctgacctcgaagccggccgtgtaaaagaggtggtgacacgctttccgcctgagcccaacggttatctccatataggtcatgccaagtcgatctgtcttaactttggtctcgccgagcagttcggcggcacctgcaatctgcgctttgatgacactaaccctgaaaaagaagatgacgaatatgttcaggcgattattgaagatgttcgttggctgggttttgactggggtggtgaaccgcgctttgcctcggattacttcggtcagctttatagttgggcgcagcagctgattagcgatggcaaagcctatatctgcgagctaaacgccgagcagatgcgcgagtatcgcggcaccttaactgaagtgggcaagaacagtccctaccgtgagcgacctgcggcgaagagtctcgagttacttgagcagatgaaggttggtgccattgacgaaggtgcgatgaccctgcgcgcaaaaatcgatatgagctcgccaaatatcaatatgcgcgacccggtaatctatcgcattaagaagataccccatcatcgcaccggtgatgagtggaatatctatccggcctatgactttgcccacggtcaagaagatgccattgaaggggtgacccattccgtgtgcaccttggagtttgcagctaatcgaccgctctatgagtggtttaccagcaatctaccgctgccctccattccgcgccagtatgagtttggtcgcctgaatctgaattacaccatgaccagcaagcgcaagcttaaacagctggtggatgaaggccatgttgatggctggaatgatccccgtatgccgaccatttcgggtctccgtcgccgtggtgtgactgcggcatcggtgcgtgagttttgcgatagtctggcagtggccaaaacagatggcattgttgacgtcgcccagtttgaacactttattcgcgaagatctgaataacaacgccagtcgcgccatgtgtgtgttgaatccgctgaagattaccctgagcaattatccaaaagaccagcaggaactgttggttgcgcctgggcatcccaatcgtgatgacttgccgtctcgcgaattaccctttactcgtgagctttatatcgatcgcaatgactttaatgaagacaccacactgtcccgcaagaagtttaagcggctggtcatcggtgaatatgttcgtctgcgcagtggctatgtgatccgtgctgacgaggttctcaaggatgcgactggcgagattattgagcttatctgttcgtatattccgggtactgttggtcaggatcccccggagggtgtgcgtccccgtggtgttatccattgggtttcggcgactaactcggttgattgtgatctctattgttatgaaaaattatttactgttgcagcgcctgatgcgggggaggagtcgtttatagatcacctgaaccctgactccctgcagattattaagcagtgtaaagccgagctgggtttggctggagccgaggttggccagcatttccagtttgagcgtgagggctattatgcgattgatgctaagcacagcagcgctggaaaattggtcttcaaccgtaccatcgcactgcgctaa

SEQ ID NO: 67863 - protein, 551 aa, gamma proteobacterium HTCC2207
MTDIEKPTNFIQQIITADLEAGRVKEVVTRFPPEPNGYLHIGHAKSICLNFGLAEQFGGTCNLRFDDTNPEKEDDEYVQAIIEDVRWLGFDWGGEPRFASDYFGQLYSWAQQLISDGKAYICELNAEQMREYRGTLTEVGKNSPYRERPAAKSLELLEQMKVGAIDEGAMTLRAKIDMSSPNINMRDPVIYRIKKIPHHRTGDEWNIYPAYDFAHGQEDAIEGVTHSVCTLEFAANRPLYEWFTSNLPLPSIPRQYEFGRLNLNYTMTSKRKLKQLVDEGHVDGWNDPRMPTISGLRRRGVTAASVREFCDSLAVAKTDGIVDVAQFEHFIREDLNNNASRAMCVLNPLKITLSNYPKDQQELLVAPGHPNRDDLPSRELPFTRELYIDRNDFNEDTTLSRKKFKRLVIGEYVRLRSGYVIRADEVLKDATGEIIELICSYIPGTVGQDPPEGVRPRGVIHWVSATNSVDCDLYCYEKLFTVAAPDAGEESFIDHLNPDSLQIIKQCKAELGLAGAEVGQHFQFEREGYYAIDAKHSSAGKLVFNRTIALR

SEQ ID NO: 67864 - DNA, 1677 bp, delta proteobacterium MLMS-1
  CDS (1)..(1677): transl_table=11
atgagcgcaagcgacacccccggccccagcgactttatccgcgaaatcatcaccgccgatctggccagcggcaagcaccagcaagtggttacccgctttccgccggagcccaacggttatctccatatcggccatgccaagtcgatatgtctcaacttcggcctggcccgggaacacaccccggcccgctgtcatctgcgcttcgacgacaccaatcccagcaaggaagagagcgaatatgtcgaatcgatcaaggaggatgtgcgctggctgggctttgactggggcgaacatccctacttcgcctccgattatttcgaacaactctatgaatacgccgaacacctgatcaaaaattctaaggcctacgtctgtgacctctccgccgaagagatccgggaaagccgcggcaccctcaccgaaccgggccgggacagcccctaccggcagcgcagcgtggccgagaatctcgatctttttcggcggatgcgctccggagagttcgccgacggcgcccgggtcctgcgggccaggatcgatatggcggcgggcaatctcaacctgcgcgatccggtgctctaccgcatcatgcaccagagccaccaccgcagcggcgagcagtggtgtatctatccgatgtacgatttcacccatcccctctccgacgccctggaaggcatcacccattccctctgcaccctggagtttgccgatcaccggccgctctacgactggttcctcgacaacctgccggtgccggcccggccccggcagatcgaattcgcccgcctcaacctggcctacaccgtggtcagcaaaagaaagctgttgcaactggtcaacgacggccatgttgagggctgggacgatccccggatgccgaccctgtgcggcctgcgccgccggggctgcccgccggcggcgatccgcgatttttgcgagcggatcggcgtggccaaaaaagagagcctggtggatctggccctgctggaacattgcgtacgtgaagagttgaacaacagcgccaaccgggtgatgggggtgctcaaaccgttgaaggtggtgatcagcaactaccccgaggaccagttcgaagaggtcacggcccagaatcatccccagcagccggaaaaaggcagtcgccaactgcctttcgggcgggtgatctacattgaacgggatgacttcatggaggagccggtcaagaaatttttccgcctggccccgggccgcgaagtccggctgcgttacgcttatttcatcaggtgcgacgaggtgatcaaggatgccgccggccaggtcacggagttacgctgcacctatgacccggccaccctgggcggctcggcccccgatggccgcaaggtaaagggcaccatccactgggttgcggcagcacaggcgctcaaggcccagatacggctttatgaccggctcttcagcagtgaaactcccgataaggccggcggtgatttcaaggagtgcttaaaccccgaatctttgattaccctggaggattgccgccttgaacccggcctggccacggcccgagccggtgaatatttccagtttgagcgccagggctactttgtgctggatcccaaaatgtcccaaccgggtcggccggtcttcaaccgcagcgccaccttgcgcgacacctgggccaaacagcggtga

SEQ ID NO: 67865 - protein, 558 aa, delta proteobacterium MLMS-1
MSASDTPGPSDFIREIITADLASGKHQQVVTRFPPEPNGYLHIGHAKSICLNFGLAREHTPARCHLRFDDTNPSKEESEYVESIKEDVRWLGFDWGEHPYFASDYFEQLYEYAEHLIKNSKAYVCDLSAEEIRESRGTLTEPGRDSPYRQRSVAENLDLFRRMRSGEFADGARVLRARIDMAAGNLNLRDPVLYRIMHQSHHRSGEQWCIYPMYDFTHPLSDALEGITHSLCTLEFADHRPLYDWFLDNLPVPARPRQIEFARLNLAYTVVSKRKLLQLVNDGHVEGWDDPRMPTLCGLRRRGCPPAAIRDFCERIGVAKKESLVDLALLEHCVREELNNSANRVMGVLKPLKVVISNYPEDQFEEVTAQNHPQQPEKGSRQLPFGRVIYIERDDFMEEPVKKFFRLAPGREVRLRYAYFIRCDEVIKDAAGQVTELRCTYDPATLGGSAPDGRKVKGTIHWVAAAQALKAQIRLYDRLFSSETPDKAGGDFKECLNPESLITLEDCRLEPGLATARAGEYFQFERQGYFVLDPKMSQPGRPVFNRSATLRDTWAKQR

SEQ ID NO: 67866 - DNA, 1677 bp, delta proteobacterium MLMS-1
  CDS (1)..(1677): transl_table=11
atgagcgcaagcgacacccccggccccagcgactttatccgcgaaatcatcaccgccgatctggccagcggcaagcaccagcaagtggttacccgctttccgccggagcccaacggttatctccatatcggccatgccaagtcgatctgtctcaacttcggcctggcccgggaacacaccccggcccgctgtcatctgcgcttcgacgacaccaatcccagcaaggaagagagcgaatatgtcgaatcgatcaaggaggatgtgcgctggctgggctttgactggggcgaacatctctacttcgcctccgattatttcgaacaactctatgaatacgccgagcacctgatcaccagcggcaaggcctacgtctgtgacctctccgccgaagagatccgggaaagccgcggcaccctcaccgaaccgggccgggacagcccctaccggcagcgcagcgtggccgagaatctcgatctttttcggcggatgcgctccggagagtttgccgacggtgcccgggtcctgcgggccaggatcgatatggcggcgggcaatctcaacctgcgcgatccggtgctctaccgcatcatgcaccagagccaccaccgcagcggcgagcagtggtgtatctatccgatgtacgatttcacccatcccctctccgacgccctggaaggcatcacccattccctctgcaccctggagtttgccgatcaccggccgctctacgactggttcctcgacaacctgccggtgccggcccggccccgccagatcgaattcgcccgcctcaacctggcctacaccgtggtcagcaaaagaaagctgttgcaactggtcaacgacggccatgttgagggctgggatgatccccggatgccgaccctgtgcggcctgcgccgccggggctgcccgccggcggcgatccgcgatttttgcgagcggatcggcgtggccaaaaaagagagcctggtggatctggccctgctggaacattgcgtgcgtgaagagttgaacaacagcgccaaccgggtgatgggggtgctcaaaccgttgaaggtggtgatcagcaactaccccgaggaccagttcgaagaggtcacggcccagaatcatccccagcagccggaaaaaggcagtcgccaactgcctttcgggcgggtgatctacattgaacgggatgacttcatggaggagccggttaagaaatttttccgcctggccccgggccgcgaagtccggctgcgttacgcttatttcatcaggtgcgacgaggtgatcaaagatgccaccggccaggtcacggagttacgctgcacctatgacccggccaccctgggcggctcggcccccgatggccgcaaggtaaagggcaccatccactgggttgcggcagcacaggcgctcaaggcccagatacggctttatgaccggctcttcagcagtgaaactccggataaggccggcggtgatttcaaggagtgcttaaaccccgaatctttgattaccctggaggattgccgccttgaacccggcctggccacggcccgagccggtgaatatttccagtttgagcgccagggctactttgtgctggatcccaaaatgtcccaaccgggtcggtcggtcttcaaccgcagcgccaccttgcgcgacacctgggccaaacagcggtga

SEQ ID NO: 67867 - protein, 558 aa, delta proteobacterium MLMS-1
MSASDTPGPSDFIREIITADLASGKHQQVVTRFPPEPNGYLHIGHAKSICLNFGLAREHTPARCHLRFDDTNPSKEESEYVESIKEDVRWLGFDWGEHLYFASDYFEQLYEYAEHLITSGKAYVCDLSAEEIRESRGTLTEPGRDSPYRQRSVAENLDLFRRMRSGEFADGARVLRARIDMAAGNLNLRDPVLYRIMHQSHHRSGEQWCIYPMYDFTHPLSDALEGITHSLCTLEFADHRPLYDWFLDNLPVPARPRQIEFARLNLAYTVVSKRKLLQLVNDGHVEGWDDPRMPTLCGLRRRGCPPAAIRDFCERIGVAKKESLVDLALLEHCVREELNNSANRVMGVLKPLKVVISNYPEDQFEEVTAQNHPQQPEKGSRQLPFGRVIYIERDDFMEEPVKKFFRLAPGREVRLRYAYFIRCDEVIKDATGQVTELRCTYDPATLGGSAPDGRKVKGTIHWVAAAQALKAQIRLYDRLFSSETPDKAGGDFKECLNPESLITLEDCRLEPGLATARAGEYFQFERQGYFVLDPKMSQPGRSVFNRSATLRDTWAKQR

SEQ ID NO: 67868 - DNA, 1671 bp, Oceanobacter sp. RED65
  CDS (1)..(1671): transl_table=11
atgacagaagcaacggctaaaccagtcaactttattgccaaagtaattaccgaagacctagagaacggcaagcacagcaacatcgttacccgttttcctcctgagccaaatggctacttacacattggtcacgccaaatccatctgcttgaacttcggcctagccgaacagtttggcggtcaatgtaacttgcgctttgacgataccaacccagagaaagaagaagacgagtacgttaactccattaaggaagacgtgtcttggttgggctttcaatgggccggggaaattcattacacgtcagattatttcgaccagctacacgactgggctgtgcatttaattaaagagggtaaagcgtacgtttgtgaactaagccctgaacaagcgaaagagtatcgtggcagctttgatgagccaggtaaaaatagcccgttccgcgaccgcagtgtcgaagagaatcttgagctgtttgcgaaaatgcgcgctggagacttcgatgagggtaaagcgtctttgcgtgccaagattgatatggcgtcaccgaacatgaacatgcgtgaccctgttatctaccgtattaagaaagctcatcatcaccaaacgggtgataagtggtgtatttacccaagctatgactttgctcatggtcagtcagatgccattgaaggcattacccattctgtgtgtacgctggaatttgctgatcaccgtccgttgtacgattggtttattgaaaacctacccacaccagcggagccgcatcagtatgagttcggtcgcttgaacatcaattacatggtgaccagtaaacgtaaattgcgtgcattggttgaaggcggtgtggttgccggttgggatgatcctcgtatgccaaccatcagcggtatgcgtcgtcgcggttatacaccgactgcgattcgtaatttctgcgatagtttggccgtagcaaaaaccgacggtaccgtggacattgcacagttagagcacttcattcgtgatgacttaaatcaaaacgcgccgcgtgctatgtgtgtgatcaacccacttaaagtggtgatctcaaatttatctgatgatcatgaagaaaccttttctgtgccttacatgcaagatcgtgaagacttaggtcagcgcgagatgccgtttacaaaagagttattcattgatcaggctgactttaaagaagagtacagcaagaaattcaagaaaaaattctgtgtcggtaagcgtattcgtttacgtcacggttatgtgttagaagctgacggttttgaaaaagatgccgacggtaatatcactcaagtgaatgcaactttgattgaagataccttggggaaagatccagccgatggtgataagcctaagggcgtggtgcattgggtaagcgctaagcatgcaaaagaagctgagctgcgtacctatgatcgcttgttcttggatgccaatccagacagcggcaaaaaagactttatggaaagcattaatccagagtctttaattgtaaaaaccggtttgattgaacctgcgttggccaacgtagaaagtgaaaccgtgttccagtttgaacgtgaaggttattatgtagctgatcgtaaagatcatactgcggataagcctgtgttcaacttaactattggtctacgtgcagataaggcactaagtaattaa

SEQ ID NO: 67869 - protein, 556 aa, Oceanobacter sp. RED65
MTEATAKPVNFIAKVITEDLENGKHSNIVTRFPPEPNGYLHIGHAKSICLNFGLAEQFGGQCNLRFDDTNPEKEEDEYVNSIKEDVSWLGFQWAGEIHYTSDYFDQLHDWAVHLIKEGKAYVCELSPEQAKEYRGSFDEPGKNSPFRDRSVEENLELFAKMRAGDFDEGKASLRAKIDMASPNMNMRDPVIYRIKKAHHHQTGDKWCIYPSYDFAHGQSDAIEGITHSVCTLEFADHRPLYDWFIENLPTPAEPHQYEFGRLNINYMVTSKRKLRALVEGGVVAGWDDPRMPTISGMRRRGYTPTAIRNFCDSLAVAKTDGTVDIAQLEHFIRDDLNQNAPRAMCVINPLKVVISNLSDDHEETFSVPYMQDREDLGQREMPFTKELFIDQADFKEEYSKKFKKKFCVGKRIRLRHGYVLEADGFEKDADGNITQVNATLIEDTLGKDPADGDKPKGVVHWVSAKHAKEAELRTYDRLFLDANPDSGKKDFMESINPESLIVKTGLIEPALANVESETVFQFEREGYYVADRKDHTADKPVFNLTIGLRADKALSN

SEQ ID NO: 67870 - DNA, 1623 bp, Desulfitobacterium hafniense DCB-2
  CDS (1)..(1623): transl_table=11
gtggataacgagaataaatcctctaattttttacgcagcattatccttgaggatttacgggagggaaaggtagaagaaatcacgacacggtttccccccgagcccaatggttacctgcatattgggcatgctaaatccatctgtttgaactttggtttggccgacgaattcaaaggaaaaaccaatttgcggtttgatgatacgaatccggtcaaagaagatactgaatatgtagaatccatcaaagaagatgtcaagtggttggggtttgactgggacaacctctttttcgcttccgattattttgcggagatgcataagcgagccgttctgctgatcgaaaagggcaaagcgtatgtttgtgatttatccgctgaggagattagaaaaagccgcggcaccctgactgaggccggtaaggaaagcccttaccgcaaccgcagcgtggccgagaacctggagctctttgagagaatgcgtcaaggtgaatttaaggacggagaaaaggttctccgggctaagatcgatatgggctcacctaacatcaatatgcgggatcctgtcctttatcggattgcccatgccacccaccataatacaggggacacatggtgcatctaccccatgtatgattatgcccatcctttagaggatgctatcgaagggataactcactctatctgtactttagaatttgaagatcaccgtcccctctatgattgggtcgttcgggaatgtgagatggaacatgtcccacatcaatatgaatttgcccgcttaaatatgaccaatacggtgatgagcaagcgcaagctgaagcagctggtggacgaaaaagtggtggatggttgggatgatcccagaatgcccaccatctccgggctgcgccgccggggatatacccctgaagccatccgcaattttgcccaagccattggtgtggccagagcggacagtgtggtggattccaaaatgctggagcactttattcgggaagatctgaagctcaaagtgtcccggcccatggcggtcatccgtcccttgaaggtggtcattaccaattacccggaaggccaagtggaaaggctggatgccgatcacaataaagagaaccctgagatggggaaacgcaagattcctttttccagggagatttacatcgagcaggaagatttcatggaggtcccgccgccgaagtaccaccgcctttacccgggcaatgaagttcgtttgatggatgcctactttattaagtgtgaagaggtcatcaaggatgatgagggcaagatcatcgagattcgttgcacctatgatccggaaacaaaaagcggcacaggatttaccggccgcaaggtcaaggggacgattcattgggtggaagccactcaggcagtgccggcagagtttcgcctctatgagccgttaattcaggatgattatatcaatcccaattctctggaaataaggcaagggtttgtggaaccttatatgaaagaggccaaaccccaggataaattccagtttccccgtcacggctactttaatgtagatccgaactataccaccccggaaagcttagtgttgaatttaattgtttccttaaaaagctctttcgttatataa

SEQ ID NO: 67871 - protein, 540 aa, Desulfitobacterium hafniense DCB-2
MDNENKSSNFLRSIILEDLREGKVEEITTRFPPEPNGYLHIGHAKSICLNFGLADEFKGKTNLRFDDTNPVKEDTEYVESIKEDVKWLGFDWDNLFFASDYFAEMHKRAVLLIEKGKAYVCDLSAEEIRKSRGTLTEAGKESPYRNRSVAENLELFERMRQGEFKDGEKVLRAKIDMGSPNINMRDPVLYRIAHATHHNTGDTWCIYPMYDYAHPLEDAIEGITHSICTLEFEDHRPLYDWVVRECEMEHVPHQYEFARLNMTNTVMSKRKLKQLVDEKVVDGWDDPRMPTISGLRRRGYTPEAIRNFAQAIGVARADSVVDSKMLEHFIREDLKLKVSRPMAVIRPLKVVITNYPEGQVERLDADHNKENPEMGKRKIPFSREIYIEQEDFMEVPPPKYHRLYPGNEVRLMDAYFIKCEEVIKDDEGKIIEIRCTYDPETKSGTGFTGRKVKGTIHWVEATQAVPAEFRLYEPLIQDDYINPNSLEIRQGFVEPYMKEAKPQDKFQFPRHGYFNVDPNYTTPESLVLNLIVSLKSSFVI

SEQ ID NO: 67872 - DNA, 1671 bp, Vibrio sp. Ex25
  CDS (1)..(1671): transl_table=11
  misc_feature (1333)..(1333): s is g or c
atgagtgaagctgatgctcgtccatcaaactttattcgccagatcattgataaagatctagcggatggtaaacacactagcgtgcatactcgattcccgccggagccaaatggctacctgcatatcggtcatgctaagtctatctgtttgaacttcggtattgctcaggactaccagggtcaatgtaatctacgtttcgacgatacgaaccctgaaaaagaagacatcgaatacgttgagtctatcaagaaagatgtaaactggttgggctttgagtggagtggtgaagtatgttactcatcaaactacttcgataagctttacgaatatgcaattgaattgattaacaaaggcttagcgtacgtagatgagctaagtcctgagcagattcgtgaataccgtggcacgctaaaggcgccaggtaaaccaagcccataccgtgaccgttctgttgaagagaacttagcgttatttgaaaaaatgcgcgctggtgaatttgaagaaggtaaagcgtgtcttcgtgccaagattgacatgggttcttcattcatggttatgcgcgatccagttttatatcgtgtgcgttttgctacgcaccaccaaactggtgataagtggtgcatttacccaatgtacgacttcacgcactgtatctctgatgcattagaaggcattacacactctatctgtacgcttgagtttatggataaccgtcgtctgtacgactgggttctggacaacatcacgatcgaaagccgtccgcatcaatacgagttcagtcgcttaaaccttgagtacacagtgatgtctaagcgtaagcttaatcaactcgtcactgaaaaactggttaacggttgggatgacccacgtatgccaacagtctcaggtctgcgtcgtcgaggcttcacgccagcatctatccgtgagttctgtaagcgtattggtgtaacgaagcaagaaaatatgatcgagtttagctcactagaatcttgtattcgtgatgacctaaacgagaacgctccgcgtgcaatggctgtgttggatcctgttaaagttgttatcgaaaactttgaagaaggtgcagtagaaaacttgacggtcgctaatcacccaaataaaccagagatgggtgtgcgtgaagtaccattcactcgtgagttgtggattgagcgtgaagacttccgtgaagaggcgaacaaaaagtacaagcgtttagtgctaggtaaagaagttcgcttacgtggtgcttacgtgatcaaagcagagcgcgttgaaaaagatgccgaaggcaacatcacgactatcttctgttcttacgatgcagacacactasgtaagaacccggctgatggccgtaaagtaaaaggtgtgattcattgggtatcagctgataaagcattaccagcggaaatccgtctgtacgatcgtctatttacggttccaaacccgggtgcagcagaagactttgcttctacaatcaaccctgaatcattagttgtgatcaatggttttgtagagcctagcttagcgtcagcagaagcagaaaaaggctaccagtttgagcgtatgggttacttttgcgcagactcgaaagattcttcagcagataaactagtattcaaccgcacggttggcctacgtgatacttgggcaaaaattgagaaccaataa

SEQ ID NO: 67873 - protein, 556 aa, Vibrio sp. Ex25
  misc_feature (445)..(445): The Xaa at location 445 stands for Arg, or Gly.
MSEADARPSNFIRQIIDKDLADGKHTSVHTRFPPEPNGYLHIGHAKSICLNFGIAQDYQGQCNLRFDDTNPEKEDIEYVESIKKDVNWLGFEWSGEVCYSSNYFDKLYEYAIELINKGLAYVDELSPEQIREYRGTLKAPGKPSPYRDRSVEENLALFEKMRAGEFEEGKACLRAKIDMGSSFMVMRDPVLYRVRFATHHQTGDKWCIYPMYDFTHCISDALEGITHSICTLEFMDNRRLYDWVLDNITIESRPHQYEFSRLNLEYTVMSKRKLNQLVTEKLVNGWDDPRMPTVSGLRRRGFTPASIREFCKRIGVTKQENMIEFSSLESCIRDDLNENAPRAMAVLDPVKVVIENFEEGAVENLTVANHPNKPEMGVREVPFTRELWIEREDFREEANKKYKRLVLGKEVRLRGAYVIKAERVEKDAEGNITTIFCSYDADTLXKNPADGRKVKGVIHWVSADKALPAEIRLYDRLFTVPNPGAAEDFASTINPESLVVINGFVEPSLASAEAEKGYQFERMGYFCADSKDSSADKLVFNRTVGLRDTWAKIENQ

SEQ ID NO: 67874 - DNA, 1689 bp, marine gamma proteobacterium HTCC2143
  CDS (1)..(1689): transl_table=11
atgagtaataaacctgctgtaacagatacaacgcccgaaaactttattgaggctattattagtaaagacctctcagaggggaatgttccaaaagtcattacgcgatttccgccagagcctaatggttacctccatattggacacgctaaggctatttgtcttaactttggtttggccgagtcgtttaacggcgagtgtaatttacgcttcgacgatactaatcccgctaaggaaaatcaggattatatcgacgcgattcaggaagatgttcgctggttaggcttcacttgggcaggcaatgtacggtatgcatctgattacttcgaccagttttatgcttgggcgttgcacctcatcaataacggtgacgcttatgtttgtcatttaagcccctcagaatcgagtgaatatcgaggctgggctacaacaccgggcaaagatagtccctatcgatctcggtcggtcgcagagaaccttgaattaattgagagcatgcgggcgggggagtttgatgaaggcgcgtgtgttttgcgggcgaaaatagacatggcttcatcaaatatgaatctgcgtgatcccattttgtatcgaatccggaaagaaattcatcatcagaccggcgacaaatggtgtatatacccgtcatacgactttgcccatggccaggaagatgccatcgaaggagtcacacactcaatatgcacgttggaatttgctgatcatcggccactctataactggtttatcgaacatttgccggtaccggcaacgccgcatcaatatgaatttggtcgcttacatctcaactacaccattactagtaaacgaaaattgaaactgctagtagatgaagagcatgtcgtcggttgggatgacccgaggatgccaacaatcgcgggaatgcgccgcagaggctacagcgccaaggcgttaagaaatttttgtcaaagccttgctgtcgcgaaaaccgatgggatcgttgatgttgcacaacttgaattctttatccgagaagatcttaatgaaaacgccccccgggccatgtgcgtattggatcccgttaaaattgtgatcaataactttgagcagtatatcagtgagtctgtacagtcgatgaccgctgcttgccacccgaacaacgcagcaatgggtgatcgaacgttaccttttacccgtgagttgtatatagatcgcgccgattttagtgaagataccagtttaagtcgaaagaaattcaaacgtttagtaatgggcgagtatgttcgtttacgcagtgcatatgtgataaaagctgaggcggtgacaaaaaatagcgatggctcaatcgactttatctctgcctcgctggtgccgaatacagttggtgataatcctcctgaaggtatcaagcctcgcggagttattcactgggtgtccgccagcgagggagaacaagcagagatcagactttataaacgactgtttgatcatgagtcacctgacggcggtgatggcgaggtgacggaccatttaactccagattcgatgactgtgctaaacgattgctggatagagcctggactggcttatgcaagtcccgagacggcgtttcagtttgagcgagaaggttattttgttgccgatcgttgggagcattcttcgactcggcctgtgttcaatctaactatagggctaagggatagtaaataa

SEQ ID NO: 67875 - protein, 562 aa, marine gamma proteobacterium HTCC2143
MSNKPAVTDTTPENFIEAIISKDLSEGNVPKVITRFPPEPNGYLHIGHAKAICLNFGLAESFNGECNLRFDDTNPAKENQDYIDAIQEDVRWLGFTWAGNVRYASDYFDQFYAWALHLINNGDAYVCHLSPSESSEYRGWATTPGKDSPYRSRSVAENLELIESMRAGEFDEGACVLRAKIDMASSNMNLRDPILYRIRKEIHHQTGDKWCIYPSYDFAHGQEDAIEGVTHSICTLEFADHRPLYNWFIEHLPVPATPHQYEFGRLHLNYTITSKRKLKLLVDEEHVVGWDDPRMPTIAGMRRRGYSAKALRNFCQSLAVAKTDGIVDVAQLEFFIREDLNENAPRAMCVLDPVKIVINNFEQYISESVQSMTAACHPNNAAMGDRTLPFTRELYIDRADFSEDTSLSRKKFKRLVMGEYVRLRSAYVIKAEAVTKNSDGSIDFISASLVPNTVGDNPPEGIKPRGVIHWVSASEGEQAEIRLYKRLFDHESPDGGDGEVTDHLTPDSMTVLNDCWIEPGLAYASPETAFQFEREGYFVADRWEHSSTRPVFNLTIGLRDSK

SEQ ID NO: 67876 - DNA, 1659 bp, marine gamma proteobacterium HTCC2080
  CDS (1)..(1659): transl_table=11
atgagtaccgaagcccgaagtaatttccttaagacccagattcaatccgatcttgacacaggtggggcccgccgactggttacccgattccctcctgagcccaacggatttctgcatttgggtcatgcaaaatcgatcacagtgaattttgagctggcaaaacagtttggtggggaatgtcacctgcgttttgatgacaccaatcccgaaaaggaaagtcagatttttatcgacgcgatccaagaggatgtgcgctggctggggtatcagtggcacggagaggtgcgctatgcctcgagttattttcagcaactctatgtctgggcgctgcatcttatcgaccagggtcatgcatatgtttgtgatttgtctgctgatgaagcccgagagtaccgcggtagtttgactgaggctggtcgtaacagccctcatcgatcccgctctatcgaagcgaatcgtgatctcttcgagcgaatgcgagctggagagtacccagatggtagtcgggtattgcgcgcaaaaattgatatggcctccccgaatattaatttgagagatcccattttgtaccggattcgaaaagcccatcatcatcaaacgggtgatgcatggccgatctatcccacctatgactttgctcatggacaagaagacgctatcgagggcgtgacgcattcaatctgtacgcttgaatttgaagatcatcggcccctttatgattggtttatcgagcatttgcccgtaccctcacgacctcggcagattgagtttgctcgtttaaacaccagttacacgatgaccagcaagcgaaagcttaaacagctggttgactccaaagcggttgaaggctgggatgacccaagaatgcccaccctcgcaggtcttcggcggcggggctatccaccggcggcaatacgacatttttgtgaagaagtgggtacttcgcgctctgatagcgtcgttgacgtcgctatgctcgagagtgcagtgagaaatcagttaaatgctgagtcgccaagggttatggcagtcctcaacccactaccgctgacgattacgaatcgcgaaagacccgaggttttggcggtcgctaatcatcccggagatgaggctatgggtacccgttcggtacccttcacctcggagatctatatcgacgcggccgacttccgagaggaggccaataaaaagtataagcggctcgtgattggtaagcgggtcagattgcgcggcggctatgtcattgaggctgatcgatgtgatcacgacagcgctggtgaagtttcccatgtttacgctcatgtcgtagaaggcactttaggcgaggatccccctgacggaattaaggctaagggcgtgattcattgggtatctgcgacagagggattaagcgctgaaattcgctgttacgaccgcctttttaccgatcccaacccgggtaaagctgaggatatgatggcgttgctcaaccccaaatctttggtacgactagaacacgccgtgattgaaccctcggctgcgttggctgcgagggagggggcctaccaatttgagcgagagggttattttgttgctgaccgctatgatcacacccctgaaaaacctgtgtttaatatgacaataggtctgagagatacctggagtgactctcatggctga

SEQ ID NO: 67877 - protein, 552 aa, marine gamma proteobacterium HTCC2080
MSTEARSNFLKTQIQSDLDTGGARRLVTRFPPEPNGFLHLGHAKSITVNFELAKQFGGECHLRFDDTNPEKESQIFIDAIQEDVRWLGYQWHGEVRYASSYFQQLYVWALHLIDQGHAYVCDLSADEAREYRGSLTEAGRNSPHRSRSIEANRDLFERMRAGEYPDGSRVLRAKIDMASPNINLRDPILYRIRKAHHHQTGDAWPIYPTYDFAHGQEDAIEGVTHSICTLEFEDHRPLYDWFIEHLPVPSRPRQIEFARLNTSYTMTSKRKLKQLVDSKAVEGWDDPRMPTLAGLRRRGYPPAAIRHFCEEVGTSRSDSVVDVAMLESAVRNQLNAESPRVMAVLNPLPLTITNRERPEVLAVANHPGDEAMGTRSVPFTSEIYIDAADFREEANKKYKRLVIGKRVRLRGGYVIEADRCDHDSAGEVSHVYAHVVEGTLGEDPPDGIKAKGVIHWVSATEGLSAEIRCYDRLFTDPNPGKAEDMMALLNPKSLVRLEHAVIEPSAALAAREGAYQFEREGYFVADRYDHTPEKPVFNMTIGLRDTWSDSHG

SEQ ID NO: 67878 - DNA, 1689 bp, Candidatus Desulfococcus oleovorans Hxd3
  CDS (1)..(1689): transl_table=11
atgagcgaaaaaaatacggatttcattcgacggatcattgacgaggacctggccgccggcaaatatcccgacggtctggtcacccgttttccgccggaacccaacgggtatctgcatgtcggccatgccaagtccatctgcctcaatttcggcattgccgaagcatatgcaaacagcgtctgcaacctgcggttcgacgataccaatcccggcaaggagaacgtggagtacgtggactccatacgggaagatgtgaaatggctggggtttgatcccggagaccgggtctattttgcctccgactattttgagcggctctacgcctttgccgaacagttgattaaagacggcaaggcctatgtgtgcggcctttccgccgacgatatccgccgcacccggggcaccttgaccgagccgggcaccccaagcccggatagaaaccggcccgccgaagagaacctggaccttttccggcgcatgcgggccggtgagtttgccgacggcacttacatcctgcgggccaagatcgacatggcctcgcccaccctctgcctgcgggacccggccatctaccgcatccgccacgagtcccaccaccgcaccggtgacaaatggtgcatctatcccatgtatgattttgcccatcccctgtctgatgccatcgaaggggtcacccattccctgtgcactctggagtttgccaacaaccggcccctgtacgactggttcgtggaacagctcaccgatccgccccggcccaaacagaccgaatttgcacggctcaacctcacctacacggtgttgagcaagcgcaaactctcccgcctggtgtccgaaggctttgtttccggctgggacgacccgcgcatgcccaccattgccggcatccggcgcagaggagtgccgcccggggccctgcggaatttttgcgacctgatcggcattgccaaaaaagagagcctggtggacgtggccctgttagagtatgccgttcgggaacagctcaacaaaacggcccctcgccgcatggccgtgattcaccccctgaaagtggttatcgagaactacccggaaggagagggcgaggagatgaccgccgtcaataacccggaagacccggacgccggcacccgcatggtgccgttttcccgggaactctacattgaggccgacgattttatggaagagccgcccaagaagtttttccgcctggcgccgggccgggaggtgcggctgcgctacgcctactttataaaatgtgaaagcgtgatcaaggacgcctccggcaacatcgttgagctgcgctgcacctatgatccggccacccggggcggggacgcgccggacggccgcaaggtcaaggccacccttcactgggtgtcggcccgtcatgccgtggccgccgaggtgcgcctctacgaccggctatttctaaaagaaaacccgtctgatgacgaaggcagggactttaccgaatttttaaatcccgacagcctgcaaccccttttcccctgctttctggaaccggccctgacgcaggccgcgccctgccgggccttccagtttgagcgcctgggctatttctgcgcggacgcaaaagatgccacgcccgaccgcccggtgttcaaccgcaccgtcacgcttcgggacacctgggccagaatccagaagcaggaacaaaagggatag

SEQ ID NO: 67879 - protein, 562 aa, Candidatus Desulfococcus oleovorans Hxd3
MSEKNTDFIRRIIDEDLAAGKYPDGLVTRFPPEPNGYLHVGHAKSICLNFGIAEAYANSVCNLRFDDTNPGKENVEYVDSIREDVKWLGFDPGDRVYFASDYFERLYAFAEQLIKDGKAYVCGLSADDIRRTRGTLTEPGTPSPDRNRPAEENLDLFRRMRAGEFADGTYILRAKIDMASPTLCLRDPAIYRIRHESHHRTGDKWCIYPMYDFAHPLSDAIEGVTHSLCTLEFANNRPLYDWFVEQLTDPPRPKQTEFARLNLTYTVLSKRKLSRLVSEGFVSGWDDPRMPTIAGIRRRGVPPGALRNFCDLIGIAKKESLVDVALLEYAVREQLNKTAPRRMAVIHPLKVVIENYPEGEGEEMTAVNNPEDPDAGTRMVPFSRELYIEADDFMEEPPKKFFRLAPGREVRLRYAYFIKCESVIKDASGNIVELRCTYDPATRGGDAPDGRKVKATLHWVSARHAVAAEVRLYDRLFLKENPSDDEGRDFTEFLNPDSLQPLFPCFLEPALTQAAPCRAFQFERLGYFCADAKDATPDRPVFNRTVTLRDTWARIQKQEQKG

SEQ ID NO: 67880 - DNA, 1671 bp, Marinobacter sp. ELB17
  CDS (1)..(1671): transl_table=11
atgagcgccgagcccaagaaagcccataactttattcagagcctgattgaagacgccgtcgccaaaggcgcgcacacagccacggtagtgacccgtttcccgccggagcccaacggttacctgcacgttggccacgccaaagccatttgcctgaattttggcattgccaatacctttggcggtgaatgcaatctgcgctttgacgacaccaacccggaaaaagaaagccaggaatacatcaacgcgataaaagcggatgtggagtggctcggttatcaatggcaaggaaaggtgcactttgcctcggactattttgatgccctgtacaactttgcggaagagctgattgagcgcggcaatgcttacgtgtgtgccctcagcgccgacgaaatggcggactaccgcggcagccttaaagagcctggccgcaacagcccttatcgcgagcgcgcggtggaagaaaacctgaaactgttccgccagatgcgcgacggtaatttccaaaacggcgaaatggtgctgcgggcgaagattgatatgacgtcgcccaacatcaacatgcgtgacccgatcctgtaccgtatccgctacgctgaacaccaccagaccggcaataaatggtgcatctacccgatgtacgactacacccatccgatttcagacgcgctggaaggcgttacccattccctgtgtacgctggaattcgaagaccatcgtccgctgtatgactgggtgctggacaacatcagcgtaccttgtcacccgcgccagattgaatttgcgcggctgaacctgaactacaccatcaccagcaaacgcaaactcagacgtttagtggacgagcgcatcgttgacggttgggacgatccgcgcatgcccaccatttcagggttgcgccgccgcggttacacacctgagtctttgcgcaccttctgcgacatgatcggcgtgaacaaagctggcggtaccgtagacgtgggcatgctggagttcgccattcgcgaagatttgaacatccgttcgccccgcgctatgtgcgtgatgcgtccattgaaggtaactctgaccaactacccggctgacaaaaccgaaaccctggtgctgccggtgcatccgcaaaatccggacatgggcagtcgcgaagtgacctggagccaaaccctgtttattgatcgggaagatttcgccctggaagcgccacgcaaatggaagcgactggcaccggaccaggccgtgcgcctgcgcggtggttatgtgatgacttgccgcgaaattatccgcgaccagagtggcgagattgtcgagctgaagtgcgaatacgacgaaaacactctgggcgtgaaccctgagggctacaagcccaatggtgtgattcactgggtatctgcaacgaacagcgtggagtgcgacatcaacgtttacgatcgcctgttcaacgcggaaacgccagacagcgataaagaaggcgacatgctggaccacctgaacccacaatctttggtggttttgaaaggcgcccgtgccgaacgcaatctggcgtcgccggcgagcgatctgccgtatcagttcgagcgtgaagggtactttttcttcgaccagaagctgacggaaaatgctggcaagccggtgttcaatcgcaccgtcaccctacgcgattcctggggtaaataa

SEQ ID NO: 67881 - protein, 556 aa, Marinobacter sp. ELB17
MSAEPKKAHNFIQSLIEDAVAKGAHTATVVTRFPPEPNGYLHVGHAKAICLNFGIANTFGGECNLRFDDTNPEKESQEYINAIKADVEWLGYQWQGKVHFASDYFDALYNFAEELIERGNAYVCALSADEMADYRGSLKEPGRNSPYRERAVEENLKLFRQMRDGNFQNGEMVLRAKIDMTSPNINMRDPILYRIRYAEHHQTGNKWCIYPMYDYTHPISDALEGVTHSLCTLEFEDHRPLYDWVLDNISVPCHPRQIEFARLNLNYTITSKRKLRRLVDERIVDGWDDPRMPTISGLRRRGYTPESLRTFCDMIGVNKAGGTVDVGMLEFAIREDLNIRSPRAMCVMRPLKVTLTNYPADKTETLVLPVHPQNPDMGSREVTWSQTLFIDREDFALEAPRKWKRLAPDQAVRLRGGYVMTCREIIRDQSGEIVELKCEYDENTLGVNPEGYKPNGVIHWVSATNSVECDINVYDRLFNAETPDSDKEGDMLDHLNPQSLVVLKGARAERNLASPASDLPYQFEREGYFFFDQKLTENAGKPVFNRTVTLRDSWGK

SEQ ID NO: 67882 - DNA, 2361 bp, Arabidopsis thaliana
  CDS (1)..(2361)
atggttctcaaagacgataactccgagaaatctattgagctcttcattagtattggtttggacgagaaaacagctcgtaataccatcaataataacaaggtcaccgccaatctcaccgccgttatccacgaggctgctgttactgatgggtgcgatcgaaatactggcaatctgttatactcggtcgctactaagttccctacaaatgctcttgtgcatcgccctacattgctcaagtacattgttaactctaagattaaaactccagcccaattggaagctgcatttgccttttttgccagtaccggtcctgaggactttaagctgaatgagtttgaagaggcatgtggtgttgggattgaagtttccccagaagatattgagaaagcagttaaaggaatctttgaagagaataagaaaacaatattggagcagcgctatcgaactaatgtgggtgaattatttggacatgtccggaaaagtttgccatgggccgatcctaagattgtaaagaaactcatagatgagaaaatgtatgagctgcttggtgagaaaaccgctgctgataatgaaaaacctacaaaaaagaaggagaagaaggagaagcctgccaaagtcgaggaaaagaaagctgtggtggaaactaccgcagagccatctgaagaggagcttaatccatatactatattccctcagccagaacaaaattttatggttcacacagaagtgtttttcagtgatggctctattctcagatgtagcaatacaaaggaagtacttgacaaacatctcaaggtgactggagggaaagtttatactcggttcccccctgaaccaaatggttatcttcatattggacatgccaaggctatgtttgttgattttggtcttgcaaaggagcgagggggttgctgttatctaaggtatgatgatacaaatccagaggcagaaaaggaagagtatattaatcatattgaagaaattgttaagtggatgggttgggaacccttcaaggaactgtatgatttggcagtggagttgattcggagaggtcatgcttatgttgatcatcagactgctgatgagataaaagagtacagagagaagaaaatgaacagcccctggagggacagacctattgaagaatctctaaaactttttgatgaaatgagacgaggcatcattgaggaagggaaggcaaccctaagaatgaagcaagatatgcagagtgacaattttaatatgtatgatcttattgcctatcgaataaagttcgcacctcatcctaaggctggtgacaagtggtgtatctatccgagttatgattatgcccactgcactgttgattctcttgagaatataacgcattcgctctgtactcttgaatttgaaacccggcgtgcttcatactattggctgttacattccctgagtctctacatgccatatgtgtgggaatattcacggttgaatgtgacaaacactgtaatgtccaagcgtaagttgaattacatagtgacaaacaagtatgttgatggttgggatgatccacgtcttttgacactttctggtttgagacggaggggtgtgacttcaactgcgattaatgcatttgtacgaggcattgggattactagaagtgatggtagcatgatacacgtaagtcgtcttgagcatcatattagagaggaattgaataaaacagcccctcgcaccatggtggtgcttaatcctcttaaagtggtcatcaccaatttggaatcagacaagcttatagagcttgatgccaaaaggtggcctgatgctcagaacgatgatccctcagcattctacaaggtaccgttctctagagttgtatacattgaccaatctgacttccgaatgaaggattcaaaagattattatgggctcgcccctggtaaatctgttttgctaagatatgctttcccaatcaagtgcaccaatgttgtctttgctgatgacaatgaaaccgttcgtgagattcatgcggaatatgaccccgagaaaaagtcaaagccaaagggggttctacactgggtcgctgaatcttccccaggagaagagcccataaaggtggaagtccgattatttgagaaactctttaactccgagaacccggctgaactcaatgatgcttggctcactgacattaacccaaactctaaaatggtaatttctggtgcctatgctgtatcaacccttaaagatgctgcagttggggacagattccaattcgagaggctaggttattacgcggtggacaaggactctgagccaggaaagcttgtgttcaaccggacggtcacactcagagacagctacgggaaaggtggaaagtaa

SEQ ID NO: 67883 - protein, 786 aa, Arabidopsis thaliana
MVLKDDNSEKSIELFISIGLDEKTARNTINNNKVTANLTAVIHEAAVTDGCDRNTGNLLYSVATKFPTNALVHRPTLLKYIVNSKIKTPAQLEAAFAFFASTGPEDFKLNEFEEACGVGIEVSPEDIEKAVKGIFEENKKTILEQRYRTNVGELFGHVRKSLPWADPKIVKKLIDEKMYELLGEKTAADNEKPTKKKEKKEKPAKVEEKKAVVETTAEPSEEELNPYTIFPQPEQNFMVHTEVFFSDGSILRCSNTKEVLDKHLKVTGGKVYTRFPPEPNGYLHIGHAKAMFVDFGLAKERGGCCYLRYDDTNPEAEKEEYINHIEEIVKWMGWEPFKELYDLAVELIRRGHAYVDHQTADEIKEYREKKMNSPWRDRPIEESLKLFDEMRRGIIEEGKATLRMKQDMQSDNFNMYDLIAYRIKFAPHPKAGDKWCIYPSYDYAHCTVDSLENITHSLCTLEFETRRASYYWLLHSLSLYMPYVWEYSRLNVTNTVMSKRKLNYIVTNKYVDGWDDPRLLTLSGLRRRGVTSTAINAFVRGIGITRSDGSMIHVSRLEHHIREELNKTAPRTMVVLNPLKVVITNLESDKLIELDAKRWPDAQNDDPSAFYKVPFSRVVYIDQSDFRMKDSKDYYGLAPGKSVLLRYAFPIKCTNVVFADDNETVREIHAEYDPEKKSKPKGVLHWVAESSPGEEPIKVEVRLFEKLFNSENPAELNDAWLTDINPNSKMVISGAYAVSTLKDAAVGDRFQFERLGYYAVDKDSEPGKLVFNRTVTLRDSYGKGGK

SEQ ID NO: 67884 - DNA, 1677 bp, Bradyrhizobium japonicum
  CDS (1)..(1677): transl_table=11
atgacagaaccggtggcagctgaggttgggcgcgatttcattcgtgacatcatccaggccgacctcgatcaggccaaatacagggagatcgtgacccggttcccgccggagccgaacggctacctgcatatcggccacgccaagtcgatcgcgctcaatttcggcatcgcccaggagtttccgggtcgctgccatctgcgtttcgacgacaccaatccggtcaaggaagagcaggaatatatcgattccatccaggccgacgtgcactggctcggcttcgactggggcaagaacctgttctttgcctcggattatttcgaccgcctgtacgaatgggcggagacgctgatccgcgacgggctcgcctatgtcgacgaccagacccaggaggagatccgcacctcccgcggcacgctgaccgagcccggcaagaactcgccattccgcgaccgcagcgtggatgagaacctcgacctgttccgccgcatgaaggcgggcgaattccccaacggcgcgcgcgtgctgcgggccaagatcgacatggccgcgggcaacatcaatctgcgcgatcccgtgctgtaccgcatcctgcatgcgcatcatccgcgcaccggcaacgcatggtgcatctatccgagctacgactatgcccacggccagtcggacgcgatcgagggcatcacgcactcgatctgcacgctggagttcgaggaccaccggccgctctacgactggttcatcgagaagctgccggtgccgtcgaagccgcaccagtacgagttcgcgcggctgaacctgacctacacgctgctctcgaagcgcgtgctgacccagctcgtgcgcgagggccatgtcgcgggttgggacgatccgcgcatgccgaccatggcgggcatgcgccgtcgcggtgtgccgccggcggcgctgcgtgaattcgtcaagcgcatcggcgtcgccaaggccaacagcgtggtcgatgtcggcatgctcgaattctgcatccgcgaggagctgaaccgcaccgcgcagcgtcgcatggcggtgctgaagccgctcaaggtcgtgatcgagaactatccggaagggcagaccgaggagctcgaggcgatcaaccatccggacgatccctccgccggcacgcggaagatcacgttcggccgcgagctctatatcgagcaggacgacttcatggagaaccctcccaagaagttcttccgcctgtcgcccggcaacgaggtccggctgcgctacgcctatttcgtcaaatgcaccggcgtgatcaagaacgagagcggcgaggtggtggagctgcgctgcacctacgatcccgcgaccaggggcggcaatgcgcccgacggccgcaaggtcaaggcgaccatgcactggctgtcggcggcagcgtcgaagccggcggagatccgcatctacaaccagctgttcgcgaacccgagcccggacgcctcgaactttgccgccgatctcaatccgcagtcgctggagattctcagcaatgcccgagtcgaggcatcggtcgcggagagcaattccaccgagccgatgcagttcgagcgccagggatatttcgtgcgcgacaaggactcgacgcccggcaagccggtgttttcacgcaccatcggcctgcgcgacacgttcgcgaaggaagtcgcgaaaggttga

SEQ ID NO: 67885 - protein, 558 aa, Bradyrhizobium japonicum
MTEPVAAEVGRDFIRDIIQADLDQAKYREIVTRFPPEPNGYLHIGHAKSIALNFGIAQEFPGRCHLRFDDTNPVKEEQEYIDSIQADVHWLGFDWGKNLFFASDYFDRLYEWAETLIRDGLAYVDDQTQEEIRTSRGTLTEPGKNSPFRDRSVDENLDLFRRMKAGEFPNGARVLRAKIDMAAGNINLRDPVLYRILHAHHPRTGNAWCIYPSYDYAHGQSDAIEGITHSICTLEFEDHRPLYDWFIEKLPVPSKPHQYEFARLNLTYTLLSKRVLTQLVREGHVAGWDDPRMPTMAGMRRRGVPPAALREFVKRIGVAKANSVVDVGMLEFCIREELNRTAQRRMAVLKPLKVVIENYPEGQTEELEAINHPDDPSAGTRKITFGRELYIEQDDFMENPPKKFFRLSPGNEVRLRYAYFVKCTGVIKNESGEVVELRCTYDPATRGGNAPDGRKVKATMHWLSAAASKPAEIRIYNQLFANPSPDASNFAADLNPQSLEILSNARVEASVAESNSTEPMQFERQGYFVRDKDSTPGKPVFSRTIGLRDTFAKEVAKG

SEQ ID NO: 67886 - DNA, 1716 bp, Buchnera aphidicola subsp
  CDS (1)..(1716): transl_table=11
atggatactaaaaaagaaattaaaaacaataattttatttgtcaaattattaataaagatttaaatgaaaataaaaatttatctttttatactcgcttcccacctgaacccaatgggtatcttcatattggtcatgcaaaatcaatatgtttaaattttgaacttgcgagtttatataaaggacgatgcaatctaaggtttgatgatacaaacccactaaaagaaaatattaaatacattgaatctatcaaacatgatattaattggttaggttataaatggcatggtaatgttcgttatgcttctgaatattttttaaaattatatcaatatgcacaggaattgattaaaaaaggattagcgtatgtagatcatttaacaaaagaacaaatacgtgagtatcgaggaactttaaataccccgggtaaaaatagcccttatagaaatagaacaatccaagaaaatatagaactctttgaaaaaatgaaaaaaggagacttctccgaaggagaagcatgtttgcgcgcaaaaataaatatgagttcttcttctattattatgcgagatcctgttttataccgaattatttttattaagcatcatcagactcaaaataaatggtgcatatatcctatgtatgattttgctcactgtctttcagattctattgaaggcattactcattccttgtgtacgttagaatttcaagataataaattcttatataattggattttaaaaaatactagtgttaaacactatcctaagcaatatgaattttctcgacttaatttagaattttctattttgtctaaaagaaaaataaaaatacttattgataaaaacataatagaaggttgggatgatcctcgaatacctacactttctgctttaagaagaaaaggatacaccccgtcttctattaaaaatttttgtcaaaaaattggcgtgactaaacaaaataatttaatagaattttctatgttagaacattgtattcgaaaagaattgaaccagactgctatacgtactatggccatattagatccaattaaaatatttttatataatttagattcaaattataaagaagaatttatagtcccaaatcatcctaataaccctgaaatgggcactcataaaattatttttactaatactatatatattgaccgttcagattttaaagaaaaatatgataaaaaatataaaagattaaaacttggagaaaaaatacgtctaagatattcttacatcattcatgctgagaaaatagaaaaagatgaatatggtaatatctctaatattatatgttattgtgatcttaatactttagggagaaaaccaaaagataataaaaatcccgcggtaatacactggatatcagaaaaaaatacactttcagcagaatttaaattatatgatcaattatttaatataaaaaatccggaacaacaagaaaattttttattgtatataaattcaaaatcattaattaaaaaatttgggtttatagaaaaaaaaataggagaagaaatacaaaaaaaaatcagtaataataatatagaaatattttttcaatttgaaagaattggttatttttgtatagattttatagattctaaaaaaaatcagttggtatttaatcgtactgttggattacgtgatacatgggattcgaaaaaaattaaaacaaaaaacattactaataattag

SEQ ID NO: 67887 - protein, 571 aa, Buchnera aphidicola subsp
MDTKKEIKNNNFICQIINKDLNENKNLSFYTRFPPEPNGYLHIGHAKSICLNFELASLYKGRCNLRFDDTNPLKENIKYIESIKHDINWLGYKWHGNVRYASEYFLKLYQYAQELIKKGLAYVDHLTKEQIREYRGTLNTPGKNSPYRNRTIQENIELFEKMKKGDFSEGEACLRAKINMSSSSIIMRDPVLYRIIFIKHHQTQNKWCIYPMYDFAHCLSDSIEGITHSLCTLEFQDNKFLYNWILKNTSVKHYPKQYEFSRLNLEFSILSKRKIKILIDKNIIEGWDDPRIPTLSALRRKGYTPSSIKNFCQKIGVTKQNNLIEFSMLEHCIRKELNQTAIRTMAILDPIKIFLYNLDSNYKEEFIVPNHPNNPEMGTHKIIFTNTIYIDRSDFKEKYDKKYKRLKLGEKIRLRYSYIIHAEKIEKDEYGNISNIICYCDLNTLGRKPKDNKNPAVIHWISEKNTLSAEFKLYDQLFNIKNPEQQENFLLYINSKSLIKKFGFIEKKIGEEIQKKISNNNIEIFFQFERIGYFCIDFIDSKKNQLVFNRTVGLRDTWDSKKIKTKNITNN

SEQ ID NO: 67888 - DNA, 1653 bp, Buchnera aphidicola subsp
  CDS (1)..(1653): transl_table=11
atgaaaaaacaacattcaaaaattagtaattttatccaaaaaattatttctgaagatatacaaaataaaaaaattacccatgttaaaacacgattccctcctgaacctaatggttatttacacttaggacacgcgaaatcaatatgtttaaattttgatttagcacaagagtttaaaggtacttgcaatttaagatttgatgatacaaatccaaaaaacgaagacacttgttatataaatagtattatacaagatataaaatggttagaatacaaatggcataacaaaattcgctacgcttcattatatttcaacaaaatatatcaatatgctataaaattaataaaaaaaggactagcttacgttgatcaattaagtccagaagaaattcgtacatttcgtggaacactaactacttcaggtatcgatagtccttaccgtacccaaagcattgaaaaaaatttgaatttatttaaaaaaatgaaacaaggtaaaatgttagaaggaactgcatgcttaagagctaaaattgacatggcatcaaattgtataacaatgagagatcctgttctatatcgaataatattttctaaacatcaccaaacaaataaaaaatggtgcatatatcctacttatgattttacacattgtatttcagacgcattagaaaaaataacacattcattatgcacattagaatttcaagaccatagaaaactttatgaatggattttaaaaaaaattgatatttcttgtaacactcatcaatatgaattttcaagattgaaattagaatattctgtattatctaaacgtaaactaaatttactagtgaacaataaagttgtaaatggatgggatgatccaagaatgccaacattatcaggattaagaaaccgagggtacacaccttcatccataaaattgttttgcaaaaaaattgggattaccaagcaagaaaatacaattcaattatcatttttagaatcttgcataagatctgatttaaatcctatagcaccacgttatatggctgtaattcatcctattaaaatacaaatttgtaacttatctgataattatgaagaaatattaaatattcctaaccaccccactaaacctaacatgggatgccataaatcaatttttagcaatacattatatattgatcaaaatgatttctacgaaaataaatcagaactgctaaaaaaattagcaataggaaaagaaatacgtttacgttactcttatgttattaaggcacataaaataaaaaaagaccaaaataataatattaaaactatattctgcacttatgataaaaatacgctaggaaaaaaccctaagaatagaaaaatattaggagttattcattggatttctgaaaaaaacgtattaccagcacgattttttttatatgataaattattcactatacaatctcctgaaactgtaaaaaattttttacaatatattaataccaattcacttgttattaaatatggtttcgtagaaaaagatatattaacaaacatatctacaactgcatatcaatttgaacgagaaggatatttttgtattaacaaaaattttagtataacaaaaaatttaacatttaatagaattgttactttaaaagataaaataaaataa

SEQ ID NO: 67889 - protein, 550 aa, Buchnera aphidicola subsp
MKKQHSKISNFIQKIISEDIQNKKITHVKTRFPPEPNGYLHLGHAKSICLNFDLAQEFKGTCNLRFDDTNPKNEDTCYINSIIQDIKWLEYKWHNKIRYASLYFNKIYQYAIKLIKKGLAYVDQLSPEEIRTFRGTLTTSGIDSPYRTQSIEKNLNLFKKMKQGKMLEGTACLRAKIDMASNCITMRDPVLYRIIFSKHHQTNKKWCIYPTYDFTHCISDALEKITHSLCTLEFQDHRKLYEWILKKIDISCNTHQYEFSRLKLEYSVLSKRKLNLLVNNKVVNGWDDPRMPTLSGLRNRGYTPSSIKLFCKKIGITKQENTIQLSFLESCIRSDLNPIAPRYMAVIHPIKIQICNLSDNYEEILNIPNHPTKPNMGCHKSIFSNTLYIDQNDFYENKSELLKKLAIGKEIRLRYSYVIKAHKIKKDQNNNIKTIFCTYDKNTLGKNPKNRKILGVIHWISEKNVLPARFFLYDKLFTIQSPETVKNFLQYINTNSLVIKYGFVEKDILTNISTTAYQFEREGYFCINKNFSITKNLTFNRIVTLKDKIK

SEQ ID NO: 67890 - DNA, 1683 bp, Chromobacterium violaceum
  CDS (1)..(1683): transl_table=11
atgagcacggaaaacaacgcgccggttgtcaacaacttcattcgcagcatcatcgacgaggatttggccaccggccgccgcagctcggtggtgacccgcttcccgcccgagccgaacggcttcgcccacatcggccacgccaaggcgatctgcatcaacttcggcctggccgaggactacaacggccagtgcaatctgcgcatggacgacaccaatccggaaaaggaatcggacgagttcgtcgaggcgttcaagcaggacatctcctggctgggcttcaagtggaacggcgaggtgcgctacgcatccgactacttcgaccgcctgtacgactacgcggtggagttgatccaggccggcaaggcctacgtggacgacctgtccgccgaggaaatgcgccagtaccgcggcaatctgaccgagccgggcaagaacagcccctaccgcgaccgcacgccggaagagaacctggacctgttcacccgcatgaagaacggcgagttcccggatggcagcaagacgctgcgcctgaagatcgatatggcttccggcaacatcaatctgcgcgatccggccatctaccgtatccgccgcgtgcatcaccatcgcactggggacaagtggtgcatctacccgatgtacgactacacccactgcatctccgacgcgatcgagggcatcacccattcgctgtgctcgctggagttcgaggaccaccgcccgctgtacgactgggtgctggacaacatcagcatcgagcaccatccgcagcagatcgaattctcgcgcctggaactgctgtacgcgctgacctccaaacgcaagctgcaggcgctggtcaacgacggcgccgtcaccggctgggacgatccgcgcatgcccaccatcgccggcatgcgccgccgcggctacagcccggccggcatcaagctgttcgcccagcgcatcggcgtgtcgaagagcgaaaacatcatcgacatggccatcctggaaggcgcggtgcgcgagacgctggaaaacgattcgccgcgcgtgatggccgtggtcaatccgctgaaagtgacgctgaccaactacgacgccgccgtcaccgccagccgcagcgcgccgttccacccgcaccatccggaattcggcgagcgcgacgtgccgatcgcccgcgagatctggatcgagcgcgacgacttcgccgaaacgccgccgccgaagtggcagcgcctgaccgccggcggcgaagtgcgcctgcgctactcgtacgtgatcaagtgcgacgaggtggtgaaggacgccgccgacgagatcgtcgagctgaagtgctcgatcgaccacgacacgctgggcaagaacccggaaggccgcaaggtcaagggcgtgatccactgggtgtcggccgagcatgcgatccaggccgacgtgcgctggtacgagcgcctgttcaccgagcagcgtccggacgcggtgcgcggcgaggacggcgaatacgtcgatttccgccagttcctgaacccggagtcgctgaaactggtgccggcctatgtcgaggcctcggtgctgcaggcggagccggagtcgcgtttccagttcgagcgtctgggctacttcgtcaccgaccgctacgagcaccggaagggcgacaaggcggtgttcaaccgcaccgtcgggctgaaagacagctggaagtaa

SEQ ID NO: 67891 - protein, 560 aa, Chromobacterium violaceum
MSTENNAPVVNNFIRSIIDEDLATGRRSSVVTRFPPEPNGFAHIGHAKAICINFGLAEDYNGQCNLRMDDTNPEKESDEFVEAFKQDISWLGFKWNGEVRYASDYFDRLYDYAVELIQAGKAYVDDLSAEEMRQYRGNLTEPGKNSPYRDRTPEENLDLFTRMKNGEFPDGSKTLRLKIDMASGNINLRDPAIYRIRRVHHHRTGDKWCIYPMYDYTHCISDAIEGITHSLCSLEFEDHRPLYDWVLDNISIEHHPQQIEFSRLELLYALTSKRKLQALVNDGAVTGWDDPRMPTIAGMRRRGYSPAGIKLFAQRIGVSKSENIIDMAILEGAVRETLENDSPRVMAVVNPLKVTLTNYDAAVTASRSAPFHPHHPEFGERDVPIAREIWIERDDFAETPPPKWQRLTAGGEVRLRYSYVIKCDEVVKDAADEIVELKCSIDHDTLGKNPEGRKVKGVIHWVSAEHAIQADVRWYERLFTEQRPDAVRGEDGEYVDFRQFLNPESLKLVPAYVEASVLQAEPESRFQFERLGYFVTDRYEHRKGDKAVFNRTVGLKDSWK

SEQ ID NO: 67892 - DNA, 1659 bp, Clostridium perfringens
  CDS (1)..(1659): transl_table=11
atgtcaaatgctgagcactcatcaaactttataagaaatataataatagatgatttagatagcaaaaaacatgatacaataataactcgttttccacctgaacctaatggatatttacatataggtcatgcaaagtctatagttttaaactttgaattaggaaaagagtttaacggaagaactaacctaagatttgatgatacaaatccaactaaagaggatactgaatacgttgaatctattaaagaagatgttcattggttaggttataactggagcgaattacattttgcatcaaactactttgatgaaatgtataaaagagctctacttttaattaaaaaaggtaaagcttatgtttgtgatttaactccagaagaaataaaagaatatagaggtactcttactgagcctggtaaggaaagtccatatagaaatagatcaattgaagaaaacttagatctatttgaaagaatgagaaaaggtgaatttgaggacggttcaaaagttttaagagctaaaatagatatgagctcacctaacataaactttagagatcctataatttatagaattgctcatgctagtcaccataatacaggtgataaatggtgtatctaccctatgtatgactttgctcatccattagaagatgctattgaaggaataactcactctatttgtactttagaatttgctgatcacagaccattatatgattggttcgttaaagaatgtgaaatggaaagtgttccaagacaaattgagtttgcaagacttaatatcacaaacactgttatgagtaaaagaaagttaaagcaattagttgatgaaggcatagttgatggttgggatgacccaagaatgcctactgttgctggacttagaagaagaggttatactcctaagtcaataagaaacttctgtaaagctataggagttgctaaggcagattctactgttgattctcaaatgcttgagcatttcataagagaagaccttcaagaaactgctccaagagctatggctgttataaatccacttaaattagttataacaaactatcctgaaggagaatcagaaattcttgaaatagaaaataatcctaaagatgaatcagctggtaaaagagctgttacattctcaagagaagtttatattgaaagagaagatttcatggaaaatcctccaaagaaatatttcagattattcccaggaaacgaagtaagattaaaaggtgcttattttgtaaaatgtaacgaagtaataaaagatgaaaatggggaagttacagaaattcactgtacttatgacccagaaactaagagtggaactggatttactggaagaaaagttaaaggaacaatccactgggttgatgctaataactgtattcctgctgaatttagattatatgaaccattaatcttagatgattgtgaagaaaatgaaggaaagcacttccttgagcaaataaatcctaactcattaactatatgtaagggattcattgaaccaagcgctaaagatgctaaacctcaagataaatatcaattatttagacatggttacttcaatgttgatcctaatttcacaagtgatgataatttagtattcaacagaatagtttcattaaagagttcatttaaattaaaataa

SEQ ID NO: 67893 - protein, 552 aa, Clostridium perfringens
MSNAEHSSNFIRNIIIDDLDSKKHDTIITRFPPEPNGYLHIGHAKSIVLNFELGKEFNGRTNLRFDDTNPTKEDTEYVESIKEDVHWLGYNWSELHFASNYFDEMYKRALLLIKKGKAYVCDLTPEEIKEYRGTLTEPGKESPYRNRSIEENLDLFERMRKGEFEDGSKVLRAKIDMSSPNINFRDPIIYRIAHASHHNTGDKWCIYPMYDFAHPLEDAIEGITHSICTLEFADHRPLYDWFVKECEMESVPRQIEFARLNITNTVMSKRKLKQLVDEGIVDGWDDPRMPTVAGLRRRGYTPKSIRNFCKAIGVAKADSTVDSQMLEHFIREDLQETAPRAMAVINPLKLVITNYPEGESEILEIENNPKDESAGKRAVTFSREVYIEREDFMENPPKKYFRLFPGNEVRLKGAYFVKCNEVIKDENGEVTEIHCTYDPETKSGTGFTGRKVKGTIHWVDANNCIPAEFRLYEPLILDDCEENEGKHFLEQINPNSLTICKGFIEPSAKDAKPQDKYQLFRHGYFNVDPNFTSDDNLVFNRIVSLKSSFKLK

SEQ ID NO: 67894 - DNA, 2337 bp, Drosophila melanogaster
  CDS (1)..(2337)
atggctggagatgatctgattgcgaaattccaggcgctcggcatgagcgagcaaaaggcgaaggaaactttgaagaatgccaacgtgacaaagaatctccagctgtcgctggcggcggcgggaagcgccaccctatccgacggcactggtatgctgatctaccacatggctaccaagctgaagccgcagactgcggaccatctgcctcttctggtgcgctacatagtggagcacaagctggacaacactcagcgcgttgatgccgccctggagtacctgctcaagtgcggtcagagcctgaatgccaacatagatctgcaggcgcttgagaaggagtgcggcgttggagtggtggtcactccggagcagatcgagcgcactgtgcaggccaagatcaaggccagctacaaggaggccttgttggagcaacgctaccattttaactcttttaaaatcctgcaagatgtccggggagaactcaagtgggcggatgccaagtccgtgaaggcggccatcgatgtggagatcttcgatctgttgggtcccaaaacagaagcagacttgaaacctcagacaaaagcaaacgataagccgaaggctgcaaaaccgaaagctgaagtaactcctgccgctcaaacggctgaagctgcatccgatggagccaccaccatttcggaactcatgaaaaccaaggtacacttccatgctcccggagagaacttcaaggcagatggctacgtggtcaccgagcacacggagcggctactaaaggagcacctggcgagaactggaggcaaagtgcacacacgatttccgccagagccgaatggcatcctgcacatcggtcacgcaaaggctattaacattaactttggatacgcggctgcccacgatggagtctgttacttgcgctacgacgacaccaatcccgagaaggaggaggagaagttctttttggccatcaaggagatggtggaatggctgggctacaaaccattcaagatcacctactcctcggacaacttccagcagctgtacgagtgggctgttgtgctgattaacaaaggattggcctacgtgtgtcaccagaaggcggaggaactgaaaggcttcaatccgaagcccagcccttggagggagcgtcccattgaggagtcacttcggctgtttgaagacatgaagcgtggaaagatcgacgagggagcggccacactgcgcatgaaggtcaccctggaggagggcaagatggacccggtggcgtatcgcattaagtttatctcacaccaccgtacgggctctgactggtgcatttaccccacgtatgattatactcattgcctttgtgactctctcgaggatataacccactcactgtgcaccaaggagttccagtcgagacgatcctcctactactggctgtgcaacgctttgggtatctactgcccggtgcagtgggaatacggtaggctgaacatgaactacgcacttgtgtcaaagcgcaagattgcaaagctgatcacggagcagattgtccacgactgggacgatcccaggctgtttactctgacggctctgagacgtagaggcttcccagcagaggccatcaacaacttctgcgcccagatgggcgtaacgggtgcccagatcgccgtcgaccccgccatgttggaggcagcagtgcgggatgtgctaaatgttacagctccccgtcggttggttgtcctggaaccgctcaaagttaccataaagaatttccctcatgcagcgcccgtgcagctagaagtgcctgatttcccgcaaaacccacagcaaggaactcataagatcaccctagacaaggtgatctatattgagcagggagacttcaagttggagcctgaaaagggataccgtcgtctggcaccgaagcaatctgtgggtctccggcacgcgggtctcgtaatcagcgtggatgagatagtaaaggatccggcgactggtcaggtggtggaactaatctgcaccagccaacctgccgagcaggccgagaagcccaaggcttttgtccagtgggtatcgcagccgatacagctggaagtgcgtctgtacgagcagctcttcaagcacaagaatcccgaggatcccaacgaggtgcccggcggtttcctgagcgacatcagtgagcaatccatgtcggtggtggtggcattcgcggatcgggccctaaaccaggccaaggtttacgacaagttccagttcgagaggattggcttcttctccgtagatcctgacaccagtgcgaaccacctagtgttcaaccgcactgtgggattgaaggaagatgcgggcaagaagtga

SEQ ID NO: 67895 - protein, 778 aa, Drosophila melanogaster
MAGDDLIAKFQALGMSEQKAKETLKNANVTKNLQLSLAAAGSATLSDGTGMLIYHMATKLKPQTADHLPLLVRYIVEHKLDNTQRVDAALEYLLKCGQSLNANIDLQALEKECGVGVVVTPEQIERTVQAKIKASYKEALLEQRYHFNSFKILQDVRGELKWADAKSVKAAIDVEIFDLLGPKTEADLKPQTKANDKPKAAKPKAEVTPAAQTAEAASDGATTISELMKTKVHFHAPGENFKADGYVVTEHTERLLKEHLARTGGKVHTRFPPEPNGILHIGHAKAININFGYAAAHDGVCYLRYDDTNPEKEEEKFFLAIKEMVEWLGYKPFKITYSSDNFQQLYEWAVVLINKGLAYVCHQKAEELKGFNPKPSPWRERPIEESLRLFEDMKRGKIDEGAATLRMKVTLEEGKMDPVAYRIKFISHHRTGSDWCIYPTYDYTHCLCDSLEDITHSLCTKEFQSRRSSYYWLCNALGIYCPVQWEYGRLNMNYALVSKRKIAKLITEQIVHDWDDPRLFTLTALRRRGFPAEAINNFCAQMGVTGAQIAVDPAMLEAAVRDVLNVTAPRRLVVLEPLKVTIKNFPHAAPVQLEVPDFPQNPQQGTHKITLDKVIYIEQGDFKLEPEKGYRRLAPKQSVGLRHAGLVISVDEIVKDPATGQVVELICTSQPAEQAEKPKAFVQWVSQPIQLEVRLYEQLFKHKNPEDPNEVPGGFLSDISEQSMSVVVAFADRALNQAKVYDKFQFERIGFFSVDPDTSANHLVFNRTVGLKEDAGKK

SEQ ID NO: 67896 - DNA, 1665 bp, Escherichia coli O6
  CDS (1)..(1665): transl_table=11
atgagtgaggcagaagcccgcccgactaactttattcgtcagatcatcgatgaagatctggccagtggtaagcacaccacagtacacacccgtttcccgccggagccgaatggctatctgcatattggccatgcgaaatctatctgcctgaacttcgggatcgcccaggactataaaggccagtgcaacctgcgtttcgacgacactaacccggtaaaagaagatatcgagtatgtcgattcgatcaaaaacgacgtagagtggttaggtttccactggtctggtaacgtccgttactcctccgattattttgatcagctccacgcctatgcgatcgaactgatcaataaaggcctggcgtacgttgatgaactgacgccggaacagatccgcgaataccgcggcaccttgacgcagccgggtaaaaacagcccgtaccgcgatcgcagcgttgaagagaacctggcgctgttcgagaaaatgcgtaccggcggttttgaagaaggtaaagcctgcctgcgtgcgaagatcgacatggcttcgccgtttatcgtgatgcgcgatccggtgctgtaccgcattaagtttgctgaacaccaccagactggcaacaagtggtgcatctacccgatgtacgatttcacccactgcatcagcgatgcgctggaaggtattacgcactctctgtgtacgcttgagttccaggacaaccgccgtctgtacgactgggtactggacaacatcaccattcctgttcacccgcgccagtacgaattctcgcgcctgaatctggaatacactgtgatgtccaagcgtaagctgaacctgctggtgaccgacaagcacgttgaaggctgggatgacccgcgtatgccgaccatttctggtctgcgtcgtcgtggttacactgcggcttctattcgtgagttctgcaaacgcattggtgtgaccaagcaggacaacaccattgagatggcgtcactggaatcctgcatccgtgaagatctcaacgaaaatgcgccgcgcgcaatggcggttatcgatccggtgaaactggttatcgaaaactaccagggcgaaggcgaaatggttaccatgccgaaccatccgaataaaccggaaatgggcagccgtcaggtgccatttagcggtgagatttggatcgatcgcgccgatttccgcgaagaagctaacaagcagtacaaacgtctggtgctgggtaaagaagtgcgtctgcgtaatgcttacgtcattaaggcagaacgcgtggagaaagatgccgaaggcaatatcaccaccatcttctgtacttatgacgccgacaccttaagcaaagatccggcagatggtcgtaaagtcaaaggtgttattcactgggtgagcgcggcacatgcgctgccggttgaaatccgcctgtacgatcgtctgttcagcgtgccgaaccctggtgctgcggatgatttcctgtcggtgattaacccggagtcgctggtgatcaaacagggctttgctgaaccgtcgctgaaagatgcggttgcgggtaaagcattccagtttgagcgtgaaggttacttctgcctcgacagccgccattctacggcggaaaaaccggtatttaaccgcaccgttgggctgcgtgatacctgggcgaaagtaggcgagtaa

SEQ ID NO: 67897 - protein, 554 aa, Escherichia coli O6
MSEAEARPTNFIRQIIDEDLASGKHTTVHTRFPPEPNGYLHIGHAKSICLNFGIAQDYKGQCNLRFDDTNPVKEDIEYVDSIKNDVEWLGFHWSGNVRYSSDYFDQLHAYAIELINKGLAYVDELTPEQIREYRGTLTQPGKNSPYRDRSVEENLALFEKMRTGGFEEGKACLRAKIDMASPFIVMRDPVLYRIKFAEHHQTGNKWCIYPMYDFTHCISDALEGITHSLCTLEFQDNRRLYDWVLDNITIPVHPRQYEFSRLNLEYTVMSKRKLNLLVTDKHVEGWDDPRMPTISGLRRRGYTAASIREFCKRIGVTKQDNTIEMASLESCIREDLNENAPRAMAVIDPVKLVIENYQGEGEMVTMPNHPNKPEMGSRQVPFSGEIWIDRADFREEANKQYKRLVLGKEVRLRNAYVIKAERVEKDAEGNITTIFCTYDADTLSKDPADGRKVKGVIHWVSAAHALPVEIRLYDRLFSVPNPGAADDFLSVINPESLVIKQGFAEPSLKDAVAGKAFQFEREGYFCLDSRHSTAEKPVFNRTVGLRDTWAKVGE

SEQ ID NO: 67898 - DNA, 1671 bp, Haemophilus ducreyi
  CDS (1)..(1671): transl_table=11
atgagcgaagaaactttaacaactgaggttgaaactaggaccaattttattactcatattattgatgaagatttagccagtggtaaacataataatgtttatactcgtttcccaccagaaccaaatggttatttacatatcggccacgctaaatcaatctgtttaaactttggtatcgctcaagaatatcatggcaaatgtaatttacgttttgatgatactaaccctgttaaagaagacattgaatatgttgcgtcaattaaacaagatgttgaatggttaggctttaagtggcaaggtgagccacgctatgcctcagattattttgatcaattacatggctatgccattgaattaattgaaaaaggattagcttacgttgatgagctatcgccagaagaaatgcgcgaatatcgtggtacgctcactgaagcgggtaaaaatagcccatatcgcgaccgcagtattgctgaaaacttagcattattcgagaaaatgaaaaatggtgagtttaaagaaggtacagcttgtttaagagccaaaattgatatggcttctcctttcattgtaatgcgagatcctgttctttaccgtgttaaatttgcacatcatcaccaaactggcgataaatggtgtatttatccaatgtatgatttcacacattgtatttcagatgcgattgaacgcattacgcactcactttgtacacttgaattccaagataatcgccgtttatatgattgggtattagagaatatttcgattgaacgcccattaccacatcaatatgaattttcacgcttaaatttggaaggcacattaacttcaaaacgtaaattgttacaattagtcacagatggaattgtcgatggttggaatgatccacgtatgcccaccatttcaggcttacgtcgacgcggctatactccggcttctctgcgtgaattttgtcgccgaattggcgttaccaaacaagataatgttgttgaatacgctgcgttagaagcctgtattcgtgaagacttaaatgagaatgctccgcgtgcaatggcggtaattaatcctgtacgtgtagttattgaaaacgttgctgaaccagaaatattaaaagcaccaaaccatcctaatcgaccagagctaggcgaacgtgatctaccttttacccgtgaaatatatatcgatgaagcagatttccgtgaagaagccaataagcaatataagcgtttagtcttaggtaaagaggttcgtttacgcaatgcctatgttattaaagcagaacgtgttgaaaaagatgcaagcggtaaaattactactattttttgtagttatgatcctgaaacattaggcaaaaaccctgcagacggtcgtaaagtcaaaggcgttattcattgggtttctgcgacacaaaataaagttgctgaatttcggatttataaccgcttgtttaatgtagcaaatcccggagatgaagaagatattaatgcagtgataaatccatcttcattaatcgttaaacatggttttgttgaagttaatttggcaaatgctcaaaaagaacaaggctatcaatttgaacgggaaggctattattgtttagacagtaaagagggttcagccgataacttaatctttaacttaaccgttagcctaaaagaaggttttacggcataa

SEQ ID NO: 67899 - protein, 556 aa, Haemophilus ducreyi
MSEETLTTEVETRTNFITHIIDEDLASGKHNNVYTRFPPEPNGYLHIGHAKSICLNFGIAQEYHGKCNLRFDDTNPVKEDIEYVASIKQDVEWLGFKWQGEPRYASDYFDQLHGYAIELIEKGLAYVDELSPEEMREYRGTLTEAGKNSPYRDRSIAENLALFEKMKNGEFKEGTACLRAKIDMASPFIVMRDPVLYRVKFAHHHQTGDKWCIYPMYDFTHCISDAIERITHSLCTLEFQDNRRLYDWVLENISIERPLPHQYEFSRLNLEGTLTSKRKLLQLVTDGIVDGWNDPRMPTISGLRRRGYTPASLREFCRRIGVTKQDNVVEYAALEACIREDLNENAPRAMAVINPVRVVIENVAEPEILKAPNHPNRPELGERDLPFTREIYIDEADFREEANKQYKRLVLGKEVRLRNAYVIKAERVEKDASGKITTIFCSYDPETLGKNPADGRKVKGVIHWVSATQNKVAEFRIYNRLFNVANPGDEEDINAVINPSSLIVKHGFVEVNLANAQKEQGYQFEREGYYCLDSKEGSADNLIFNLTVSLKEGFTA

SEQ ID NO: 67900 - DNA, 1674 bp, Haemophilus influenzae
  CDS (1)..(1674): transl_table=11
atgatgagccatacagagacatctttgggtgcagaaaatacccgcactcataattttattacccaaattattgatgaagatttagcttcgggtaaacataaaagcgttcatacccgttttccgccagagccgaatggttatttgcatattggtcacgcaaagtctatttgcttgaattttggcttggcaaaagaataccaaggtttatgtaacctacgttttgacgataccaatccagtaaaagaagacgtggaatatgtagattctatcaaagcggatgtggaatggttaggttttaaatgggagggcgaaccgcgttatgcatctgattacttcgatgcgctttatggctatgccgttgaattaattaaaaaaggtttggcttatgttgatgagctttctccagatgaaatgcgtgaatatcgtggtaccttaaccgaacctggtaaaaacagcccatatcgtgaccgcactattgaagaaaacttagcgttatttgaaaaaatgaaaaatggcgaatttgccgagggtaaagcaagtttacgtgcaaaaattgatatggcttcgccatttatggtcatgcgtgaaccagtaatttatcgtattaaattctctagccatcaccaaacaggtgacaaatggtgtatttacccaatgtacgatttcacgcactgtatctctgatgcgattgagcgtattacacactcaatctgtacattagaattccaagataaccgtcgtttatatgactgggtgttggaaaatatcagtattgaacgtccattaccgcatcaatatgaattctcacgtttgaatttagaaggcactttaacctctaaacgtaaattattgaaattggtaaatgatgaaatcgtggatggttggaacgatccacgtatgccaaccatttcaggtttacgccgtcgtggttatacaccagcttcgttacgtgaattttgtcgtcgtatcggtgtgactaaacaagataacgtcgtagagtattcagcacttgaagcctgcattcgtgaggatttaaatgaaaatgcaccacgcgcaatggcagtgattgatcctgttcgtgtggtaattgaaaattttgaaagcgaagcggttttaactgccccaaatcatccaaatcgtcctgaattaggggaacgtcaattgccgttcacgaaagaactttatattgatcgagctgacttccgtgaagaagcgaacaaacaatataaacgcttagtattaggcaaagaagtgcgtttgcgtaatgcttatgtgattaaagctgaacgtgtagaaaaagatgcaaatggtgaaatcaccacgatcttctgtacttacgatcctgaaactttaggtaaaaatccagcagatggacgtaaagtgaaaggtgtcattcattgggtttctgcggttaataatcatccagctgaattccgtttgtatgatcgcttatttactgtgccaaatccaggggctgaagatgatatcgaaagcgtgttaaacccaaattctttagtgataaaacaaggttttgtagagcaaagcctcgcaaatgcagaagcagagaaaggctaccaatttgaacgtgagggttatttctgtgcagatagtaaagatagccgacctgaacatttggtatttaacttaacagtaagcttaaaagaaggcttctaa

SEQ ID NO: 67901 - protein, 557 aa, Haemophilus influenzae
MMSHTETSLGAENTRTHNFITQIIDEDLASGKHKSVHTRFPPEPNGYLHIGHAKSICLNFGLAKEYQGLCNLRFDDTNPVKEDVEYVDSIKADVEWLGFKWEGEPRYASDYFDALYGYAVELIKKGLAYVDELSPDEMREYRGTLTEPGKNSPYRDRTIEENLALFEKMKNGEFAEGKASLRAKIDMASPFMVMREPVIYRIKFSSHHQTGDKWCIYPMYDFTHCISDAIERITHSICTLEFQDNRRLYDWVLENISIERPLPHQYEFSRLNLEGTLTSKRKLLKLVNDEIVDGWNDPRMPTISGLRRRGYTPASLREFCRRIGVTKQDNVVEYSALEACIREDLNENAPRAMAVIDPVRVVIENFESEAVLTAPNHPNRPELGERQLPFTKELYIDRADFREEANKQYKRLVLGKEVRLRNAYVIKAERVEKDANGEITTIFCTYDPETLGKNPADGRKVKGVIHWVSAVNNHPAEFRLYDRLFTVPNPGAEDDIESVLNPNSLVIKQGFVEQSLANAEAEKGYQFEREGYFCADSKDSRPEHLVFNLTVSLKEGF

SEQ ID NO: 67902 - DNA, 2877 bp, Lupinus luteus
  CDS (163)..(2547)
gaatccgtgtctcatcccttaaacgcaaacacaataaggcccgctgattctcctgttcttaacataaagtaaaacgttaaaaagctgactcattcacactcaccaaaaccctaaattccctttcacttcaatctcaatccatttccccttttcactgagaaaatgccggcgaaggatgacacctcctccgataaggagaagtctttggaactgtttctcaagatcggattagacgagcgcactgccaaaaacaccgtcgctaacaacaaagtcaccaccaatctcacttccgttatcaacgatgctggtgttaccgatggatgcagccgcactgttggaaaccttctttacacggttgcgacgaagtaccctgcaaatgccttgccacatcgcccaacattgctgcaatatattgttaattcaaaggtgaaaacaacagcacagttagacgcggcactatcttttctcagtgccacgggttcggagaatcttgatttgaacaagtttgaagaagcttgtggtgttggtgtcgaggtttcaacagaagatatcaaacatgctgttgatgaagttgttgaagagaataaggctacaattttggagctacgttatcgagtgaacgtgggtgagttacttgggcatgtccggaagaggctcccatgggctgatgcaaaagttgtcaagcaactagttgatgcaaaattatatgagatacttggtgataggacagcagcagataatgaaaagcctaaaaagaagaaagagaaacctgctaaagtagaggacaaggcagctcctgttgctacttccgaaaagccacttgaagaagatctgaatccatatttgatattccctaacccggaggacaactttaaggtgcatactgaagtaccttttagtgatggtaatattctgagatgttgcaatacaaaggcactccttgaaaaacacctgaaagcaacaggtggcaaagttttgacccgctttcctcctgaaccaaatggatatttgcatattggtcatgccaaggcaatgtttgttgattttgggttggcgaaagatagaaatggagggtgttatttgaggtttgatgatacaaatcctgaagcagaaaagaaagagtatattgatcacattgaagaaattgtccagtggatgggctgggaaccattcaagattacttacaccagtaattacttccaagaattgtatgaatttgccgtggaacttataagaaggggtcatgcttatgttgatcatcagacggcagatgagataaaggagtatagggagaagaaattaaacagtccttggagggatcgaccaatttcagaatcattgaaactctttgaggatatgaggcgtggctttatagaagaaggaaaagcgacacttagaatgaagcaagacatgcagagtgataactacaatatgtatgaccttattgcataccgtattaagtttactccacaccctcatgctggagacaaatggtgtatctatccaagctatgactatgctcactgcattgtagattctattgagaatgtcacgcattcactgtgtactcttgagtttgagacacgtcgtgcatcgtactattggttgttacatgcgttgggcatctaccaaccatatgtatgggaatattcaaggttgaatgtctcaaacacagttatgtcaaagcgtaagctaaatcgtttggtgacagagaagtgggttgatgggtgggatgatcctcgtctgatgacactagctggtttgcggcgtagaggcatgactcccactgcaatcaatgcctttgtccgaggaatgggaatcactagaagtgacggcactttgatatctgtggaacgtcttgagtatcatgttagggaagaattgaataaaacagctcctcgtgcaatggttgtcctgcatccactcaaggttgtcattactaatcttgaagccaaatcagcaattgaggttgatgcaaagaaatggcctgatgctcaagctgatgatgcttctgctttctacaagattccattttccaatgttgtatatattgaacgttcggatttccggatgcaagattcaaaagattattatggccttgctcctggcaaatctgtgatactcagatatgcatttcctataaagtgcactgaagttattctagctgatgataatgagaccattcttgaaattcgggctgagtatgatccttcaaagaagacaaagcctaagggtgtgcttcattgggtttctcaaccttctccgggagttgatccattaaaggtggaagtgaggttgtttgagaggctattcctatcagagaatcctgctgaacttgacaactggctcggggacctaaaccctcattccaaagtggaaatttcgaatgcatatggtgtgtccttgctgaaggatgcaaaactcggggacaggttccagtttgaaagattaggatattttgcagtcgaccaggactctaccccagaaaaacttgtatttaatcggactgtcacccttaaagacagctatggtaagggcggaaagtagggttcatgaatgatattagaagtaaaatcaaggcactgtctaggtaatactttctcagatttcagataatcacttttgatataaaatagtttttttgttggatttgcacaaacacactagatctttattggcccgtgtttaaaaggtccaaatatctacctctgttgtggtttttgtagtttgaaaattaattttgtttactcagtgaagtactactaacattaatgttgttttcatactacttaacaaggagactgggttaagagtgtaaaaaagaatcattccctttcctaagcatatatttatacatttaaataaaaaaaaaaaaaa

SEQ ID NO: 67903 - protein, 794 aa, Lupinus luteus
MPAKDDTSSDKEKSLELFLKIGLDERTAKNTVANNKVTTNLTSVINDAGVTDGCSRTVGNLLYTVATKYPANALPHRPTLLQYIVNSKVKTTAQLDAALSFLSATGSENLDLNKFEEACGVGVEVSTEDIKHAVDEVVEENKATILELRYRVNVGELLGHVRKRLPWADAKVVKQLVDAKLYEILGDRTAADNEKPKKKKEKPAKVEDKAAPVATSEKPLEEDLNPYLIFPNPEDNFKVHTEVPFSDGNILRCCNTKALLEKHLKATGGKVLTRFPPEPNGYLHIGHAKAMFVDFGLAKDRNGGCYLRFDDTNPEAEKKEYIDHIEEIVQWMGWEPFKITYTSNYFQELYEFAVELIRRGHAYVDHQTADEIKEYREKKLNSPWRDRPISESLKLFEDMRRGFIEEGKATLRMKQDMQSDNYNMYDLIAYRIKFTPHPHAGDKWCIYPSYDYAHCIVDSIENVTHSLCTLEFETRRASYYWLLHALGIYQPYVWEYSRLNVSNTVMSKRKLNRLVTEKWVDGWDDPRLMTLAGLRRRGMTPTAINAFVRGMGITRSDGTLISVERLEYHVREELNKTAPRAMVVLHPLKVVITNLEAKSAIEVDAKKWPDAQADDASAFYKIPFSNVVYIERSDFRMQDSKDYYGLAPGKSVILRYAFPIKCTEVILADDNETILEIRAEYDPSKKTKPKGVLHWVSQPSPGVDPLKVEVRLFERLFLSENPAELDNWLGDLNPHSKVEISNAYGVSLLKDAKLGDRFQFERLGYFAVDQDSTPEKLVFNRTVTLKDSYGKGGK

SEQ ID NO: 67904 - DNA, 1722 bp, Neisseria meningitidis serogroup A
  CDS (34)..(1722): transl_table=11
atgccgtctgaagccatctgttcaaagaaaactatgctcaataaagaccaatttgcggacaaccattttatccgcaccatcatcgaagacgacctcaaaagcggcaaacacgaagccgtccaaacccgttttccgccggagcccaacggttacctgcacatcggacacgccaaatccatctgcctgaacttcggtttggcgtatatttacgacggcttgtgcaacctgcgttttgacgataccaaccccgaaaaagaaaacgacgaatacgtcaacgccatcaaagaagatgtcgagtggctcggtttccattgggcgggcgagccgcgtttcgcttccaactatttcgaccagctttatgactacgccgtcggtttgattaaagacggcaaagcgtatgtcgatgatttgacgcccgaagaaatgcgcgaataccgcggtacgctgaccgaagcgggtaaaaacagcccttaccgcgaccgcagcgtcgaagaaaacctcgacctgttcacacgcatgaaaaacggcgagttccccgacggcagcaaaaccctgcgcctgaaaatcgacatggcatcgggcaacatcaatatgcgcgaccccgtcatctaccgcatccgccgcgcccatcaccacaacaccggcgacaaatggtgtatctacccgatgtacgactacacgcattgcatctccgatgccatcgaaggcatcacgcattccttgtgtacgctcgaatttgaagcacaccgtccgctgtacgactgggtgttggataacatccacgcgccgcatgccacccgtccgcgccaatacgagttttcccgtttggagcttttgtacaccattacctccaaacggaaattgaatcagttggttgtggaaaaacacgtttccggctgggacgatccgcgtatgccgactatttccggtatgcgccgacgcggctacacgcccgaaggcctgcgtctgtttgccaaacgcgccggtatttccaaatctgaaaacatcgtcgatatgagcgtgttggaaggcgcgattcgcgaagagttggaaaattccgccccacgcctgatggcggtgttgaacccgctcaaagtgaccctgaccaactttgaagccggcagaacccaaagccgccgtgccgcgttccatccgaaccacgaggaaatgggcgagcgcgaagtacctatttcacaaaccatctatattgaagccgacgactttgccgaaaatccgcccaaaggcttcaaacgcctgattcccggcggcgaagtacgcttgcgccacggctatgtcatcaagtgcgatgaagtcgtcaaagacgaagcaggcaatgtggttgaactcaaatgcagcatcgaccacgacaccttgggcaaaaatccagaaggccgtaaagttaaaggcgtgattcattgggtttccgccgaacacgccgccgaaatcaaagtccgtctgtacgaccgcctctttaccatcgagcgtcccgatgccgtgcgcggcgaagacggcgaatacctgccgttcaccgatttcctcaatccggaatccgtcaaggaaatcaccgcctacgccgaacctgccgccaaagatttgccggcagaaagccgttggcagttcgagcgtatcggctacttcgtaaccgaccgtaaagaccacggcaaagacacgccggtgtttaaccgcacggtcacgctgaaagattcttggcagcctaagtaa

SEQ ID NO: 67905 - protein, 562 aa, Neisseria meningitidis serogroup A
MLNKDQFADNHFIRTIIEDDLKSGKHEAVQTRFPPEPNGYLHIGHAKSICLNFGLAYIYDGLCNLRFDDTNPEKENDEYVNAIKEDVEWLGFHWAGEPRFASNYFDQLYDYAVGLIKDGKAYVDDLTPEEMREYRGTLTEAGKNSPYRDRSVEENLDLFTRMKNGEFPDGSKTLRLKIDMASGNINMRDPVIYRIRRAHHHNTGDKWCIYPMYDYTHCISDAIEGITHSLCTLEFEAHRPLYDWVLDNIHAPHATRPRQYEFSRLELLYTITSKRKLNQLVVEKHVSGWDDPRMPTISGMRRRGYTPEGLRLFAKRAGISKSENIVDMSVLEGAIREELENSAPRLMAVLNPLKVTLTNFEAGRTQSRRAAFHPNHEEMGEREVPISQTIYIEADDFAENPPKGFKRLIPGGEVRLRHGYVIKCDEVVKDEAGNVVELKCSIDHDTLGKNPEGRKVKGVIHWVSAEHAAEIKVRLYDRLFTIERPDAVRGEDGEYLPFTDFLNPESVKEITAYAEPAAKDLPAESRWQFERIGYFVTDRKDHGKDTPVFNRTVTLKDSWQPK

SEQ ID NO: 67906 - DNA, 1689 bp, Neisseria meningitidis serogroup B
  CDS (1)..(1689): transl_table=11
atgctcaataaagaccaatttgcggacaaccattttatccgcaccatcatcgaagaagacctcgaaagcggcaaacatacagctgtccaaacccgtttcccgcccgaacccaacggctacctgcacatcggacacgccaaatccatctgcctgaacttcggtttggcgtatatttacgacggcttgtgcaacctgcgttttgacgataccaaccccgaaaaagaaaacgacgaatacgtcaacgccatcaaagaagatgtcgagtggctcggtttccattgggcgggcgagccgcgtttcgcttccaactatttcgaccagctttatgactacgccgtcggtttgattaaagacggcaaagcgtatgtcgatgatttgacgcccgaagaaatgcgcgaataccgcggtacgctgaccgaagcgggtaaaaacagcccttaccgcgaccgcagcgtcgaagaaaacctcgacctgttcacacgcatgaaaaacggcgagttccccgacggcagcaaaaccctgcgcctgaaaatcgacatggcatcgggcaacatcaatatgcgcgaccccgtcatctaccgcatccgccgcgcccatcaccacaacaccggcgacaaatggtgtatctacccgatgtacgactacacgcattgcatctccgatgccatcgaaggcatcacgcattccttgtgtacgctcgaattcgaagcacaccgtccgctgtacgactgtgtgttggacaacattcctgcgccgcatgccacccgtccgcgccaatacgagttttcccgtttggagcttttgtacaccattacctccaaacggaaattgaatcagttggttgtggaaaaacacgtttccggctgggacgatccgcgtatgccgaccatttccggtatgcgccgacgcggctacacgcccgaagggctgcgcctgtttgccaaacgcgccggtatttccaaatctgaaaacatcgtcgatatgagcgtgttggaaggcgcgattcgcgaagagttggaaaattccgccccacgcctgatggcggtgttgaacccgctcaaagtgaccctgaccaactttgaaaccggcagaacccaaagccgccgtgccgcgttccatccgaaccacgaggaaatgggcgagcgcgaagtacctatttcccaaaccatctatattgaagccgacgactttgccgaaaatccgcccaaaggcttcaaacgcctgattcccggcggcgaagtacgcttgcgccacggctatgtcatcaagtgcgatgaagtcgtcaaagacgaagcaggcaatgtggttgaactcaaatgcagcatcgaccacgacaccttgggcaaaaatccagaaggccgtaaagttaaaggcgtgattcattgggtttccgccgaacacgccgccgaaatcaaagtccgtctgtacgaccgcctctttaccgtcgagcgtcccgatgccgtgcgcggcgaagacggcgaatacctgccgttcaccgatttcctcaatccggaatccgtcaaggaaatcaccgcctacgccgaacctgccgccaaagatttgccggcagaaagccgttggcagttcgagcgtatcggctacttcgtaaccgaccgtaaagaccacggcaaagacacgccggtgtttaaccgcacggtaacgctgaaagactcttggcagcctaagtaa

SEQ ID NO: 67907 - protein, 562 aa, Neisseria meningitidis serogroup B
MLNKDQFADNHFIRTIIEEDLESGKHTAVQTRFPPEPNGYLHIGHAKSICLNFGLAYIYDGLCNLRFDDTNPEKENDEYVNAIKEDVEWLGFHWAGEPRFASNYFDQLYDYAVGLIKDGKAYVDDLTPEEMREYRGTLTEAGKNSPYRDRSVEENLDLFTRMKNGEFPDGSKTLRLKIDMASGNINMRDPVIYRIRRAHHHNTGDKWCIYPMYDYTHCISDAIEGITHSLCTLEFEAHRPLYDCVLDNIPAPHATRPRQYEFSRLELLYTITSKRKLNQLVVEKHVSGWDDPRMPTISGMRRRGYTPEGLRLFAKRAGISKSENIVDMSVLEGAIREELENSAPRLMAVLNPLKVTLTNFETGRTQSRRAAFHPNHEEMGEREVPISQTIYIEADDFAENPPKGFKRLIPGGEVRLRHGYVIKCDEVVKDEAGNVVELKCSIDHDTLGKNPEGRKVKGVIHWVSAEHAAEIKVRLYDRLFTVERPDAVRGEDGEYLPFTDFLNPESVKEITAYAEPAAKDLPAESRWQFERIGYFVTDRKDHGKDTPVFNRTVTLKDSWQPK

SEQ ID NO: 67908 - DNA, 1680 bp, Pasteurella multocida
  CDS (1)..(1680): transl_table=11
atgagtcatccagttgaaaatgttgtcgcagctgaaaatacagaaaaacgtcccaccaattttattcgtcaaatcattgatgaagatttagcatccggcaaacataccggtgtccaaacacgttttccacctgaacccaatggctatttgcatattggtcatgccaaatcaatttgcttaaattttggtatcgctgaagattatcaagggttgtgtaatttacgtttcgatgatacgaatcccgtcaaagaagatgtggaatatgtggattcgattaaacaagatgtagaatggttaggtttcaagtgggaaggagagcctcgttatgcctccgactattttgatcaactctatggctatgcgattgagttaatcgaaaaagggttagcttatgtggatgaactttcgccagaagaaatgcgtgaataccgtggtacgttaacggaaccgggtaaaaatagcccttatcgtgatcgttctattgaagaaaacctcgcgttatttgagaaaatgaagaacggagaaattgcagaaggcaaagcctgtttacgtgcgaaaattgatatggcgtctccgtttattgtcatgcgcgatccagtaatttatcggattaaatttgcgacccatcaccaaacaggtgataaatggtgcatttacccaatgtatgattttactcattgtatctctgatgccattgagcgcattactcattcgctttgtacattggaattccaagataatcgtcgtttgtatgactgggtattagaaaatatttcgattgcgcgtccattgccgcaccagtatgagttttcacgtttaaatttagaatcgaccctcacttctaaacgtaaattattacaactggtgaatgaaggtattgtcgatggctggaatgacccacgtatgccaacgatttcgggcttacgtcgtcgtggttatacgccagcttcattgcgtgagttttgtcgtcgtattggcgtcactaaacaagataatatggtggaattcagtgcactagaagcttgcattcgtgaagacttaaatgagaatgcgccacgagcaatggcggtgattaatccacttaaaattgtgattgagaatttcagtggcaaagaaatgctgactgcaccaaaccaccctaatcgtgatgaactaggtgtacgcgaattaccctttacgcgtgaactatatattgatcaagcggatttccgtgaagaagcaaataaacaatataaacgcttagtgcttggtaaagaagtgcgtttacgtaatgcttatgtgattaaagccgaacgtgttgaaaaagatgcagaggagaatatcacaaccgtttattgtacttatgaccctgacacgctagggaaaaatccagcagatggacgtaaagtgaaaggcgtgattcaatgggtgtctgcggaagattatttaccagctgaatttcgtcaatatgggcgtttatttacggtggcaaacccaggagccgcagaggatattcaccaagtactgaacccagattcattggtgattaaacaaggtgtggtggagaagagtttagccaatgcacagccagaaaaagcttaccaatttgagcgtgaaggttattattgtgcagacagcaaagatagccgcccagatcatttggtcttcaatttaaccgtgagtttaaaagaaggcttctaa

SEQ ID NO: 67909 - protein, 559 aa, Pasteurella multocida
MSHPVENVVAAENTEKRPTNFIRQIIDEDLASGKHTGVQTRFPPEPNGYLHIGHAKSICLNFGIAEDYQGLCNLRFDDTNPVKEDVEYVDSIKQDVEWLGFKWEGEPRYASDYFDQLYGYAIELIEKGLAYVDELSPEEMREYRGTLTEPGKNSPYRDRSIEENLALFEKMKNGEIAEGKACLRAKIDMASPFIVMRDPVIYRIKFATHHQTGDKWCIYPMYDFTHCISDAIERITHSLCTLEFQDNRRLYDWVLENISIARPLPHQYEFSRLNLESTLTSKRKLLQLVNEGIVDGWNDPRMPTISGLRRRGYTPASLREFCRRIGVTKQDNMVEFSALEACIREDLNENAPRAMAVINPLKIVIENFSGKEMLTAPNHPNRDELGVRELPFTRELYIDQADFREEANKQYKRLVLGKEVRLRNAYVIKAERVEKDAEENITTVYCTYDPDTLGKNPADGRKVKGVIQWVSAEDYLPAEFRQYGRLFTVANPGAAEDIHQVLNPDSLVIKQGVVEKSLANAQPEKAYQFEREGYYCADSKDSRPDHLVFNLTVSLKEGF

SEQ ID NO: 67910 - DNA, 1671 bp, Pseudomonas aeruginosa
  CDS (1)..(1671): transl_table=11
atgagcaagccagagaccaccgccgccccgaacttcctgcgccagatcgttcaagccgacctggatgccggcaagcacgcgaagatcgtcacccgtttccccccggagcccaacggttacctgcacatcggccacgccaagtcgatctgcctgaacttcggcctggcccaggaattcgctggcgattgccatctgcgcttcgatgacaccaacccggccaaggaagaccaggagtacatcgatgccatcgaggccgacatcaagtggctgggcttccagtggtccggcgaggtctgctatgcctccaactatttcgaccagctgcatgcctgggccgtcgagctgatcaaggccggcaaggcgttcgtctgcgacctcggtcccgaggaaatgcgcgaataccgcggcaccctcaccgagccgggccgcaacagcccttaccgtgaccgttcggtggaggagaacctcgacctgttcgcccgcatgaaggccggtgagttccccgacggcgcccgttcgctgcgggcgaagatcgacatgggttcgccgaacatgaacctgcgcgatccgatcctgtaccgcatccgccatgcgcatcaccaccagaccggcgacaagtggtgcatctacccgagctacgacttcacccacggtcagtcggacgccatcgagggcatcacccattcgatctgcaccctggaattcgaagaccatcgtccgctctacgagtggttcctggccaacctgccggtacctgcgcaaccgcgccagtacgaattctcccggctcaacctgaactacaccgtgaccagcaagcgcaagctcaagcaattggtcgacgaaggccatgtcagcggctgggacgatccgcgcatgtcgaccctgtccggctatcgccgccgcggctacaccccggagtcgatccgcaacttctgcgagatgatcggggtgaaccgcgccagcggcgtggtcgacatcggcatgctcgagttcagcatccgcgaccacctggacgccaccgcgccgcgtgccatgtgcgtgctgaaaccgctcaaggtggtgatcaccaactaccccgaagggcaggtggagaacctcgagttgccgcgtcatccgaaggaagacatgggagtgcgcgtactgccgttcggtcgcgagctgttcatcgatgccggtgacttcgaggaagtcccgccggccggctacaagcgcctgatccccggtggcgaggtgcgtctgcgcggcagctacgtgatccgtgccgacgaagcgatcaaggatgccgacggcaatatcgtcgaactgcgctgcagctacgatccggacaccctgggcaagaacccggaaggccgcaaggtcaagggcgtgatccactgggtgccggccgagggcagcgtcgagtgcgaagtgcgcctgtacgatcggctgttccgctcggccaatccggagaaggcggaagagggcggcagcttcctcgacaacatcaacgccgactccctgcaggtactggccggctgtcgcgccgagccgtcgctgggccaggcgaacccggaggatcgcttccagttcgagcgcgaaggctatttcgtcgccgacctgaaggactccaggccgggcaagccggtgttcaaccgtaccgtcaccctgcgtgactcctggggacagggctga

SEQ ID NO: 67911 - protein, 556 aa, Pseudomonas aeruginosa
MSKPETTAAPNFLRQIVQADLDAGKHAKIVTRFPPEPNGYLHIGHAKSICLNFGLAQEFAGDCHLRFDDTNPAKEDQEYIDAIEADIKWLGFQWSGEVCYASNYFDQLHAWAVELIKAGKAFVCDLGPEEMREYRGTLTEPGRNSPYRDRSVEENLDLFARMKAGEFPDGARSLRAKIDMGSPNMNLRDPILYRIRHAHHHQTGDKWCIYPSYDFTHGQSDAIEGITHSICTLEFEDHRPLYEWFLANLPVPAQPRQYEFSRLNLNYTVTSKRKLKQLVDEGHVSGWDDPRMSTLSGYRRRGYTPESIRNFCEMIGVNRASGVVDIGMLEFSIRDHLDATAPRAMCVLKPLKVVITNYPEGQVENLELPRHPKEDMGVRVLPFGRELFIDAGDFEEVPPAGYKRLIPGGEVRLRGSYVIRADEAIKDADGNIVELRCSYDPDTLGKNPEGRKVKGVIHWVPAEGSVECEVRLYDRLFRSANPEKAEEGGSFLDNINADSLQVLAGCRAEPSLGQANPEDRFQFEREGYFVADLKDSRPGKPVFNRTVTLRDSWGQG

SEQ ID NO: 67912 - DNA, 1704 bp, Pseudomonas putida
  CDS (1)..(1704): transl_table=11
atgagcaagcccactgccgacaacgcgcccaacgccgctgccaaaggcgcccccgctgtccctgcgaacttcctgcggccgatcatccaggccgacctggactcgggcaagcacagcagcatcgtcacccgtttcccgccggagcccaatggttacctgcacatcggccacgccaagtcgatctgcgtcaacttcggcctggccaaggaattcggcggcgtctgccacctgcgtttcgacgataccaacccggccaaggaagaccaggagtacatcgacgccatccagagcgatgtcaaatggctgggcttcgagtggggcggcgacgtgcgttacgcctccgactacttcgaccagctgcacgactgggcggtcgagctgatcaagcgcggcaaggcctacgtctgcgaccttactcccgagcaagccaaggaataccgcggcaacctcaaggagccgggcaagaacagcccgttccgcgagcgcagcgtggaagaaaacctcgacctgttcgcccgcatgaaggccggcgagttcaaggacggcgagcgtgtgctgcgggccaagatcgacatggcctcgccaaacatgaacctgcgcgaccctatcctgtaccgcattcgccatgctcaccaccaccagaccggcgacaagtggtgcatctaccccaactacgacttcacccacggccagtcggacgccatcgagggcattacccactcgatctgcaccctggagttcgaagggcatcgtccgctgtacgactggttcctcgacaacctgccggtgccggcacacccgcgccagtacgagttcagccgcctgaacctgaactacaccattacctccaagcgcaagctcaagcagcttgtggacgagaagcacgtcgacgcctgggacgacccacgcatgtcgaccctgtccggcttccgtcgccgtggctacacgccggcttctatccgcaacttctgcgaaatgatcggcaccaaccgttccgacggtgtggtcgacatgtcgatgctcgagttcagcatccgtgacgacctggaccgcaccgcgccacgcgcgatgtgcgtgctgcgcccgctgaaagtggtcatcaccaactacccggaaggccaggtcgagcagcttgagctgccacgtcacccgaaggaagacatgggcgtgcgtgtgctgccgttctcccgcgagctgtacatcgaccgcgacgacttcatggaagaaccgccgaagggctacaagcgcctggaaccggccggtgaagtgcgcctgcgcggcagctacgtgattcgtgctgacgaagcgatcaaggacgccgacggcaacatcgtcgaactgcgttgctcgtacgaccccgacaccctgggcaagaaccctgaaggccgcaaggtcaagggcgtgatccactgggtgccggccgaaggcagcgtcgagtgcgaagtgcgcctgtacgaccgcctgttccgctcgccgaacccggaaaagaccgaggagggcggcagcttcctggacaacatcaaccctgcttcgctgcaagtgctcagcggttgccgtgccgagccgtcgctggcccaggcgcagcccgaggaccgcttccagttcgagcgcgaaggctacttctgcgccgacctgaaagacagccagccgggtcgcccggtgttcaaccgcactgtcaccctgcgtgactcctggggcagctga

SEQ ID NO: 67913 - protein, 567 aa, Pseudomonas putida
MSKPTADNAPNAAAKGAPAVPANFLRPIIQADLDSGKHSSIVTRFPPEPNGYLHIGHAKSICVNFGLAKEFGGVCHLRFDDTNPAKEDQEYIDAIQSDVKWLGFEWGGDVRYASDYFDQLHDWAVELIKRGKAYVCDLTPEQAKEYRGNLKEPGKNSPFRERSVEENLDLFARMKAGEFKDGERVLRAKIDMASPNMNLRDPILYRIRHAHHHQTGDKWCIYPNYDFTHGQSDAIEGITHSICTLEFEGHRPLYDWFLDNLPVPAHPRQYEFSRLNLNYTITSKRKLKQLVDEKHVDAWDDPRMSTLSGFRRRGYTPASIRNFCEMIGTNRSDGVVDMSMLEFSIRDDLDRTAPRAMCVLRPLKVVITNYPEGQVEQLELPRHPKEDMGVRVLPFSRELYIDRDDFMEEPPKGYKRLEPAGEVRLRGSYVIRADEAIKDADGNIVELRCSYDPDTLGKNPEGRKVKGVIHWVPAEGSVECEVRLYDRLFRSPNPEKTEEGGSFLDNINPASLQVLSGCRAEPSLAQAQPEDRFQFEREGYFCADLKDSQPGRPVFNRTVTLRDSWGS

SEQ ID NO: 67914 - DNA, 1710 bp, Pseudomonas syringae pv
  CDS (1)..(1710): transl_table=11
atgtccaaggatcctatgagcaagcccactccagaacccgctgcccattcaaaggcaggcccagccgtaccgaccaacttcctgcgtccgatcgtgcaggcagacctggactcgggcaaacacagcaaaatcatcacgcgctttccgccggagcccaatggctacctgcacattggtcatgccaagtcgatctgcgtgaatttcggtctggccaaggagttcggtggcgatacgcacctgcgtttcgatgacaccaacccggccaaggaagaccaggaatacatcgacgccatcatgaacgacgtcaagtggctgggcttcgagtgggccggtgaagtgcgttacgcctcgcagtatttcgatcagttgcacgactgggcggtcgagctgatcaaggccggcaaggcctacgtggacgatctgacccccgagcaggcccgcgaataccgtggcaccctgaccgagccgggcaagaacagcccgttccgtgagcgcagcgttgaggaaaatatcgacctgttcgcgcgcatgaaggctggtgaattcgaggacggcgctcgcgtactgcgcgccaaaatcgacatggcctcgcccaacatgaacctgcgtgatccgattctgtaccgcattcgtcatgcacaccaccaccagaccggtgacaagtggtgcatctacccgatctacgacttcacccacggccagtcggatgccatcgaggggatcacccactcgatctgcaccctggagttcgaaagccaccgtccgttgtatgactggttcctcgacaacctgccggtgccgtgcaaacctcgccagtacgagttctcgcgcctgaacctgaactacaccatcaccagcaagcgcaagctcaagcaactggttgacgaaaaacacgtcaacggctgggatgacccgcgcatgtcgacgctgtcgggttttcgccgtcgtggctacacgcccaagtccattcgcaatttctgcgaaatgatcggcaccaaccgttccgacggcgtggtcgatttcggcatgctcgagttcagcattcgtgacgatctggaccacagcgccccgcgtgccatgtgcgtgctgcgcccgctgaaagtcgtgatcaccaactacccggaaggtcaggtcgagaagctggagctgccgcgccatccgaaagaagacctgggcatgcgcgagctgccgttttcgcgggaaatctacatcgaccgcgacgattacatggaagagccgccgaagggctacaagcgccttgagcccaatggcgaagtgcgtctgcgtggcagctatgtgatccgtgccgacgaagcgatcaaggacgccgacggcaacatcgtcgaactgcgttgctcctacgacccggacaccctgggcaagaaccccgaaggccgcaaggtcaaaggcgtggtgcactgggtgccggcggccgagagcgttgaatgcgaagtgcgtctgtacgatcgcctgttccgctcagccaacccggaaaaagccgaagacggcgcgagcttcctggacaacatcaaccccgattccctgcaagtgctgaccggttgtcgtgccgaaccttcattgggtcatgcgcaaccggaagaccgtttccagttcgaacgcgaaggttatttctgcgcggacatcaaggactcgaaacccggtcaaccagtcttcaaccgcacggtcacgttgcgggattcctggacctga

SEQ ID NO: 67915 - protein, 569 aa, Pseudomonas syringae pv
MSKDPMSKPTPEPAAHSKAGPAVPTNFLRPIVQADLDSGKHSKIITRFPPEPNGYLHIGHAKSICVNFGLAKEFGGDTHLRFDDTNPAKEDQEYIDAIMNDVKWLGFEWAGEVRYASQYFDQLHDWAVELIKAGKAYVDDLTPEQAREYRGTLTEPGKNSPFRERSVEENIDLFARMKAGEFEDGARVLRAKIDMASPNMNLRDPILYRIRHAHHHQTGDKWCIYPIYDFTHGQSDAIEGITHSICTLEFESHRPLYDWFLDNLPVPCKPRQYEFSRLNLNYTITSKRKLKQLVDEKHVNGWDDPRMSTLSGFRRRGYTPKSIRNFCEMIGTNRSDGVVDFGMLEFSIRDDLDHSAPRAMCVLRPLKVVITNYPEGQVEKLELPRHPKEDLGMRELPFSREIYIDRDDYMEEPPKGYKRLEPNGEVRLRGSYVIRADEAIKDADGNIVELRCSYDPDTLGKNPEGRKVKGVVHWVPAAESVECEVRLYDRLFRSANPEKAEDGASFLDNINPDSLQVLTGCRAEPSLGHAQPEDRFQFEREGYFCADIKDSKPGQPVFNRTVTLRDSWT

SEQ ID NO: 67916 - DNA, 1743 bp, Ralstonia solanacearum
  CDS (1)..(1743): transl_table=11
atgagccaagataacgccaccggcgccgctgccgcctccacgtccaacttcctgcgccagatcatcgataccgacctggagcagggcacctacgccgggcgccaggacaccgccggccacgccctgccgcccatcatcacgcgcttcccgccggagcccaacggttacctgcacatcggccacgccaagagcatctgggtgaacttcggcctggccaaggaatacggcggccgctgccacctgcgcttcgacgacaccaacccggtcaaggaagacaccgagtacgtcgactccatcatcgacgccgtgcactggctcggctactcgtggcagaacggcaccggcgagcacctctactacgccagcgactacttcgagcagctctacggctttgccgaggtgctgatccagcgcggcgccgcctatatcgacagccagagcgccgagcagatcgccgccaaccgtggcgacttcaccaggccgggcacgccgtcgccgttccgcgaccgttcggtggaagagaacctcgcgctgttccgcgacatgcgagccggcaagtaccaggacggccagcacgtgctgcgcgcccggatcgacatggccgcgcccaacatcgtgatgcgcgatccggtgctgtaccgcatccgccacgcacaccaccaccgcaccggcgacgcatggtgcatctacccgatgtacgacttcacgcattgcatctccgatgcgctggagaacatcacgcattcgctgtgcacgctggagttcgagaacaaccgcccgctgtacgactgggtgctcgaccacctgcgcgacgccggcgcgctgcccgcgccgctgccgcaccagtacgaattcgcgcgcctgcacctcacgtacgccatcaccagcaagcgcaagctgctgcagctggtgaacgaaaagcgcgtggacggctgggacgacccgcgcatgcccaccctggtgggcatccgccgccgcggctacacgccggaatcgatccagctgttctgcgagcgcgtgggcgtctcgaaggccgacagctggatcgacatgagcatcctggaggccgccgtgcgcgacgacctcgatgcgcgcgcgccgcgctcggtggcggtgctggacccggtcaagctcatcctcgacaacgtgccggcggacttcaacgagccgtgctcggcccccgtgcacccgaagcagcccgagctgggccgccgcgagttcccgctcacgcgcgagctgtggatcgagcgcgaggacttcaccgagacgccgcccaagggctacttccgcctgttcccgggcaacaaggtgcgcctgcgctacggctacgtgatcgaatgcacgggctgcgacaaggatgccgacggcaacatcaccgccgtgcacgccaacatcatcccggacaccaagagcggcacgccgggtgcggacagcgtcaaggtcaagggcaacatccactgggtcagcgccgcgcatgcgctcgaggccgaggtgcgcctgtacgatcgcctgttcaccgacccgcagccggactcgggcgacaagaacttcctggacgcgctcaaccccgacgccaagcgggtcgtcacggcctacctggaaccgacgctggcaaccgccaagccggaagaccgcttccagttcgagcgccacggctacttcgtggccgaccgcatcgactcgcagccgggcaagcccgtgttcaaccgcgtggtcggcctgaaggacagctggggcaagtaa

SEQ ID NO: 67917 - protein, 580 aa, Ralstonia solanacearum
MSQDNATGAAAASTSNFLRQIIDTDLEQGTYAGRQDTAGHALPPIITRFPPEPNGYLHIGHAKSIWVNFGLAKEYGGRCHLRFDDTNPVKEDTEYVDSIIDAVHWLGYSWQNGTGEHLYYASDYFEQLYGFAEVLIQRGAAYIDSQSAEQIAANRGDFTRPGTPSPFRDRSVEENLALFRDMRAGKYQDGQHVLRARIDMAAPNIVMRDPVLYRIRHAHHHRTGDAWCIYPMYDFTHCISDALENITHSLCTLEFENNRPLYDWVLDHLRDAGALPAPLPHQYEFARLHLTYAITSKRKLLQLVNEKRVDGWDDPRMPTLVGIRRRGYTPESIQLFCERVGVSKADSWIDMSILEAAVRDDLDARAPRSVAVLDPVKLILDNVPADFNEPCSAPVHPKQPELGRREFPLTRELWIEREDFTETPPKGYFRLFPGNKVRLRYGYVIECTGCDKDADGNITAVHANIIPDTKSGTPGADSVKVKGNIHWVSAAHALEAEVRLYDRLFTDPQPDSGDKNFLDALNPDAKRVVTAYLEPTLATAKPEDRFQFERHGYFVADRIDSQPGKPVFNRVVGLKDSWGK

SEQ ID NO: 67918 - DNA, 2436 bp, Schizosaccharomyces pombe
  CDS (1)..(2436)
atggaccaggattatgaggagttacgtgccaagtttacaaaaataggattaaatgaaacaacggtaaaagatacgttaaaaaataaaaagctttcttcttcattaaataaggtcattgaggaaactaacgttggttcttcgggatgtgatagaacaattggaaatttgctatttacattggccaacgcttctttaaaacaaaaagacccgaaatccaatgctcatgaggcattcatagcttccaaaattgtatctggagacttaaaaacaaacctccaagtcaatgcggctattacctattgcaaggacaaagacacgatcgacgaatctgagttcgataaagaaactggtgttggtgtagtcttaacacctgaacaaattgaacaactcgtcggtgattatgtcgctgagaataagtcaaaaattttggagcaaagataccagctgttaaatccttctgcctctgctttacgtcagcatgctttattgaaatgggctcctcaactggaggtcaagcagacccttgataggaaattccttgaactcttgggaccaaaaaccgaacaagatgctgccgctggtaaaaaaaaaggcgcaaaagccaagaattcgaagcagaagactgttgattctgggaaagctaaggaacaaaaaattgtttctgaacagtctaagaaatataatatgtttgaggaagggtttttagcaaagctacataaaccaggtggtaatacgcagctgattcctgaaaggatgaaggagcacctgcaggctactggaggcggcgttgtaaccaggtttcctccggaaccaaatgggtacctccatattggccattccaaagcaatcgctgttaattttgggtttgctcgctatcataacggcgtttgttatttacgctttgatgatactaatccggaagctgaagaagagcgttactttgaaagcatcaaggatttggtagcctggttgggattccaaccttataagatcacctattccagtgattactttgataagttatatgagttagccgaagagctcattaagcgggacaaggcatatgtttgtcattgtaccgatgctgaaattaaaaaagctagaggtggtgaggagcgcggtcctcgttatgcttgtgttcatcgggaccgcccgatagaagaatcgcttcttgaatttcgtaatatgcgtgatggaaagtatcaaccgaaggaggctattttacgtatgaaacaagatctcagtgatggaaatcctcaaatgtgggaccttattgcctaccgtgttcttaattctcctcatcctcgtactggagacaagtggaaaatttacccaacttatgattttacccattgtttagttgattcgttcgagaacatttctcactctttgtgtacgactgagtttatattatctagagtaagttatgagtggttatgtaatgccttggaagtttattgtcctgctcagcgtgagtacggtcgtttgaacgttgtcggaaccctcatgagcaaacgaaaaataatgaaattggtaaaggaaggatacgttcatggttggaatgatcctaggctatatacccttgtagctcttcgccgccgaggtgttcctccaggtgctatccttgagtttgttagtgaagtcggtgtcactactgccgtcagcaatatagaagttgctcgatttgagaactgtgttcgaaaatttctcgaaaacagtgtaccacgtcttatgtttcttcctgatcctatcaaggttacattagaaaatctagacgactcttacagagagcaaattgagataccctttaatcctaaagatccttctatgggatctcgttctgcttttcttacaaagcatatatacattgaccgttctgattttcgtgaggaagcatcttctgactttttccgtttgacattaggtcaaccggttggcttgttccgtgcctctcatcctgtagttgccaaaagggttgtaaaaaatgatgaaggggaaccaatagaaatcatcgctgagtacgacgctagctcttcaaagaagcctaagacctttattcaatgggtgtctagggacaaagaaagtaatagtccagtacttattgctgaaacccgcctctttaataatcttttcaaatgtgataaccctgccgccctaaaagaacaagagctcgctgcacaattgaatccagagagcgaagtcgtactaaaaaattccattattgaacctggcatttatgatttaattaaatcggcaccttggcctaagactgattcatcggctggtgtcgacaaagccgaaaatcctgaaagtgtccgttttcaagctatgcgggttggatatttctgtttagatgaggatactaagaaaccaaatcatcttgtattgaatagaattgtatccctcagagaagattcggctaagaataaaaattag

SEQ ID NO: 67919 - protein, 811 aa, Schizosaccharomyces pombe
MDQDYEELRAKFTKIGLNETTVKDTLKNKKLSSSLNKVIEETNVGSSGCDRTIGNLLFTLANASLKQKDPKSNAHEAFIASKIVSGDLKTNLQVNAAITYCKDKDTIDESEFDKETGVGVVLTPEQIEQLVGDYVAENKSKILEQRYQLLNPSASALRQHALLKWAPQLEVKQTLDRKFLELLGPKTEQDAAAGKKKGAKAKNSKQKTVDSGKAKEQKIVSEQSKKYNMFEEGFLAKLHKPGGNTQLIPERMKEHLQATGGGVVTRFPPEPNGYLHIGHSKAIAVNFGFARYHNGVCYLRFDDTNPEAEEERYFESIKDLVAWLGFQPYKITYSSDYFDKLYELAEELIKRDKAYVCHCTDAEIKKARGGEERGPRYACVHRDRPIEESLLEFRNMRDGKYQPKEAILRMKQDLSDGNPQMWDLIAYRVLNSPHPRTGDKWKIYPTYDFTHCLVDSFENISHSLCTTEFILSRVSYEWLCNALEVYCPAQREYGRLNVVGTLMSKRKIMKLVKEGYVHGWNDPRLYTLVALRRRGVPPGAILEFVSEVGVTTAVSNIEVARFENCVRKFLENSVPRLMFLPDPIKVTLENLDDSYREQIEIPFNPKDPSMGSRSAFLTKHIYIDRSDFREEASSDFFRLTLGQPVGLFRASHPVVAKRVVKNDEGEPIEIIAEYDASSSKKPKTFIQWVSRDKESNSPVLIAETRLFNNLFKCDNPAALKEQELAAQLNPESEVVLKNSIIEPGIYDLIKSAPWPKTDSSAGVDKAENPESVRFQAMRVGYFCLDEDTKKPNHLVLNRIVSLREDSAKNKN

SEQ ID NO: 67920 - DNA, 1671 bp, Shewanella oneidensis
  CDS (1)..(1671): transl_table=11
atgagtcatgtggacactgaagtacgtccgagtaactttattcgtaatatcattgatgaggatctgaaaagcggtaagcacaccaatgtgcagacgcgttttccacccgagccaaatggttatttacatataggtcatgctaagtccatctgtttgaactttggcatcgcccgcgattaccaaggtctctgtaacttacgatttgatgataccaaccctgaaaaagaagacatcgattatgttaattctattcaggcggatgtgcgttggttgggattccagtgggatggtgaggtgcgttattcctctaattatttcgaccaattacatcaatatgccgttgagttaattaataaaggcctagcctatgtgtgtttcctcaatgccgatgaaacccgtgaataccgtggtacgttaaaagaaccaggcaaaaatagcccttatcgtgatacacctgtggaagaaaacctgcgcttatttggaaaaatgcgtctgggtgaattcaaagaaggtgagtgtgcgctgcgtgctaaaatcgacatggcatcgccttttatgtgtatgcgcgatccggtgatttatcgtattcgttttgctcatcatcaccaaacgggcgataagtggtgcatttacccaatgtacgactttactcactgtatctctgacgccctggagcatattacccattctctgtgtacgcttgagttccaagataaccgtcgtctatatgactgggtgctggacaatttagatgatttccaagcgccaaatcgtactcgtcaatatgagttttctcgcttaaatcttgaatatacgctgatgtctaagcgtaaattaaatgacttagttacgcgtaaattagtgactggctgggatgatccgcgtatgcctacgattgctggtcttcgtcgtcgtggttatacccctgcgtctattcgtgaattttgccaacgtattggtatcaccaagcaagaaaacatgattgaagcggcgatgctcgatgcctgtatccgtgaagagctaaacgagcatgcaccccgtgcgatggccgtattgcgtccattaaaagtggtgattgagaactaccctgaaggtcaaatcgagactattcaagcggcttctcaccctagcgatgaaagtatggggacgcgtgagttggcttttggtcgtgagatctttattgatgtggcagatttcagagaagaagccaataagcaatacaagcgtttagtgatgggcaaagaagtgcgtctgcgtaacgcttatgtgatcaaggctgagcgttgtgataaagacagcgaaggcaatatcaccacagtttactgtagctatgatgctgatactttaggtaaaaatcctgccgatggtcgcaaggtgaagggcgtaatccattgggttgaagctactacggctaaacctgcacagttccgcttataccaacgtttgttcactgatccaaatccagctgcggctgagacagtggatgaagtactcaaccctaactcacttgaagtggttaatggtttagtcgaagcaagccttgcgaatgcgccagcggaaaaagcttatcagtttgaacgtgaaggttatttctgtgcggacaacaaagactcatcagccgatcatttagtgtttaacctaacggttgcactgcgtgactcgtttgaatag

SEQ ID NO: 67921 - protein, 556 aa, Shewanella oneidensis
MSHVDTEVRPSNFIRNIIDEDLKSGKHTNVQTRFPPEPNGYLHIGHAKSICLNFGIARDYQGLCNLRFDDTNPEKEDIDYVNSIQADVRWLGFQWDGEVRYSSNYFDQLHQYAVELINKGLAYVCFLNADETREYRGTLKEPGKNSPYRDTPVEENLRLFGKMRLGEFKEGECALRAKIDMASPFMCMRDPVIYRIRFAHHHQTGDKWCIYPMYDFTHCISDALEHITHSLCTLEFQDNRRLYDWVLDNLDDFQAPNRTRQYEFSRLNLEYTLMSKRKLNDLVTRKLVTGWDDPRMPTIAGLRRRGYTPASIREFCQRIGITKQENMIEAAMLDACIREELNEHAPRAMAVLRPLKVVIENYPEGQIETIQAASHPSDESMGTRELAFGREIFIDVADFREEANKQYKRLVMGKEVRLRNAYVIKAERCDKDSEGNITTVYCSYDADTLGKNPADGRKVKGVIHWVEATTAKPAQFRLYQRLFTDPNPAAAETVDEVLNPNSLEVVNGLVEASLANAPAEKAYQFEREGYFCADNKDSSADHLVFNLTVALRDSFE

SEQ ID NO: 67922 - DNA, 1665 bp, Shigella flexneri
  CDS (1)..(1665): transl_table=11
atgagtgaggcagaagcccgcccgactaactttatccgtcagatcatcgatgaagatctggccagtggtaagcacatcacagtacacacccgtttcccgccggagccgaatggctatctgcatattggccatgcgaaatctatctgcctgaacttcgggatcgcccaggactataaaggccagtgcaacctgcgtttcgacgacactaacccggtaaaagaagatatcgagtatgtcgattcgatcaaaaacgacgtagagtggttaggttttcactggtctggtaacgtccgttactcctccgattattttgatcagctccacgcctatgcgatcgaactgatcaataaaggcctggcgtacgttgatgaactgacaccggaacagatccgcgaataccgcggtaccctgacgcagccgggtaaaaacagcccgtaccgcgaccgcagcgttgaagagaacttggcgctgttcgaaaaaatgcgtgccggtggttttgaagaaggtaaagcctgcctgcgtgcgaaaatcgacatggcgtcgccatttatcgtaatgcgcgatccggtgctgtaccgcattaaatttgctgaacaccaccagactggcaacaagtggtgcatctacccgatgtacgacttcacccattgcatcagcgatgcgctggaaggtattacgcactctctgtgtacgcttgagttccaggacaaccgtcgtctgtacgactgggtactggataacatcaccattcctgttcatccgcgccagtacgaattctcgcgcctgaatctggaatacactgtgatgtccaagcgtaagctgaacctgctggtgaccgacaagcacgttgaaggctgggatgacccgcgtatgccgaccatttccggtctgcgtcgtcgtggttacactgcggcttctattcgtgagttctgcaaacgcatcggcgtgaccaagcaggacaacaccattgagatggcgtcgctggaatcctgcatccgtgaagatctcaacgaaaatgcgccgcgcgcaatggcggttatcgatccggtgaaactggttatcgaaaactatcagggcgaaggcgaaatggtcaccatgccgaaccatccgaacaaaccggaaatggggagccgtcaggtgccgtttagcggtgaaatttggatcgatcgcgccgatttccgcgaagaagctaacaagcagtacaaacgtctggtgctgggtaaagaagtgcgtctgcgtaatgcttacgtcattaaggctgaacgcgtggagaaagatgccgaaggtaatatcaccaccatcttctgtacttatgacgccgacaccttaagcaaagatccggcagatggtcgtaaagtcaaaggtgttattcactgggtgagcgcggcacatgcgctgccggttgaaatccgtttgtatgatcgtctgttcagcgtgcctaacccaggtgctgcggatgatttcctgtcggtgattaacccggaatcgctggtgatcaaacagggctttgctgaaccgtcgctgaaagatgcggttgcgggtaaagcattccagtttgagcgtgaaggttacttctgcctcgacagccgccattccacggccgaaaaaccggtatttaaccgcaccgttgggctgcgtgatacctgggcgaaagtaggcgagtaa

SEQ ID NO: 67923 - protein, 554 aa, Shigella flexneri
MSEAEARPTNFIRQIIDEDLASGKHITVHTRFPPEPNGYLHIGHAKSICLNFGIAQDYKGQCNLRFDDTNPVKEDIEYVDSIKNDVEWLGFHWSGNVRYSSDYFDQLHAYAIELINKGLAYVDELTPEQIREYRGTLTQPGKNSPYRDRSVEENLALFEKMRAGGFEEGKACLRAKIDMASPFIVMRDPVLYRIKFAEHHQTGNKWCIYPMYDFTHCISDALEGITHSLCTLEFQDNRRLYDWVLDNITIPVHPRQYEFSRLNLEYTVMSKRKLNLLVTDKHVEGWDDPRMPTISGLRRRGYTAASIREFCKRIGVTKQDNTIEMASLESCIREDLNENAPRAMAVIDPVKLVIENYQGEGEMVTMPNHPNKPEMGSRQVPFSGEIWIDRADFREEANKQYKRLVLGKEVRLRNAYVIKAERVEKDAEGNITTIFCTYDADTLSKDPADGRKVKGVIHWVSAAHALPVEIRLYDRLFSVPNPGAADDFLSVINPESLVIKQGFAEPSLKDAVAGKAFQFEREGYFCLDSRHSTAEKPVFNRTVGLRDTWAKVGE

SEQ ID NO: 67924 - DNA, 1671 bp, Vibrio vulnificus
  CDS (1)..(1671): transl_table=11
atgagtgaagctgatgctcgtccatcaaactttattcgtcagatcattgataaagatctggcggatggcaaacacacgagtgtgcatacacgattcccaccggagccaaacggctacctacacatcggccatgcaaaatcgatctgtttgaactttggtattgctcaggactatcagggtaagtgtaatcttcgtttcgacgataccaaccctgagaaagaagacatcgaatacgttgagtcgatcaaaaatgatgtgagctggttaggctttgaatgggatgatgagatctgttactcatcgaactatttcgacaagctttacgagtatgcagtggaactgattaacaaaggcttagcgtacgttgatgagctaagtccagagcagatccgtgaataccgtggtacgttgactgcgccaggtaagcctagcccttatcgtgatcgttctgcagaagaaaaccttgcgctgtttgaaaaaatgcgcgatggcggttttgaagaaggtaaagcgtgtcttcgtgcgaagattgacatggcatcgtcgttcatggttatgcgcgatcctgttctttaccgcgtgcgttttgcgtctcaccaccagacaggtgacaaatggtgcatttacccaatgtacgactttacgcactgtatttcagatgcgttagaaggcattacgcactcaatttgtactcttgagtttatggacaaccgtcgtttgtacgactgggttctcgacaacatcaccattgattgccgtcctcatcaatacgagttcagccgtctgaaccttgaatacacagtaatgtctaagcgtaagctcaaccagttggtgactgagaagttggttaatggctgggatgacccacgtatgccgacgatctctggtttacgccgtcgcggtttcacacctgcgtcaattcgcgagttttgtaagcgtatcggtgtgacgaagcaagaaaacatgatcgagtttagttcattggaatcttgcatccgtgatgatttgaatgaaaatgctcctcgtgcaatggcggtgttggatcctgttaagctagtgattgaaaacttccctgcaggcgaagtagaaaatctgacggttgctaaccatccaaataagccagaaatgggtgagcgtgaagttccgtttagccgtgaaatttggatcgagcgtgaagatttccgcgaagaagcaaacaagaagtacaaacgtttggttcttggcagtgaagtacgtctgcgtggcgcgtacgtgattaaagctgagcgtgttgagaaagacgacgaaggtaatatcacgactatcttctgtacttacgattcagagactttgggtgttaaccctgcggatggccgtaaagtacgtggtgtaattcactgggtatcggcggataaaggtgttcctgctgaaattcgtctatacgatcgtctattcacggtaccaaatccagcagcggcagatgactttgcttcaaccatcaatccggaatctttaacggtgatgaatggctttgttgagccaagcttagtggaagcagaagctgaaaaaggctatcagtttgagcgtatgggttacttctgtgcggattctaaagactcctctaaagagcatttagttttcaaccgtactgtaggtctacgtgatacttgggcgaagattgaagcgaaataa

SEQ ID NO: 67925 - protein, 556 aa, Vibrio vulnificus
MSEADARPSNFIRQIIDKDLADGKHTSVHTRFPPEPNGYLHIGHAKSICLNFGIAQDYQGKCNLRFDDTNPEKEDIEYVESIKNDVSWLGFEWDDEICYSSNYFDKLYEYAVELINKGLAYVDELSPEQIREYRGTLTAPGKPSPYRDRSAEENLALFEKMRDGGFEEGKACLRAKIDMASSFMVMRDPVLYRVRFASHHQTGDKWCIYPMYDFTHCISDALEGITHSICTLEFMDNRRLYDWVLDNITIDCRPHQYEFSRLNLEYTVMSKRKLNQLVTEKLVNGWDDPRMPTISGLRRRGFTPASIREFCKRIGVTKQENMIEFSSLESCIRDDLNENAPRAMAVLDPVKLVIENFPAGEVENLTVANHPNKPEMGEREVPFSREIWIEREDFREEANKKYKRLVLGSEVRLRGAYVIKAERVEKDDEGNITTIFCTYDSETLGVNPADGRKVRGVIHWVSADKGVPAEIRLYDRLFTVPNPAAADDFASTINPESLTVMNGFVEPSLVEAEAEKGYQFERMGYFCADSKDSSKEHLVFNRTVGLRDTWAKIEAK

SEQ ID NO: 67926 - DNA, 1740 bp, Xanthomonas axonopodis pv
  CDS (1)..(1740): transl_table=11
atgtccgagaccctagccaccgacgccaccgccccggcggagaagaaagacttcatccgccagatcgtccgcgaggatctggccagcggcaagcacacggtcatccgcacccgcttcccgcccgagcccaatggctacctgcatattggccatgccaaggcgatctgcctggatttcggcctggccgccgagttcggcgggctgtgcaacctgcgcctggacgataccaacccggccaaggaagaccccgagttcgtggtggccatccaggacgacgtgcgctggctgggctatgactgggcgcaactgcgccacgcctcggattatttccaggtgtattacctggccgcgcagaagctgatccgcgatggccatgccttcgtgtgcgacctttccgcagaacaggtgcgccaataccgtggcacgctgaccgaacccggccgcaattcgccgttccgcgagcgcagcgtcgaagaaaacctggacctgttcgcgcgcatgcgtgccggcgaattccccgacggcgcgcgtacgctgcgcgccaagatcgacatggccagcggcaatatcaacctgcgcgacccggcgctgtaccgcatcaagcatgtggagcatcagaacaccggcaacgcctggccgatctacccgatgtacgacttcgcgcattcgctcggcgatgcggtggaaggcatcacccactcgctgtgcacgctggaatttgaagaccatcgcccgctgtacgactggtgcgtggacaaggtggacctggtcggccatccggaactgctgcagccgctgctggacaagggcctgccgcgcgaagccgccaagccgcgtcagatcgagttttcgcgcctcaacatcaactacacggtgatgagcaagcgcaagctcaccgcgctggtggaagagcagctggtggacggttgggacgacccgcgcatgtacacgctgcagggcctgcgccggcgtggctatacgccggcggcgatgcgcctgttcgtggaccgcgtgggcatcagcaagcagaactcgctgatcgatttctcggtgctggaaggttgcctgcgcgaggatctggacgcagcggcgccgcgccgtatggccgtgatcgacccgctcaagctggtgctgaccaacctgccggaaggccacaccgaaacgctgcagttttccaaccaccccaaggacgacagcttcggcacacgcgaggtgccgtttgcgcgcgagctgtggatcgagcgcgaggatttcgccgaggttccgccaaagggctggaagcgcctggtgccgggcggcgaaatccgcttgcgcggtgcaggcattgcgcgcgtggacgaggtgatcaagaacgctgacggcgagatcgtcgaactgcgcggctggctggatccggaatcgcgcccgggcatggaaggcgccaaccgcaaggtcaagggcaccatccactgggtcagcgcggcacacgcggtggaagcggaaatccgcctgtacgaccgcctgttttcggtggagaagcctgacgacgagtccgagggcaagacctaccgcgattacctgaaccccgagtccaagcgcaacgtgcgcgggtacgtagagccgagcgctgcgatggcagcgcccgagcaggcgttccagttcgaacgcaccggttacttcgttgccgaccgtcgcgaccatagcgaagccacgccggtcttcaatcgcagcgtgaccttgcgcgacacctgggccaagtaa

SEQ ID NO: 67927 - protein, 579 aa, Xanthomonas axonopodis pv
MSETLATDATAPAEKKDFIRQIVREDLASGKHTVIRTRFPPEPNGYLHIGHAKAICLDFGLAAEFGGLCNLRLDDTNPAKEDPEFVVAIQDDVRWLGYDWAQLRHASDYFQVYYLAAQKLIRDGHAFVCDLSAEQVRQYRGTLTEPGRNSPFRERSVEENLDLFARMRAGEFPDGARTLRAKIDMASGNINLRDPALYRIKHVEHQNTGNAWPIYPMYDFAHSLGDAVEGITHSLCTLEFEDHRPLYDWCVDKVDLVGHPELLQPLLDKGLPREAAKPRQIEFSRLNINYTVMSKRKLTALVEEQLVDGWDDPRMYTLQGLRRRGYTPAAMRLFVDRVGISKQNSLIDFSVLEGCLREDLDAAAPRRMAVIDPLKLVLTNLPEGHTETLQFSNHPKDDSFGTREVPFARELWIEREDFAEVPPKGWKRLVPGGEIRLRGAGIARVDEVIKNADGEIVELRGWLDPESRPGMEGANRKVKGTIHWVSAAHAVEAEIRLYDRLFSVEKPDDESEGKTYRDYLNPESKRNVRGYVEPSAAMAAPEQAFQFERTGYFVADRRDHSEATPVFNRSVTLRDTWAK

SEQ ID NO: 67928 - DNA, 1743 bp, Xylella fastidiosa
  CDS (1)..(1743): transl_table=11
atgtccgaaatcaccagcaccgacgcccgagcccagcctgagaagaaagactttatccggcagatcatcagagaagacttagcccacggcacacacactcacatccgcacccgtttccccccagaacccaacggttacctgcacattggccacgccaaagcaatctgcctggattttggcgtcgccgcggaattcggcggacactgcaccctccgcatggacgacaccaatccgagcaaagaagaccccgcgttcgccgctgcaatccaggacgacgtctcttggctaggcttccattggaacgcactacgacatacatcggattatttcgaagtgctgtacctggccgcagaaaaactcattaccgatggaaaagcctacgtctgtgacctcaatagcgaacaggtacgcgaataccgcggcaccctgacagaagcgggccgtccctcaccatggcgtgaacgcagccctgatgaaaatttagaactattccgacagatgcgcgccggcacgtttccagacggaacacgtaccctgcgagccaaaatcgacatggctagcggcaacatcaacctgcgggacccagcgctctaccgcattaaacacgtcgaacatcaaaacaccggcaacacctggccgatctaccccatgtatgacttcgcacacgcactgagcgatgcgatcgaaggcattacccattcattatgcaccctcgagttcgaagaccaccgccccctgtacgactggtgcgtcaaccacgtcgacctaccgaacaactcacacctactcaaaccgttactggacaaaggctttcctcaagaacccagccaacctcggcaaatcgagttttcgcgcctgaacatcaactacaccgtgatgagcaaacgcaagctcaccgcactggtggacgaaaaactcgtcgaagggtgggacgaccctcgcatgtacactctgcaaggcctacgccgccgcggctacaccccagcggccatgcgcctattcgtagagcggatcggcatcagcaaacagaactcgatcattgatttttcagtactagaaaactgcttacgcgagaacttggacaccattgcaccacgccggatggcaaccattgcaccactgaaactcgtgctgaccaacctacccgaagaccatgaagaacagctgattttccccaaccatcccaaagacgacacacaaggcacccgaacaatgccgttctcacgcgaactatggatcgaacgcgacgatttttcagaaatcccccccaagggctggaaacggctggttccaggcggagaagtacgcctacgcggcgccggcatcgcacgtgtagatgaggtggtgaaaaacgcagcaggcgacatcatcgcactacacggctggcttgatccgacctcacgtcccggtatggaaggcgctcaccgcaaagtcaaaggcaccatccactgggtcagcgcaccacacgctgtagcagcagaaatccgcctgtacgaccggctgttctccgttgaaaaacctgacgacaacaccgacggaaaaacctaccgcgacgtcctcaacccagattccaaacgcgtcgtgcatggctacatcgaaccagcggcggcacaaaccgcaccagaacacgcattccaatttgaacgcttgggctacttcgtcacagaccggcatgaccacgatgccgcacaccccgtctttaatcgcagcgtcacgctacgcgacacctggcaacgcgactga

SEQ ID NO: 67929 - protein, 580 aa, Xylella fastidiosa
MSEITSTDARAQPEKKDFIRQIIREDLAHGTHTHIRTRFPPEPNGYLHIGHAKAICLDFGVAAEFGGHCTLRMDDTNPSKEDPAFAAAIQDDVSWLGFHWNALRHTSDYFEVLYLAAEKLITDGKAYVCDLNSEQVREYRGTLTEAGRPSPWRERSPDENLELFRQMRAGTFPDGTRTLRAKIDMASGNINLRDPALYRIKHVEHQNTGNTWPIYPMYDFAHALSDAIEGITHSLCTLEFEDHRPLYDWCVNHVDLPNNSHLLKPLLDKGFPQEPSQPRQIEFSRLNINYTVMSKRKLTALVDEKLVEGWDDPRMYTLQGLRRRGYTPAAMRLFVERIGISKQNSIIDFSVLENCLRENLDTIAPRRMATIAPLKLVLTNLPEDHEEQLIFPNHPKDDTQGTRTMPFSRELWIERDDFSEIPPKGWKRLVPGGEVRLRGAGIARVDEVVKNAAGDIIALHGWLDPTSRPGMEGAHRKVKGTIHWVSAPHAVAAEIRLYDRLFSVEKPDDNTDGKTYRDVLNPDSKRVVHGYIEPAAAQTAPEHAFQFERLGYFVTDRHDHDAAHPVFNRSVTLRDTWQRD

SEQ ID NO: 67930 - DNA, 1743 bp, Xylella fastidiosa
  CDS (1)..(1743): transl_table=11
atgtccgagatcaccaccaccgacgcccaagcccaacctgagaagaaagactttatccggcagatcatcagagaagacttagcccacggcacacacactcacatccacacccgttttcccccagaacccaacggttacctgcacattggccacgccaaagcaatctgcctggattttggcgtcgccgcggaattcggcggacactgcaccctccgcatggacgacaccaatccgagcaaagaagaccccgccttcgccgctgcaatccaggaagacgtctcttggttaggcttccattggaacgcactacgacatacatcggattatttcgaagtactgtacctagctgcagaaaaactcattgccgatggaaaagcctacgtctgtgacctcaatagccaacaggtacgcgaataccgcggcaccctgacagaagcgggccgtccctcaccatggcgtgaacgcagccctgatgaaaatttagaactattccgacaaatgcgcgccggcacgtttccagacggaacacgtaccctgcgtgccaaaatcgacatggctagcggcaacatcaacctgcgggacccagcgctctaccgcattaaacacgtcgaacatcaaaacaccggcaacacctggccgatctaccccatgtatgacttcgcacacgcactgagcgatgcgatcgaaggcattacccattcattgtgcacccttgagttcgaagaccaccgccccctgtacgactggtgtatcaaccatgtcgacctaccaaacaactcacacttactcaaaccgttactggacaaaggcttccctcaagagcccagccaacctcggcaaatcgagttttcgcgcctgaacatcaactacaccgtgatgagcaaacgcaaactcaccgcactggtggacgaaaaactcgtcgaagggtgggacgacccccgcatgtacaccctgcaaggcctacgccgccgtggttacaccccagcggcgatgcgcctattcgtagagcggatcggcatcagcaaacagaactcaatcattgatttttcagtactagaaaactgcttacgcgagaacctggacaccattgcaccacgccggatggcaaccattgcaccaatgaaactcgtgctgaccaacctagccgaagaccatgaagaacaactgatcttccccaaccatcccaaagacgacacacaaggcacccgaacagtgccgttctcacgcgaactatggatcgaacgcgatgatttttccgaagccccccccaagggctggaaacggctgattccaggcggagaagtacgcctacgcggtgccggcatcgcacgtatagatgaggtggtgaaaaacgcagaaggccacgtcatcgcactacacggctggcttgatccgacctcacgtcccggcatggaaggcgctcaccgcaaagtcaaaggcaccatccactgggtcagcgcaccacacgctgtagcagcggaaatccgcctgtacgaccggctgttctccattgaaaaaccagacgacaacaccgacggaaaaacctaccgcgacttcctcaacccagactccaaacgcgtcgtgcatggctacatcgaaccagcggcggcacaaaccgcaccagaacacgcattccaatttgaacgcttgggctacttcgtcacagaccggcatgaccacgatgccacacaccccgtctttaatcgcagcgtcacgctgcgcgacacctggcagcgcgactga

SEQ ID NO: 67931 - protein, 580 aa, Xylella fastidiosa
MSEITTTDAQAQPEKKDFIRQIIREDLAHGTHTHIHTRFPPEPNGYLHIGHAKAICLDFGVAAEFGGHCTLRMDDTNPSKEDPAFAAAIQEDVSWLGFHWNALRHTSDYFEVLYLAAEKLIADGKAYVCDLNSQQVREYRGTLTEAGRPSPWRERSPDENLELFRQMRAGTFPDGTRTLRAKIDMASGNINLRDPALYRIKHVEHQNTGNTWPIYPMYDFAHALSDAIEGITHSLCTLEFEDHRPLYDWCINHVDLPNNSHLLKPLLDKGFPQEPSQPRQIEFSRLNINYTVMSKRKLTALVDEKLVEGWDDPRMYTLQGLRRRGYTPAAMRLFVERIGISKQNSIIDFSVLENCLRENLDTIAPRRMATIAPMKLVLTNLAEDHEEQLIFPNHPKDDTQGTRTVPFSRELWIERDDFSEAPPKGWKRLIPGGEVRLRGAGIARIDEVVKNAEGHVIALHGWLDPTSRPGMEGAHRKVKGTIHWVSAPHAVAAEIRLYDRLFSIEKPDDNTDGKTYRDFLNPDSKRVVHGYIEPAAAQTAPEHAFQFERLGYFVTDRHDHDATHPVFNRSVTLRDTWQRD

SEQ ID NO: 67932 - DNA, 2385 bp, Glycine max
  CDS (1)..(2385)
atgccggcgaaggacgacggctccgacaaggagaagtgcctcgatctctttctcaaaatcggcttagacgagcgcaccgctaaaaacaccgtcgcaaacaacaaagtcaccgccaatctcactgcagtcatcgacgaggccggtgctactgatggatgcagccgaacggtcggaaatcttctttacacggttgcaacgaagtaccctgcaaatgccttgccacatcgcccaacattactacagtacattgtctcgttaaaggtgaaaacaactgcccagttagatgcagcattatcatttcttgctaccacaggctccgagaatcttgatttgaacaagtttgaagaagcttgtggtgttggtgttgaggtttcagaagaagatatcaaacaagctgttaatgaagttgtggaggagaacaaggctacaattttggagctacgttatcgaacaaatgtgggtgagttgctggggcatctgcgcaagaggctgccatggggtgatgcaaaagttgccaagcaacttgttgatgcaaaactatatgaactacttggtgatcggacagcagcagatgatgaaaagccttctagaaagaagaaggagaaacctgcaaaagtagaggataaggcagctcctgtttctacccctgaaaagtcacctgaagaagacgttaatccatttttaatattccctaatccagaggaaaatttcaaggtgcatactgaagtgccttttagtgatggtagtattttgagatgttgcaatacaagagatctgcttgacaaacacttaaaagcaacaggtggaaaagtcttgacccggtttccacccgaacctaatggatatttgcatattggccatgcaaaagcaatgtttattgattttgggttggcgaaagacagggatggaggttgctatctgaggtatgatgatacaaatcctgaagcagaaaagaaagagtatattgatcatattgaagaaattgtccagtggatgggttggaaaccatttaagattacttacacaagtgattacttccaagaattgtacgaattagcagtggagctcataaaaaagggtcatgcttatgttgatcatcagacacctgatgagataaaggagtatagggagaagaaactgaacagtccttggagagacagaccaatttcagagtcattgaaactctttgaggatatgaaaaatggcagtatcgaagaaggaaaagccacacttagaatgaagcaagacatgcagagtgataactacaatatgtatgaccttattgcatatagaattaagtttaccccacaccctcatgctggagacaaatggtgtatctatccaagttatgattatgcacactgcattgtggattctctagagaatatcacacattcactgtgtacacttgaatttgagacacgtcgtgcatcatactattggttgttgcatgcgttaggcatttaccaaccttatgtgtgggagtattcaaggttgaatgtctctaacacagttatgtcaaagcgtaagctaaatcgtctagttacagagaagtgggttgatgggtgggatgatcctcgtttgatgacactagctggtttgcggcgtagaggcatgaccccaactgcaatcaatgcttttgtccgaggaattggaataactagaagtgatggcactttgatttctgtggaacgccttgaatatcatgttagggaagaattgaacaaaacagcacctcgtgcaatggttgtcctacatccactcaaggttgtcattactaatcttgaagccaactcagcaattgaggttgatgcaaagaaatggcctgatgctcaagctgatgatgcttctgctttctacaagattccattttccaatgttgtatatattgaacattcggacttccggatgcaagattcaaaagattattatggccttgctcctgggaaatctgtgatactcagatatgcatttcctataaagtgcactgaagttattctagctgatgataatgagactattcttgaaattcgagccgagtatgatccttcaaagaagaccaagcctaagggggttctccattgggttgctcaaccttctcctggagttgatccattgaaggtggaagtcagattgtttgagaggctattcctatcagagaatcccgctgaacttgacaactggcttggcgatttgaacccaaattccaaagtgataattcccgatgcatatggtgtgtcttccatacagaatgcaaaagttggggacaatttccaatttgaaagattaggctattttgtggttgaccgggactcgacatcagaaaaacttgtttttaataggactgtcaccttaaagggcagctatagcaaaggtggaaagtag

SEQ ID NO: 67933 - protein, 794 aa, Glycine max
MPAKDDGSDKEKCLDLFLKIGLDERTAKNTVANNKVTANLTAVIDEAGATDGCSRTVGNLLYTVATKYPANALPHRPTLLQYIVSLKVKTTAQLDAALSFLATTGSENLDLNKFEEACGVGVEVSEEDIKQAVNEVVEENKATILELRYRTNVGELLGHLRKRLPWGDAKVAKQLVDAKLYELLGDRTAADDEKPSRKKKEKPAKVEDKAAPVSTPEKSPEEDVNPFLIFPNPEENFKVHTEVPFSDGSILRCCNTRDLLDKHLKATGGKVLTRFPPEPNGYLHIGHAKAMFIDFGLAKDRDGGCYLRYDDTNPEAEKKEYIDHIEEIVQWMGWKPFKITYTSDYFQELYELAVELIKKGHAYVDHQTPDEIKEYREKKLNSPWRDRPISESLKLFEDMKNGSIEEGKATLRMKQDMQSDNYNMYDLIAYRIKFTPHPHAGDKWCIYPSYDYAHCIVDSLENITHSLCTLEFETRRASYYWLLHALGIYQPYVWEYSRLNVSNTVMSKRKLNRLVTEKWVDGWDDPRLMTLAGLRRRGMTPTAINAFVRGIGITRSDGTLISVERLEYHVREELNKTAPRAMVVLHPLKVVITNLEANSAIEVDAKKWPDAQADDASAFYKIPFSNVVYIEHSDFRMQDSKDYYGLAPGKSVILRYAFPIKCTEVILADDNETILEIRAEYDPSKKTKPKGVLHWVAQPSPGVDPLKVEVRLFERLFLSENPAELDNWLGDLNPNSKVIIPDAYGVSSIQNAKVGDNFQFERLGYFVVDRDSTSEKLVFNRTVTLKGSYSKGGK

SEQ ID NO: 67934 - DNA, 2388 bp, Hordeum vulgare
  CDS (1)..(2388)
atggtcgacggggagaaggcctcggccccgcccctgctgcggctggagacgctgctcgcgctcggcctcgaccagcgcacggccgagaacgcgctggtcaatagcaaggtcaccgccaacctagccgccgtcgtagccgaggctgggataactggatgcgacaagtccgtcgggaatcttctgtacgcagttgccacgaagtacccaaataatgcacttgtccatcgtcctgctctcattagctacatcgtttcgaccaagatcaagaaccctgcacagctagatgctgctctgtcgtttcttactaataccggtcctgaatctttggatattgggaagtttgaagaagcctgtggtgtaggtgtggttgtttctattgaagagattcagtcaactgtctctgaggttctgaaggaaaacctggaagctatattggagcagcgctatcacataaatgttggtggcctatgcggacaggtcaggaagcggcacccctggggcgatgccaaggcaacaaaggaggagattgagaagaagcttgctgagatactaggtccgaagacggaagctgacaatgtaaaaccagtgaaaaagaagaaggagaaaccggcaaaagttgaggagaaaaaggttgcagtagccactgccgccccaccatctgaggaggaattgaatccttatacaatatttccccagccagcggaaaacaataaggttcatacagaaatattcttcagcgatgggaacatatggagggcgcataacacgaaggagatattagagaaacatcttaaggcaactggtggaaaagtgatgacgcgtttcccaccagaacctaatggataccttcatatcggtcatgctaaggctatgtttattgattttggattggctaaagagcgaaatggtcactgttatctcaggtttgatgacacaaatccagaagctgaaaagaaagaatatatagaccacatccaggagatagtcaagtggatggggtgggagccctataaagttacatatacaagtgattatttccaagctttatatgagcatgcagttgagttaatacggaaagggctagcctatgtggatcaccagactgcagaacaaatcaaggaatacagggaaaagaagatggatagtccatggagggacaggcccattgaagagtctttgcagttatttgaagacatgcggcgtgggttgattgctgagggtgctgcaactctccgaatgaagcaggacatgcagaatgataacaagaacatgtctgatttaatagcatatagaataaaattcactcctcatccacatgctggcgacaaatggtgtatctatccaagctatgactatgctcattgcatggtggattcacttgaaaacattacacattctttgtgcacgcttgagttcgacatacgccgcccgtcatactactggctacttgttgccttgggtttgtaccagccacatgtttgggagtattcgaggctaaacatatcacatactatgatgtccaaaagaaagttgaatcggcttgtgacagagaagtgggtagatgggtgggatgatcctcgtttgttgactttggcgggactgaggcgacggggagtatcagcaactgcgatcaattcatttatccgtggaattgggataacgagaagtgacaatagcttaattcgtgttgaccgtcttgaatatcatatcagagaagaactgaataaaacagcttctcgaaccatggttgttttgcatcctctaaaggttgtaataaccaacttggaagatggaaaagtcatagaccttgatggaaaaaagtggcctgatgctcctgctgatgaagcatcgtcctactacaaggttcctttctcaaaaattgtctacattgaaaaaactgattttcgcgtgaaagactcgaaagattactatgggctggcacctggtaaatctgccctgctgaggtatgcattcccgataaaatgcacagaggttatttatggtgataatccagatgatattgttgaaattcgagccgagtatgacccctcaaagacctccaaacctaagggtgttctgcactgggttgcccagccagcacctggagttgagccattaaaggtcgaaataagattgtttgagaaattattcttatcggagaatcctgccgaattggaagattggcttggtgatcttaacccgcactcgaaagaggttgtaaaggacgcctatgctgtaccgtcactcgccaccgcggttgtgggcgacaatttccagtttgagcggcttggctactttgctgtggacacggactcgactcccgagaagcttgtgttcaacaggactgtaaccctgcgcgactcttatgggaaggctggacccaagtga

SEQ ID NO: 67935 - protein, 795 aa, Hordeum vulgare
MVDGEKASAPPLLRLETLLALGLDQRTAENALVNSKVTANLAAVVAEAGITGCDKSVGNLLYAVATKYPNNALVHRPALISYIVSTKIKNPAQLDAALSFLTNTGPESLDIGKFEEACGVGVVVSIEEIQSTVSEVLKENLEAILEQRYHINVGGLCGQVRKRHPWGDAKATKEEIEKKLAEILGPKTEADNVKPVKKKKEKPAKVEEKKVAVATAAPPSEEELNPYTIFPQPAENNKVHTEIFFSDGNIWRAHNTKEILEKHLKATGGKVMTRFPPEPNGYLHIGHAKAMFIDFGLAKERNGHCYLRFDDTNPEAEKKEYIDHIQEIVKWMGWEPYKVTYTSDYFQALYEHAVELIRKGLAYVDHQTAEQIKEYREKKMDSPWRDRPIEESLQLFEDMRRGLIAEGAATLRMKQDMQNDNKNMSDLIAYRIKFTPHPHAGDKWCIYPSYDYAHCMVDSLENITHSLCTLEFDIRRPSYYWLLVALGLYQPHVWEYSRLNISHTMMSKRKLNRLVTEKWVDGWDDPRLLTLAGLRRRGVSATAINSFIRGIGITRSDNSLIRVDRLEYHIREELNKTASRTMVVLHPLKVVITNLEDGKVIDLDGKKWPDAPADEASSYYKVPFSKIVYIEKTDFRVKDSKDYYGLAPGKSALLRYAFPIKCTEVIYGDNPDDIVEIRAEYDPSKTSKPKGVLHWVAQPAPGVEPLKVEIRLFEKLFLSENPAELEDWLGDLNPHSKEVVKDAYAVPSLATAVVGDNFQFERLGYFAVDTDSTPEKLVFNRTVTLRDSYGKAGPK

SEQ ID NO: 67936 - DNA, 2388 bp, Triticum aestivum
  CDS (1)..(2388)
atggtcgacggcgagaaggccccggccccggccctgctgcagctggagacgctgctggcgctcggcctcgaccagcgcacggccgagaacgcgctggtcaatagcaaggtcaccgccaacctagccgccgtcgtagccgaggctggtataactggatgcgacaagtccgttgggaatcttctgtacgcagttgccacgaaatacccaaataatgcacttgtccatcgtcccgctctcattaactacatcgtttcgacgaagattaagaaccctgcacagctagatgctgctctgtcgtttcttaccaacactggtcctgaatctttggatattgggaagtttgaagaagcctgtggtgtaggtgtggttgtttctattgaagagattcagtcaactgttgctgaggttctaaaggaaaacatggaagctatattagagcagcggtatcacataaatgttggtggcctatgcggacaggtcaggaagcggcacccctggggcgatgctaaggcaacaaaggaggagattgagaagaagcttgctgagatactaggtccaaagacggaagctgacaatgtaaaaccagtgaaaaagaagaaggaaaaaccagcaaaagttgaggagaaaaaagttgcagtagccactgctgccccaccatctgaggaggaactgaatccttatacaatatttccccagccagaggaaaacaataaggttcatacagaaatattcttcagcgatgggaacatatggagggcacacaacacaaaggagatattagagaaacatcttaaggcaactggtggaaaagtgatgacccgtttcccgccagaacctaatggatatcttcatatcggtcatgctaaggctatgtttattgattttggattggctaaagagcgaaatggtcactgttatctcaggtttgatgacacaaatccagaagctgaaaagaaagaatatatagaccacattcaggagatagtcaagtggatgggatgggagccctataaagttacatatacaagtgattatttccaagatttatatgagcatgcagttgagttaatacggaaagggctagcctatgtggatcaccagactgcagaacaaatcaaggaatacagggaaaagaagatggatagtccatggagggataggcccattgaagagtctctgcagttatttgaagacatgcgacgcgggttgattgctgagggtgcagcaactctccgaatgaagcaggacatgcagaatgataacaagaacatgtctgatttaatagcatatagaataaaattcactcctcatccgcatgctggcgacaaatggtgtatctatccaagctatgactatgctcattgcatggtggattcacttgaaaacattacacattctttgtgcacgctcgagttcgacattcgtcgcccgtcatactactggctacttgttgccttgggcttgtaccagccatatgtttgggagtattcaaggctaaacatatcacatactatgatgtccaaaagaaagttgaatcggcttgtgacagagaagtgggtagatgggtgggatgatcctcgcttgttgactttggcaggactgaggcgacggggagtatcagcaaatgcgatcaattcatttatccgtggaattgggataacgagaagtgacaatagcttaattcgtgttgaccgtcttgaatatcatatcagagaagaactgaataaaacagcttctcgaaccatggtggttttgcatcctctaaaggttgtaataactaacttggaagatggaaaagtcatagaccttgatggaaaaaagtggcctgatgctcctgctgatgaagcttcgtcctactacaaggttcctttctcaaaaatcatctacattgaaaaaactgattttcgcgtgaaggactccaaagattactatggactggctcctggtaaatctgccctgctgaggtatgcattcccgataaaatgcacagaggttatttatggtgataatccagatgatattgttgaaattcgagccgagtatgacccttcaaagacctctaaacctaagggtgttctgcactgggttgcccagccagcacctggagttgatccgttaaaggttgaaataagattatttgagaaattattcctatctgagaatcccgccgaattggaagactggctgggtgatcttaacccgcactcaaaggaggtagtaaaggacgcctatgctgtaccttcactggccaccgcggttctgggcgacaagttccagtttgagcgacttggctacttcgctgtggacacggactcgacgcccgagaagcttgtgttcaacaggactgtaaccctgcgcgactcttatgggaaggctggacccaagtga

SEQ ID NO: 67937 - protein, 795 aa, Triticum aestivum
MVDGEKAPAPALLQLETLLALGLDQRTAENALVNSKVTANLAAVVAEAGITGCDKSVGNLLYAVATKYPNNALVHRPALINYIVSTKIKNPAQLDAALSFLTNTGPESLDIGKFEEACGVGVVVSIEEIQSTVAEVLKENMEAILEQRYHINVGGLCGQVRKRHPWGDAKATKEEIEKKLAEILGPKTEADNVKPVKKKKEKPAKVEEKKVAVATAAPPSEEELNPYTIFPQPEENNKVHTEIFFSDGNIWRAHNTKEILEKHLKATGGKVMTRFPPEPNGYLHIGHAKAMFIDFGLAKERNGHCYLRFDDTNPEAEKKEYIDHIQEIVKWMGWEPYKVTYTSDYFQDLYEHAVELIRKGLAYVDHQTAEQIKEYREKKMDSPWRDRPIEESLQLFEDMRRGLIAEGAATLRMKQDMQNDNKNMSDLIAYRIKFTPHPHAGDKWCIYPSYDYAHCMVDSLENITHSLCTLEFDIRRPSYYWLLVALGLYQPYVWEYSRLNISHTMMSKRKLNRLVTEKWVDGWDDPRLLTLAGLRRRGVSANAINSFIRGIGITRSDNSLIRVDRLEYHIREELNKTASRTMVVLHPLKVVITNLEDGKVIDLDGKKWPDAPADEASSYYKVPFSKIIYIEKTDFRVKDSKDYYGLAPGKSALLRYAFPIKCTEVIYGDNPDDIVEIRAEYDPSKTSKPKGVLHWVAQPAPGVDPLKVEIRLFEKLFLSENPAELEDWLGDLNPHSKEVVKDAYAVPSLATAVLGDKFQFERLGYFAVDTDSTPEKLVFNRTVTLRDSYGKAGPK

SEQ ID NO: 67938 - DNA, 2388 bp, Glycine max
  CDS (1)..(2388)
atgccggcgaaggacgacggctccgacaaggagaagtgcctcgatctctttctcaagatcggcttagacgagcgcacggctaaaaacacggtcgccaacaacaaagtcactgccaatctcacttccgtcatcgacgaggccggtgctactgatggatgcagccgaacggtcggaaattttctttacacggttgcgacgaagtaccctgcaaatgccttgccgcatcgcccaacattactacagtacattgtctcgttaaaggtgaaaacaactgcccagttagatgcagcattatcatttcttgctaccacaggctccgagaatcttgatttggaccggtttgaagaagcttgtggtgttggtgttgaggtttcagaagaagatatcaaacaagctgttagtgaagttgttgaggagaacaaggctacaattttggagctacgttatcgaacaaatgtgggtgagttgctggggcatgtgcgcaagaggctgccatggggtgatgcaaaaggttgccaaggcaacttgttgatgcaaaactatatgaacttacttggtgatcggacagcagcagatgatgaaaagccttctagaaagaagaaggagaaacctgctaaagtagaggataaggcagctcctgtttctacccctgaaaagtcacctgaagaagaccttaatccatttttaatattccctaatccagaggaaaatttcaaggtgcatactgaagtgccttttagtgatggtagtattttgagatgttgcaatacaagagatctgcttgacaaacacttaaaagcaacaggtggaaaagtcttgacccggtttccacccgaacctaatggatatttgcatattggccatgcaaaagcaatgtttattgattttgggttggcgaaagacagggatggaggtggcacttccaggtatgatgatacaaatcctgaagcagaaaagaaagagtatattgatcatattgaagaaattgtccagtggatgggttggaaaccatttaagattacttacacaagtgattacttccaagaattgtacgaattagcagtggagctcataaaaaagggtcatgcttatgttgatcatcagacacctgatgagataaaggagtatagggagaagaaactgaacagtccttggagagacagaccaatttcagagtcattgaaactctttgaggatatgaaaaatggcagtatcgaagaaggaaaagccactcttagaatgaagcaggacatgcagagtgataactacaatatgtatgaccttattgcatatagaattaagtttaccccacaccctcatgctggagacaaatggtgtatctatccaagttatgattatgcacactgcattgtggattctctagagaatatcacacattcactgtgtacacttgaatttgagacacgtcgtgcatcatactattggttgttgcatgcgttaggcatttaccaaccttatgtgtgggagtattcaaggttgaatgtctctaacacagttatgtcaaagcgtaagctaaatcgtctagttacagagaagtgggttgatgggtgggatgatcctcgtttgatgacactagctggtttgcggcgtagaggcatgaccccaactgcaatcaatgcttttgtccgaggaattggaataactagaagtgatggcactttgatttctgtggaacgccttgaatatcatgttagggaagaattgaacaaaacagcacctcgtgcaatggttgtcctacatccactcaaggttgtcattactaatcttgaagccaactcagcaattgaggttgatgcaaagaaatggcctgatgctcaagctgatgatgcttctgctttctacaagattccattttccaatgttgtatatattgaacattcggacttccggatgcaagattcaaaagattattatggccttgctcctgggaaatctgtgatactcagatatgcatttcctataaagtgcactgaagttattctagctgatgataatgagactattcttgaaattcgagccgagtatgatccttcaaagaagaccaagcctaagggggttctccattgggttgctcaaccttctcctggagttgatccattgaaggtggaagtcagattgtttgagaggctattcctatcagagaatcccgctgaacttgacaactggcttggcgatttgaacccaaattccaaagtgataattcccgatgcatatggtgtgtcttccatacagaatgcaaaagttggggacaatttccaatttgaaagattaggctattttgtggttgaccgggactcgacatcagaaaaacttgtttttaataggactgtcaccttaaagggcagctatagcaaaggtggaaagtag

SEQ ID NO: 67939 - protein, 795 aa, Glycine max
MPAKDDGSDKEKCLDLFLKIGLDERTAKNTVANNKVTANLTSVIDEAGATDGCSRTVGNFLYTVATKYPANALPHRPTLLQYIVSLKVKTTAQLDAALSFLATTGSENLDLDRFEEACGVGVEVSEEDIKQAVSEVVEENKATILELRYRTNVGELLGHVRKRLPWGDAKGCQGNLLMQNYMNLLGDRTAADDEKPSRKKKEKPAKVEDKAAPVSTPEKSPEEDLNPFLIFPNPEENFKVHTEVPFSDGSILRCCNTRDLLDKHLKATGGKVLTRFPPEPNGYLHIGHAKAMFIDFGLAKDRDGGGTSRYDDTNPEAEKKEYIDHIEEIVQWMGWKPFKITYTSDYFQELYELAVELIKKGHAYVDHQTPDEIKEYREKKLNSPWRDRPISESLKLFEDMKNGSIEEGKATLRMKQDMQSDNYNMYDLIAYRIKFTPHPHAGDKWCIYPSYDYAHCIVDSLENITHSLCTLEFETRRASYYWLLHALGIYQPYVWEYSRLNVSNTVMSKRKLNRLVTEKWVDGWDDPRLMTLAGLRRRGMTPTAINAFVRGIGITRSDGTLISVERLEYHVREELNKTAPRAMVVLHPLKVVITNLEANSAIEVDAKKWPDAQADDASAFYKIPFSNVVYIEHSDFRMQDSKDYYGLAPGKSVILRYAFPIKCTEVILADDNETILEIRAEYDPSKKTKPKGVLHWVAQPSPGVDPLKVEVRLFERLFLSENPAELDNWLGDLNPNSKVIIPDAYGVSSIQNAKVGDNFQFERLGYFVVDRDSTSEKLVFNRTVTLKGSYSKGGK

SEQ ID NO: 67940 - DNA, 2391 bp, Zea mays
  CDS (1)..(2391)
atgggcacagggggagacggggataaggcggggccggcgctgccgctggaggcgcttttggcgctcgggctcgaccagcgcaccgccgagaacgcgctcgtcaacgccaaggtcaccgccaacctcgccgccgtcatagctgaggctggtataaaggaatgtgacaagtcaattggtaatcttctatatgcagttgccaccaagtacccaactaatgcacttgttcatcgccctgtccttattagctatgtcttgtcaacaaagataaagagccctgcacagctagatgctgccctctcatttcttactaatactggtcctgattctctagatgtggacaagtttgaagaagcatgtggtgtaggcgtggttgtttctattgaggaaattaaatctactgttactgacattcttgaggagaatatggaagctataaaggagcagcggtatcacataaatgttggtatgctatgtggacaggttaggaagagacacccctggggtgatgctaaggcagtaaaggaggaaattgacaagaggcttgcagaaatcctaggtccaaagacagaagctgacagtataaaaccagtgaaaaagaagaaggaaaaaacagcaaaagttgaggagaaaaaagttgcagttgccactactgccccaccatctgaggaggaattgaacccgtatactatatttccccaaccagaggaaaactttaaggttcatacagaaatatttttcagtgatgggaacatatggagagcacataacacaaaggaaattttggaaaaacatctcaaggcaactggaggaaaagtgatgacccgttttccaccagaacctaatggatatcttcatattggtcatgccaaggctatgtttatcgattttggtctggctaaggagcgaaatggccattgctaccttaggtttgacgacacaaatccggaagctgaaaagaaagaatacatagatcacattcaggaaatcgtccattggatgggatgggagccctacaaagtaacatacacgagtgactatttccaagctttgtatgaacatgccgttgagttaatacagaaagggctagcatatgtggatcaccagactgcagaagaaatcaaggaatacagggaaaagaagatggatagtccatggaggggtaggccaattgaagagtctctgaaattatttgaagacatgaggcgtgggttgattgcagagggtgcagcaactctccgtatgaagcaggatatgcaaaatgagaacaaaaatatgtctgacttaatagcatatagaataaaattcaccccccatccacatgctggcgacaagtggtgtgtctatccgagctatgactacgctcattgcatggtggattctcttgaaaacatcacacattcgctgtgcacacttgagtttgacatacgtcgcccttcatactactggctacttgttgccttgggcctttatcaaccatatgtgtgggaatattcgaggctaaacatatcaaatactgtgatgtctaaaagaaagttgaatcgacttgtgacagagaagtgggtagatgggtgggatgatccccgcttgttgacactggctggtctccggcgacggggagtatcatcaactgcaataaattcctttattcgtggaatcgggataacgagaagtgacaatagcttaattcgtgttgatcgtctagaatatcacatcagggaggagcttaacaaaacagcccctcgaaccatggttgttttgcgacctctaaaggtggtaataactaacttggaagaaggaaaagtactagaccttgatggcaaaatgtggcctgatgcttctgatactgatgcttcctcccactataaggttccgttctcaagaactgtctacattgagaaaactgattttcgcctaaaggactcaaaagactactatgggctagcccctggtaaatctgtcatgctaaggtatgcgttccccataaaatgcacagatgttatctctggtgatagtcctgatgatattgttgaaattcgagctgaatatgatcctttgaagacttctaaactgaagggtgttcttcactggattgctgagccagcacctggtgtagagccattgaaggtggaagtaagattattcgagaaattgttcatgtcagagaatcctgctgaattggaagattggcttggcgatcttaacccacactcgaaagaggtgataaaggatgcttatgctgtaccatcacttgccactgcggttctgggtgacaagttccagtttgagcggcttggttacttcgccgtggatactgactccacacctgagaaactcgtgttcaacagaactgttaccctccgtgattcgttcgggaaagctggacccaagtga

SEQ ID NO: 67941 - protein, 796 aa, Zea mays
MGTGGDGDKAGPALPLEALLALGLDQRTAENALVNAKVTANLAAVIAEAGIKECDKSIGNLLYAVATKYPTNALVHRPVLISYVLSTKIKSPAQLDAALSFLTNTGPDSLDVDKFEEACGVGVVVSIEEIKSTVTDILEENMEAIKEQRYHINVGMLCGQVRKRHPWGDAKAVKEEIDKRLAEILGPKTEADSIKPVKKKKEKTAKVEEKKVAVATTAPPSEEELNPYTIFPQPEENFKVHTEIFFSDGNIWRAHNTKEILEKHLKATGGKVMTRFPPEPNGYLHIGHAKAMFIDFGLAKERNGHCYLRFDDTNPEAEKKEYIDHIQEIVHWMGWEPYKVTYTSDYFQALYEHAVELIQKGLAYVDHQTAEEIKEYREKKMDSPWRGRPIEESLKLFEDMRRGLIAEGAATLRMKQDMQNENKNMSDLIAYRIKFTPHPHAGDKWCVYPSYDYAHCMVDSLENITHSLCTLEFDIRRPSYYWLLVALGLYQPYVWEYSRLNISNTVMSKRKLNRLVTEKWVDGWDDPRLLTLAGLRRRGVSSTAINSFIRGIGITRSDNSLIRVDRLEYHIREELNKTAPRTMVVLRPLKVVITNLEEGKVLDLDGKMWPDASDTDASSHYKVPFSRTVYIEKTDFRLKDSKDYYGLAPGKSVMLRYAFPIKCTDVISGDSPDDIVEIRAEYDPLKTSKLKGVLHWIAEPAPGVEPLKVEVRLFEKLFMSENPAELEDWLGDLNPHSKEVIKDAYAVPSLATAVLGDKFQFERLGYFAVDTDSTPEKLVFNRTVTLRDSFGKAGPK

SEQ ID NO: 67942 - DNA, 25 bp, Artificial sequence
  primer
atgtcttctgtagaagaattgactc

SEQ ID NO: 67943 - DNA, 24 bp, Artificial sequence
  primer
tcacttggaagttgcgtccttcaa

SEQ ID NO: 67944 - protein, 669 aa, Artificial sequence
  consensus sequence
  Variant (2)..(19): Xaa in position 2 to 19 is any amino acid
  Variant (20)..(45): Xaa in position 20 to 45 is any or no amino acid
  Variant (63)..(63): Xaa in position 63 is any amino acid
  Variant (65)..(66): Xaa in position 65 to 66 is any amino acid
  Variant (70)..(70): Xaa in position 70 is any amino acid
  Variant (72)..(75): Xaa in position 72 to 75 is any amino acid
  Variant (76)..(76): Xaa in position 76 is any or no amino acid
  Variant (78)..(78): Xaa in position 78 is any amino acid
  Variant (80)..(80): Xaa in position 80 is any amino acid
  Variant (89)..(90): Xaa in position 89 to 90 is any amino acid
  Variant (92)..(94): Xaa in position 92 to 94 is any amino acid
  Variant (96)..(98): Xaa in position 96 to 98 is any amino acid
  Variant (100)..(102): Xaa in position 100 to 102 is any amino acid
  Variant (104)..(104): Xaa in position 104 is any amino acid
  Variant (108)..(112): Xaa in position 108 to 112 is any amino acid
  Variant (113)..(124): Xaa in position 113 to 124 is any or no amino acid
  Variant (126)..(126): Xaa in position 126 is any amino acid
  Variant (129)..(129): Xaa in position 129 is any amino acid
  Variant (130)..(130): Xaa in position 130 is any or no amino acid
  Variant (133)..(134): Xaa in position 133 to 134 is any amino acid
  Variant (136)..(137): Xaa in position 136 to 137 is any amino acid
  Variant (140)..(141): Xaa in position 140 to 141 is any amino acid
  Variant (143)..(143): Xaa in position 143 is any amino acid
  Variant (147)..(155): Xaa in position 147 to 155 is any amino acid
  Variant (156)..(162): Xaa in position 156 to 162 is any or no amino acid
  Variant (165)..(168): Xaa in position 165 to 168 is any amino acid
  Variant (169)..(172): Xaa in position 169 to 172 is any or no amino acid
  Variant (175)..(175): Xaa in position 175 is any amino acid
  Variant (177)..(177): Xaa in position 177 is any amino acid
  Variant (179)..(181): Xaa in position 179 to 181 is any amino acid
  Variant (183)..(183): Xaa in position 183 is any amino acid
  Variant (185)..(185): Xaa in position 185 is any amino acid
  Variant (188)..(189): Xaa in position 188 to 189 is any amino acid
  Variant (191)..(192): Xaa in position 191 to 192 is any amino acid
  Variant (194)..(197): Xaa in position 194 to 197 is any amino acid
  Variant (199)..(201): Xaa in position 199 to 201 is any amino acid
  Variant (204)..(204): Xaa in position 204 is any amino acid
  Variant (206)..(206): Xaa in position 206 is any amino acid
  Variant (209)..(213): Xaa in position 209 to 213 is any amino acid
  Variant (214)..(216): Xaa in position 214 to 216 is any or no amino acid
  Variant (219)..(220): Xaa in position 219 to 220 is any amino acid
  Variant (224)..(226): Xaa in position 224 to 226 is any amino acid
  Variant (227)..(228): Xaa in position 227 to 228 is any or no amino acid
  Variant (230)..(231): Xaa in position 230 to 231 is any amino acid
  Variant (234)..(235): Xaa in position 234 to 235 is any amino acid
  Variant (237)..(237): Xaa in position 237 is any amino acid
  Variant (241)..(241): Xaa in position 241 is any amino acid
  Variant (244)..(245): Xaa in position 244 to 245 is any amino acid
  Variant (247)..(249): Xaa in position 247 to 249 is any amino acid
  Variant (251)..(252): Xaa in position 251 to 252 is any amino acid
  Variant (254)..(254): Xaa in position 254 is any amino acid
  Variant (259)..(259): Xaa in position 259 is any amino acid
  Variant (265)..(267): Xaa in position 265 to 267 is any amino acid
  Variant (269)..(270): Xaa in position 269 to 270 is any amino acid
  Variant (272)..(272): Xaa in position 272 is any amino acid
  Variant (274)..(284): Xaa in position 274 to 284 is any amino acid
  Variant (285)..(303): Xaa in position 285 to 303 is any or no amino acid
  Variant (305)..(305): Xaa in position 305 is any amino acid
  Variant (307)..(308): Xaa in position 307 to 308 is any amino acid
  Variant (312)..(317): Xaa in position 312 to 317 is any amino acid
  Variant (323)..(324): Xaa in position 323 to 324 is any amino acid
  Variant (327)..(330): Xaa in position 327 to 330 is any amino acid
  Variant (332)..(332): Xaa in position 332 is any amino acid
  Variant (339)..(340): Xaa in position 339 to 340 is any amino acid
  Variant (342)..(343): Xaa in position 342 to 343 is any amino acid
  Variant (345)..(345): Xaa in position 345 is any amino acid
  Variant (350)..(357): Xaa in position 350 to 357 is any amino acid
  Variant (359)..(362): Xaa in position 359 to 362 is any amino acid
  Variant (364)..(375): Xaa in position 364 to 375 is any amino acid
  Variant (376)..(376): Xaa in position 376 is any or no amino acid
  Variant (379)..(381): Xaa in position 379 to 381 is any amino acid
  Variant (383)..(384): Xaa in position 383 to 384 is any amino acid
  Variant (386)..(388): Xaa in position 386 to 388 is any amino acid
  Variant (390)..(390): Xaa in position 390 is any amino acid
  Variant (392)..(392): Xaa in position 392 is any amino acid
  Variant (394)..(394): Xaa in position 394 is any amino acid
  Variant (396)..(397): Xaa in position 396 to 397 is any amino acid
  Variant (399)..(399): Xaa in position 399 is any amino acid
  Variant (401)..(404): Xaa in position 401 to 404 is any amino acid
  Variant (406)..(416): Xaa in position 406 to 416 is any amino acid
  Variant (417)..(439): Xaa in position 417 to 439 is any or no amino acid
  Variant (441)..(443): Xaa in position 441 to 443 is any amino acid
  Variant (444)..(448): Xaa in position 444 to 448 is any or no amino acid
  Variant (450)..(454): Xaa in position 450 to 454 is any amino acid
  Variant (456)..(460): Xaa in position 456 to 460 is any amino acid
  Variant (462)..(464): Xaa in position 462 to 464 is any amino acid
  Variant (467)..(467): Xaa in position 467 is any amino acid
  Variant (469)..(475): Xaa in position 469 to 475 is any amino acid
  Variant (476)..(478): Xaa in position 476 to 478 is any or no amino acid
  Variant (481)..(487): Xaa in position 481 to 487 is any amino acid
  Variant (488)..(488): Xaa in position 488 is any or no amino acid
  Variant (490)..(503): Xaa in position 490 to 503 is any amino acid
  Variant (504)..(506): Xaa in position 504 to 506 is any or no amino acid
  Variant (508)..(515): Xaa in position 508 to 515 is any amino acid
  Variant (516)..(531): Xaa in position 516 to 531 is any or no amino acid
  Variant (533)..(533): Xaa in position 533 is any amino acid
  Variant (535)..(537): Xaa in position 535 to 537 is any amino acid
  Variant (541)..(548): Xaa in position 541 to 548 is any amino acid
  Variant (549)..(555): Xaa in position 549 to 555 is any or no amino acid
  Variant (557)..(557): Xaa in position 557 is any amino acid
  Variant (559)..(560): Xaa in position 559 to 560 is any amino acid
  Variant (563)..(566): Xaa in position 563 to 566 is any amino acid
  Variant (568)..(568): Xaa in position 568 is any amino acid
  Variant (569)..(590): Xaa in position 569 to 590 is any or no amino acid
  Variant (593)..(593): Xaa in position 593 is any amino acid
  Variant (595)..(602): Xaa in position 595 to 602 is any amino acid
  Variant (603)..(603): Xaa in position 603 is any or no amino acid
  Variant (605)..(615): Xaa in position 605 to 615 is any amino acid
  Variant (616)..(640): Xaa in position 616 to 640 is any or no amino acid
  Variant (645)..(645): Xaa in position 645 is any amino acid
  Variant (649)..(650): Xaa in position 649 to 650 is any amino acid
  Variant (652)..(655): Xaa in position 652 to 655 is any amino acid
  Variant (656)..(661): Xaa in position 656 to 661 is any or no amino acid
  Variant (666)..(666): Xaa in position 666 is any amino acid
  Variant (668)..(668): Xaa in position 668 is any amino acid
FXXXXXXXXXXXXXXXXXXXXXXXXXXXXXXXXXXXXXXXXXXXXTRFPPEPNGYLHIGHAKXIXXNFGXAXXXXXGXCXLRFDDTNPXXEXXXYXXXIXXXVXWLGXXXXXXXXXXXXXXXXXSXYFXXLYXXAXXLIXXGXAYVXXXXXXXXXXXXXXXXRGXXXXXXXXSPXRXRXXXEXLXLFXXMXXGXXXXGXXXLRXKXDMXXXXXXXXDPXXYRIXXXXXHXXTGXXWXIYPXYDXXHXXXDXXEXITHSXCTLEFXXXRXXYXWXXXXXXXXXXXXXXXXXXXXXXXXXXXXXXQXEXXRLNXXXXXXSKRKLXXLVXXXXVXGWDDPRXXTXXGXRRRGXXXXXXXXFXXXXGXXXXXXXXXXXXXLEXXXRXXLXXXAXRXMXVXXPXKXXXXNXXXXXXXXXXXXXXXXXXXXXXXXXXXXXXXXXXPXXXXXXXXGXXXXXFXXXXXIXXXDFXEXXXXXXXXXXRLXXXXXXXXLXXXXXXXXXXXXXXXXXGXXXXXXXXXXXXXXXXXXXXXXXXKXKXXXHWVXXXXXXXXXXXXXXXRXYXXLFXXXXPXXXXXXXXXXXXXXXXXXXXXXXNPXSXXXXXXXXXEXXXXXXXXXXXXXXXXXXXXXXXXXXXXXXXXXXXXQFERXGYFXXDXXXXXXXXXXVFNRXVXL

SEQ ID NO: 67945 - protein, 36 aa, Artificial sequence
  protein pattern
  Variant (4)..(4): Xaa in position 4 is any amino acid
  Variant (7)..(7): Xaa in position 7 is Phe, Trp or Tyr
  Variant (8)..(8): Xaa in position 8 is Ala, Ser or Thr
  Variant (10)..(12): Xaa in position 10 to 12 is any amino acid
  Variant (14)..(14): Xaa in position 14 is any amino acid
  Variant (15)..(15): Xaa in position 15 is Phe, Ile, Leu, Met or Val
  Variant (17)..(17): Xaa in position 17 is any amino acid
  Variant (18)..(18): Xaa in position 18 is Ile or Val
  Variant (19)..(19): Xaa in position 19 is Ser or Thr
  Variant (22)..(22): Xaa in position 22 is Phe, Ile, Leu or Val
  Variant (25)..(25): Xaa in position 25 is any amino acid
  Variant (28)..(30): Xaa in position 28 to 30 is any amino acid
  Variant (31)..(31): Xaa in position 31 is Lys or Arg
  Variant (32)..(33): Xaa in position 32 to 33 is any amino acid
  Variant (35)..(35): Xaa in position 35 is any amino acid
IYPXYDXXHXXXDXXEXXXHSXCTXEFXXXXXXYXW

SEQ ID NO: 67946 - protein, 25 aa, Artificial sequence
  protein pattern
  Variant (13)..(18): Xaa in position 13 to 18 is any or no amino acid
  Variant (20)..(20): Xaa in position 20 is Cys or Gly
  Variant (21)..(21): Xaa in position 21 is any amino acid
  Variant (22)..(22): Xaa in position 22 is Ala, Asn or Ser
  Variant (23)..(23): Xaa in position 23 is any amino acid
  Variant (24)..(24): Xaa in position 24 is Ala, Gly or Ser
  Variant (25)..(25): Xaa in position 25 is Ile, Leu, Met or Val
TRFPPEPNGYLHXXXXXXIXXXXXX

SEQ ID NO: 67947 - protein, 34 aa, Artificial sequence
  protein pattern
  Variant (2)..(3): Xaa in position 2 to 3 is any amino acid
  Variant (4)..(4): Xaa in position 4 is any or no amino acid
  Variant (10)..(10): Xaa in position 10 is Leu or Met
  Variant (11)..(11): Xaa in position 11 is any amino acid
  Variant (13)..(13): Xaa in position 13 is Ile, Leu, Met or Val
  Variant (14)..(14): Xaa in position 14 is any amino acid
  Variant (15)..(15): Xaa in position 15 is Ala or Gly
  Variant (16)..(16): Xaa in position 16 is any amino acid
  Variant (19)..(19): Xaa in position 19 is Lys or Arg
  Variant (21)..(22): Xaa in position 21 to 22 is any amino acid
  Variant (23)..(23): Xaa in position 23 is Ala, Pro or Ser
  Variant (24)..(24): Xaa in position 24 is any amino acid
  Variant (25)..(25): Xaa in position 25 is Ala, Gly or Ser
  Variant (26)..(26): Xaa in position 26 is Phe, Ile, Leu, Met or Val
  Variant (27)..(28): Xaa in position 27 to 28 is any amino acid
  Variant (30)..(33): Xaa in position 30 to 33 is any amino acid
  Variant (34)..(34): Xaa in position 34 is Ala or Gly
VXXXWDDPRXXTXXXXRRXGXXXXXXXXFXXXXX

SEQ ID NO: 67948 - protein, 32 aa, Artificial sequence
  protein pattern
  Variant (2)..(2): Xaa in position 2 is any amino acid
  Variant (3)..(3): Xaa in position 3 is any or no amino acid
  Variant (5)..(5): Xaa in position 5 is any amino acid
  Variant (8)..(8): Xaa in position 8 is any amino acid
  Variant (14)..(15): Xaa in position 14 to 15 is any or no amino acid
  Variant (17)..(19): Xaa in position 17 to 19 is any amino acid
  Variant (20)..(20): Xaa in position 20 is Phe or Tyr
  Variant (21)..(23): Xaa in position 21 to 23 is any amino acid
  Variant (24)..(24): Xaa in position 24 is Phe or Ile
  Variant (25)..(27): Xaa in position 25 to 27 is any amino acid
  Variant (28)..(28): Xaa in position 28 is Ile or Val
  Variant (29)..(29): Xaa in position 29 is any amino acid
  Variant (31)..(31): Xaa in position 31 is Leu or Met
  Variant (32)..(32): Xaa in position 32 is Glu or Gly
GXXCXLRXDDTNPXXEXXXXXXXXXXXXXWXX

SEQ ID NO: 67949 - protein, 28 aa, Artificial sequence
  protein pattern
  Variant (2)..(2): Xaa in position 2 is any amino acid
  Variant (3)..(5): Xaa in position 3 to 5 is any or no amino acid
  Variant (7)..(7): Xaa in position 7 is any amino acid
  Variant (9)..(9): Xaa in position 9 is Phe or Tyr
  Variant (10)..(10): Xaa in position 10 is Ala, Gly or Ser
  Variant (13)..(13): Xaa in position 13 is any amino acid
  Variant (14)..(14): Xaa in position 14 is Ile, Leu, Met or Val
  Variant (15)..(17): Xaa in position 15 to 17 is any amino acid
  Variant (18)..(18): Xaa in position 18 is Ile, Leu, Met or Val
  Variant (19)..(19): Xaa in position 19 is any amino acid
  Variant (23)..(23): Xaa in position 23 is any amino acid
  Variant (24)..(24): Xaa in position 24 is Ile or Leu
  Variant (25)..(26): Xaa in position 25 to 26 is any amino acid
  Variant (27)..(27): Xaa in position 27 is Leu or Met
  Variant (28)..(28): Xaa in position 28 is Ile or Val
PXXXXQXEXXRLXXXXXXXSKRXXXXXX

SEQ ID NO: 67950 - protein, 28 aa, Artificial sequence
  protein pattern
  Variant (2)..(4): Xaa in position 2 to 4 is any amino acid
  Variant (6)..(7): Xaa in position 6 to 7 is any amino acid
  Variant (8)..(8): Xaa in position 8 is Phe, Leu or Met
  Variant (9)..(11): Xaa in position 9 to 11 is any amino acid
  Variant (12)..(12): Xaa in position 12 is Ala, Asp, Ser, Thr or Val
  Variant (13)..(13): Xaa in position 13 is any amino acid
  Variant (15)..(17): Xaa in position 15 to 17 is any amino acid
  Variant (19)..(19): Xaa in position 19 is Ile, Leu, Met or Val
  Variant (20)..(20): Xaa in position 20 is any amino acid
  Variant (22)..(22): Xaa in position 22 is Ile, Leu or Val
  Variant (23)..(23): Xaa in position 23 is any amino acid
  Variant (24)..(24): Xaa in position 24 is Ile, Leu or Val
  Variant (25)..(25): Xaa in position 25 is any amino acid
  Variant (26)..(26): Xaa in position 26 is Ile, Leu or Val
  Variant (27)..(27): Xaa in position 27 is any amino acid
EXXXRXXXXXXXXRXXXVXXPXXXXXXN

SEQ ID NO: 67951 - DNA, 1155 bp, Saccharomyces cerevisiae
  CDS (1)..(1155)
atgcttgtcttgagaaagttggaagaaaattataggcccttaaatatactcaaaatgcagaaagtgtcatcttcttacatggcattttttggccgtcaagggacctccatctccatttcgatattaaaagcgataataagaaacaaatcaagagaattccaaacaatactgagtcagaacggcaaggaatcaaatgatctattgcagtacatcttccagaacccttccagccccggaagcattgcagtctgctccaaccttttctatcaattgtaccagatactctcgaatccttctgatcctcaagatcaagcaccaaaaaatatgactaagatcgattcccccgacaagaaagacaatgaacaatgttaccttttgggtcactcgctaggcgagttaacatgtctgagtgttaattcactgttttcgttaaaggatctttttgatattgctaattttagaaataagttaatggtaacatctactgaaaagtacttagtagcccacaatatcaacagatccaacaaatttgaaatgtgggcactctcttctccgagggccacagatttaccgcaagaagtgcaaaaactactaaattcccctaatttattatcatcttcacaaaataccatttctgtagcaaatgcaaattcagtaaagcaatgtgtagtcaccggtctggttgatgatttagagtccttaagaacagaattgaacttaaggttcccgcgtttaagaattacagaattaactaacccatacaacatccccttccataatagcactgtgttgaggcccgttcaggaaccactctatgactacatttgggatatattaaagaaaaacggaactcacacgttgatggagttgaaccatccaataatagctaacttagatggtaatatatcttactatattcatcatgccctagatagattcgttaagtgttcaagcaggactgtgcaattcaccatgtgttatgataccataaactctggaaccccagtggaaattgataagagtatttgctttggcccgggcaatgtgatttataaccttattcggagaaattgtccccaagtggacactatagaatacacctctttagcaactatagacgcttatcacaaggcggcagaggagaacaaagattga

SEQ ID NO: 67952 - protein, 384 aa, Saccharomyces cerevisiae
MLVLRKLEENYRPLNILKMQKVSSSYMAFFGRQGTSISISILKAIIRNKSREFQTILSQNGKESNDLLQYIFQNPSSPGSIAVCSNLFYQLYQILSNPSDPQDQAPKNMTKIDSPDKKDNEQCYLLGHSLGELTCLSVNSLFSLKDLFDIANFRNKLMVTSTEKYLVAHNINRSNKFEMWALSSPRATDLPQEVQKLLNSPNLLSSSQNTISVANANSVKQCVVTGLVDDLESLRTELNLRFPRLRITELTNPYNIPFHNSTVLRPVQEPLYDYIWDILKKNGTHTLMELNHPIIANLDGNISYYIHHALDRFVKCSSRTVQFTMCYDTINSGTPVEIDKSICFGPGNVIYNLIRRNCPQVDTIEYTSLATIDAYHKAAEENKD

SEQ ID NO: 67953 - DNA, 1035 bp, Candida glabrata CBS 138
  CDS (1)..(1035)
atgaagttggttacattccctggacaaggcactccgatccctgttgctgtactgaaggccttgattcggaacaaagatgcgcagttcaacactatcttgaatcgtggactgcacagacgggacttactagagtacatattcagaaacccatctagccccggtagcatcgcagtgtgttccaatttcctatatgaaatgtatggtctgatctccgaggacttgcggccccaccatcgggactcgcttatactgcttgggcactcgctaggtgagctgacctgcttgaaggtgaatgagctgttcactacaaaggagctgtttgagattgccaactacagaaatgacctaatggtcaagtacacggaacagtacctgagggcttacaacagaagaggatcgaagtttgagatgtgggcgctgtcgtctccaaaggctactgacttaccatatgagatacataaattgctcacggagtcacctacgttcccgggatcccacacaatatcggtcgccaatgcaaattcagttaagcagtgcgtggtaacgggtctagtcgaggacttagaagcattgagaacagaattacacttgaatataccaagactaagaatttcagaactaaccaatccacataacttgccattccacaacaacacagtactaagaccaattcaggaaccactatacgatttcatatggaagataatgaagaataacggcacacatacatggactacgctaaaccacccaatagtttccaacctcgacggtaaagaaaccaaatttatacaccacgcactggataagtttgtaaagtgtagctcaaccactgtacagttcacaaaatgctacgataccattaacagaatagcggaagccacaaaagatcaagaggaccccttggatgcagctatctgtatcgggccgggaaatgtcatctacaacttaatcagaaggaatgtccctagcctgaaatgcgtggaatactcttcaatggccaccatagactcctaccatggtacacacgacttataa

SEQ ID NO: 67954 - protein, 344 aa, Candida glabrata CBS 138
MKLVTFPGQGTPIPVAVLKALIRNKDAQFNTILNRGLHRRDLLEYIFRNPSSPGSIAVCSNFLYEMYGLISEDLRPHHRDSLILLGHSLGELTCLKVNELFTTKELFEIANYRNDLMVKYTEQYLRAYNRRGSKFEMWALSSPKATDLPYEIHKLLTESPTFPGSHTISVANANSVKQCVVTGLVEDLEALRTELHLNIPRLRISELTNPHNLPFHNNTVLRPIQEPLYDFIWKIMKNNGTHTWTTLNHPIVSNLDGKETKFIHHALDKFVKCSSTTVQFTKCYDTINRIAEATKDQEDPLDAAICIGPGNVIYNLIRRNVPSLKCVEYSSMATIDSYHGTHDL

SEQ ID NO: 67955 - DNA, 972 bp, Kluyveromyces lactis NRRL Y-1140
  CDS (1)..(972)
atgtccggacggttattaagttttccgggtcagggcagcaaagtacttctagacaggttacagcgttgggctgctaatgtctcgggatttaaagacgtaagcttgatcgacagattcactggtacattggaacaaccggaaactatcgctgcatgttcgaaccttttatatagcaattggttaacggataatgcgaatcagaattcaaacggtaaaacttatgttattggacattcgcttggagaattgaatgctctgaatgcaagtgtcaatggattggccttcggatgtaaagatatcatagaaattgcatcgtttcggaaccaactaatggtagaagccacccaacgctatttagaaaagtgtagaataaccgatgattcctttgagttgtgggccgttacaaatgtccgaagtaaaaatttaaggaaggacctatcggctgttttagattccaatataacaaactcttcggttgacaaaccgtgtagcatcaaactggctaatgacaatgcagtcaaccaatgcgttattacagggttatccaatgatatccagaaacttgtggaaacatgcaagatggaaaatctaagacacaaatttactaaattggatagtccgttttccattcctttccacaatataaatgttctacgatccattcaggaaccattatacgatttcatttgggatacactaaaggaaaatgggaaacaccattttatcaatgagaaggtggaaaatggcattttttctaatatagacggtaagttgacgtaccaattcgatactgcgttagaaaattttgtcgcaggtagttgcaacattgtcaacttcgtcgattcctgtaaaaacatatcttcactatcaagcgtagaaaaggcataccattttggtcctggtacatctattgggaaacttattgaacgcaacctcaagacatgcgatatctctcataattttatcgattga

SEQ ID NO: 67956 - protein, 323 aa, Kluyveromyces lactis NRRL Y-1140
MSGRLLSFPGQGSKVLLDRLQRWAANVSGFKDVSLIDRFTGTLEQPETIAACSNLLYSNWLTDNANQNSNGKTYVIGHSLGELNALNASVNGLAFGCKDIIEIASFRNQLMVEATQRYLEKCRITDDSFELWAVTNVRSKNLRKDLSAVLDSNITNSSVDKPCSIKLANDNAVNQCVITGLSNDIQKLVETCKMENLRHKFTKLDSPFSIPFHNINVLRSIQEPLYDFIWDTLKENGKHHFINEKVENGIFSNIDGKLTYQFDTALENFVAGSCNIVNFVDSCKNISSLSSVEKAYHFGPGTSIGKLIERNLKTCDISHNFID

SEQ ID NO: 67957 - DNA, 1083 bp, Saccharomyces cerevisiae
  CDS (1)..(1083)
atgaagctactaaccttcccaggtcaagggacctccatctccatttcgatattaaaagcgataataagaaacaaatcaagagaattccaaacaatactgagtcagaacggcaaggaatcaaatgatctattgcagtacatcttccagaacccttccagccccggaagcattgcagtctgctccaaccttttctatcaattgtaccagatactctcgaatccttctgatcctcaagatcaagcaccaaaaaatatgactaagatcgattcccccgacaagaaagacaatgaacaatgttaccttttgggtcactcgctaggcgagttaacatgtctgagtgttaattcactgttttcgttaaaggatctttttgatattgctaattttagaaataagttaatggtaacatctactgaaaagtacttagtagcccacaatatcaacagatccaacaaatttgaaatgtgggcactctcttctccgagggccacagatttaccgcaagaagtgcaaaaactactaaattcccctaatttattatcatcttcacaaaataccatttctgtagcaaatgcaaattcagtaaagcaatgtgtagtcaccggtctggttgatgatttagagtccttaagaacagaattgaacttaaggttcccgcgtttaagaattacagaattaactaacccatacaacatccccttccataatagcactgtgttgaggcccgttcaggaaccactctatgactacatttgggatatattaaagaaaaacggaactcacacgttgatggagttgaaccatccaataatagctaacttagatggtaatatatcttactatattcatcatgccctagatagattcgttaagtgttcaagcaggactgtgcaattcaccatgtgttatgataccataaactctggaaccccagtggaaattgataagagtatttgctttggcccgggcaatgtgatttataaccttattcggagaaattgtccccaagtggacactatagaatacacctctttagcaactatagacgcttatcacaaggcggcagaggagaacaaagattga

SEQ ID NO: 67958 - protein, 360 aa, Saccharomyces cerevisiae
MKLLTFPGQGTSISISILKAIIRNKSREFQTILSQNGKESNDLLQYIFQNPSSPGSIAVCSNLFYQLYQILSNPSDPQDQAPKNMTKIDSPDKKDNEQCYLLGHSLGELTCLSVNSLFSLKDLFDIANFRNKLMVTSTEKYLVAHNINRSNKFEMWALSSPRATDLPQEVQKLLNSPNLLSSSQNTISVANANSVKQCVVTGLVDDLESLRTELNLRFPRLRITELTNPYNIPFHNSTVLRPVQEPLYDYIWDILKKNGTHTLMELNHPIIANLDGNISYYIHHALDRFVKCSSRTVQFTMCYDTINSGTPVEIDKSICFGPGNVIYNLIRRNCPQVDTIEYTSLATIDAYHKAAEENKD

SEQ ID NO: 67959 - DNA, 25 bp, Artificial sequence
  primer
atgcttgtcttgagaaagttggaag

SEQ ID NO: 67960 - DNA, 23 bp, Artificial sequence
  primer
tcaatctttgttctcctctgccg

SEQ ID NO: 67961 - protein, 360 aa, Artificial sequence
  consensus sequence
  Variant (2)..(3): Xaa in position 2 to 3 is any amino acid
  Variant (6)..(12): Xaa in position 6 to 12 is any amino acid
  Variant (14)..(18): Xaa in position 14 to 18 is any amino acid
  Variant (20)..(21): Xaa in position 20 to 21 is any amino acid
  Variant (22)..(31): Xaa in position 22 to 31 is any or no amino acid
  Variant (33)..(37): Xaa in position 33 to 37 is any amino acid
  Variant (39)..(48): Xaa in position 39 to 48 is any amino acid
  Variant (50)..(51): Xaa in position 50 to 51 is any amino acid
  Variant (54)..(54): Xaa in position 54 is any amino acid
  Variant (58)..(59): Xaa in position 58 to 59 is any amino acid
  Variant (61)..(79): Xaa in position 61 to 79 is any amino acid
  Variant (80)..(97): Xaa in position 80 to 97 is any or no amino acid
  Variant (105)..(106): Xaa in position 105 to 106 is any amino acid
  Variant (108)..(112): Xaa in position 108 to 112 is any amino acid
  Variant (113)..(115): Xaa in position 113 to 115 is any or no amino acid
  Variant (117)..(118): Xaa in position 117 to 118 is any amino acid
  Variant (120)..(123): Xaa in position 120 to 123 is any amino acid
  Variant (126)..(127): Xaa in position 126 to 127 is any amino acid
  Variant (130)..(130): Xaa in position 130 is any amino acid
  Variant (134)..(135): Xaa in position 134 to 135 is any amino acid
  Variant (137)..(138): Xaa in position 137 to 138 is any amino acid
  Variant (141)..(149): Xaa in position 141 to 149 is any amino acid
  Variant (150)..(150): Xaa in position 150 is any or no amino acid
  Variant (153)..(153): Xaa in position 153 is any amino acid
  Variant (156)..(163): Xaa in position 156 to 163 is any amino acid
  Variant (165)..(171): Xaa in position 165 to 171 is any amino acid
  Variant (173)..(183): Xaa in position 173 to 183 is any amino acid
  Variant (184)..(186): Xaa in position 184 to 186 is any or no amino acid
  Variant (188)..(189): Xaa in position 188 to 189 is any amino acid
  Variant (192)..(192): Xaa in position 192 is any amino acid
  Variant (194)..(194): Xaa in position 194 is any amino acid
  Variant (196)..(196): Xaa in position 196 is any amino acid
  Variant (200)..(200): Xaa in position 200 is any amino acid
  Variant (204)..(205): Xaa in position 204 to 205 is any amino acid
  Variant (207)..(209): Xaa in position 207 to 209 is any amino acid
  Variant (211)..(219): Xaa in position 211 to 219 is any amino acid
  Variant (221)..(225): Xaa in position 221 to 225 is any amino acid
  Variant (227)..(228): Xaa in position 227 to 228 is any amino acid
  Variant (230)..(232): Xaa in position 230 to 232 is any amino acid
  Variant (237)..(238): Xaa in position 237 to 238 is any amino acid
  Variant (242)..(243): Xaa in position 242 to 243 is any amino acid
  Variant (250)..(250): Xaa in position 250 is any amino acid
  Variant (253)..(255): Xaa in position 253 to 255 is any amino acid
  Variant (257)..(257): Xaa in position 257 is any amino acid
  Variant (260)..(260): Xaa in position 260 is any amino acid
  Variant (262)..(269): Xaa in position 262 to 269 is any amino acid
  Variant (270)..(271): Xaa in position 270 to 271 is any or no amino acid
  Variant (273)..(274): Xaa in position 273 to 274 is any amino acid
  Variant (276)..(276): Xaa in position 276 is any amino acid
  Variant (279)..(286): Xaa in position 279 to 286 is any amino acid
  Variant (289)..(290): Xaa in position 289 to 290 is any amino acid
  Variant (293)..(294): Xaa in position 293 to 294 is any amino acid
  Variant (296)..(298): Xaa in position 296 to 298 is any amino acid
  Variant (300)..(300): Xaa in position 300 is any amino acid
  Variant (302)..(307): Xaa in position 302 to 307 is any amino acid
  Variant (309)..(320): Xaa in position 309 to 320 is any amino acid
  Variant (321)..(328): Xaa in position 321 to 328 is any or no amino acid
  Variant (332)..(333): Xaa in position 332 to 333 is any amino acid
  Variant (335)..(336): Xaa in position 335 to 336 is any amino acid
  Variant (339)..(339): Xaa in position 339 is any amino acid
  Variant (341)..(343): Xaa in position 341 to 343 is any amino acid
  Variant (344)..(354): Xaa in position 344 to 354 is any or no amino acid
  Variant (356)..(356): Xaa in position 356 is any amino acid
  Variant (358)..(359): Xaa in position 358 to 359 is any amino acid
FXXQGXXXXXXXLXXXXXNXXXXXXXXXXXXGXXXXXLXXXXXXXXXXPXXIAXCSNXXYXXXXXXXXXXXXXXXXXXXXXXXXXXXXXXXXXXXXXGHSLGELXXLXXXXXXXXFXXKXXXXIAXXRNXLMVXXTXXYLXXXXXXXXXXFEXWAXXXXXXXXLXXXXXXXLXXXXXXXXXXXXXXIXXANXNXVXQCVXTGLXXDXXXLXXXXXXXXXRXXXXXLXXPXXXPFHNXXVLRXXQEPLYDXIWXXXKXNGXHXXXXXXXXXXIXXNXDGXXXXXXXXALXXFVXXSXXXVXFXXXXXXIXXXXXXXXXXXXXXXXXXXXGPGXXIXXLIXRXXXXXXXXXXXXXXTXDXXH

SEQ ID NO: 67962 - protein, 61 aa, Artificial sequence
  protein pattern
  Variant (2)..(2): Xaa in position 2 is any amino acid
  Variant (4)..(4): Xaa in position 4 is any amino acid
  Variant (8)..(8): Xaa in position 8 is Ile or Val
  Variant (12)..(12): Xaa in position 12 is any amino acid
  Variant (13)..(13): Xaa in position 13 is any or no amino acid
  Variant (15)..(17): Xaa in position 15 to 17 is any amino acid
  Variant (18)..(18): Xaa in position 18 is any or no amino acid
  Variant (20)..(20): Xaa in position 20 is any amino acid
  Variant (21)..(22): Xaa in position 21 to 22 is Glu or Thr
  Variant (23)..(24): Xaa in position 23 to 24 is any amino acid
  Variant (25)..(25): Xaa in position 25 is Leu or Met
  Variant (26)..(26): Xaa in position 26 is Glu, Asn or Arg
  Variant (27)..(27): Xaa in position 27 is any amino acid
  Variant (28)..(28): Xaa in position 28 is Leu or Pro
  Variant (30)..(30): Xaa in position 30 is any amino acid
  Variant (31)..(31): Xaa in position 31 is Lys or Arg
  Variant (32)..(32): Xaa in position 32 is Phe or Ile
  Variant (33)..(33): Xaa in position 33 is Ser or Thr
  Variant (34)..(34): Xaa in position 34 is Glu or Lys
  Variant (36)..(36): Xaa in position 36 is Asp or Thr
  Variant (37)..(37): Xaa in position 37 is Asn or Ser
  Variant (39)..(39): Xaa in position 39 is Phe, His or Tyr
  Variant (40)..(40): Xaa in position 40 is Asn or Ser
  Variant (41)..(41): Xaa in position 41 is Ile or Leu
  Variant (46)..(46): Xaa in position 46 is any amino acid
  Variant (47)..(47): Xaa in position 47 is Asn or Thr
  Variant (51)..(51): Xaa in position 51 is Pro or Ser
  Variant (52)..(52): Xaa in position 52 is Ile or Val
  Variant (59)..(59): Xaa in position 59 is Phe or Tyr
NXVXQCVXTGLXXDXXXXLXXXXXXXXXRXXXXXLXXPXXXPFHNXXVLRXXQEPLYDXIW

SEQ ID NO: 67963 - protein, 57 aa, Artificial sequence
  protein pattern
  Variant (2)..(6): Xaa in position 2 to 6 is any amino acid
  Variant (7)..(8): Xaa in position 7 to 8 is any or no amino acid
  Variant (10)..(10): Xaa in position 10 is any amino acid
  Variant (11)..(11): Xaa in position 11 is any or no amino acid
  Variant (13)..(13): Xaa in position 13 is Phe, Ile or Val
  Variant (14)..(14): Xaa in position 14 is Ala or Ser
  Variant (16)..(16): Xaa in position 16 is Ile or Leu
  Variant (19)..(20): Xaa in position 19 to 20 is any amino acid
  Variant (21)..(21): Xaa in position 21 is Ser or Thr
  Variant (22)..(23): Xaa in position 22 to 23 is any amino acid
  Variant (24)..(24): Xaa in position 24 is Phe or Ile
  Variant (25)..(25): Xaa in position 25 is Asp or His
  Variant (26)..(26): Xaa in position 26 is any amino acid
  Variant (29)..(29): Xaa in position 29 is Asp or Glu
  Variant (30)..(30): Xaa in position 30 is any amino acid
  Variant (33)..(33): Xaa in position 33 is any amino acid
  Variant (34)..(34): Xaa in position 34 is Cys or Gly
  Variant (36)..(36): Xaa in position 36 is Cys or Ser
  Variant (37)..(38): Xaa in position 37 to 38 is any amino acid
  Variant (40)..(40): Xaa in position 40 is Asn or Gln
  Variant (42)..(42): Xaa in position 42 is Thr or Val
  Variant (43)..(43): Xaa in position 43 is any amino acid
  Variant (44)..(44): Xaa in position 44 is Cys or Ser
  Variant (45)..(45): Xaa in position 45 is any amino acid
  Variant (46)..(46): Xaa in position 46 is Asp or Lys
  Variant (47)..(47): Xaa in position 47 is Asn or Thr
  Variant (49)..(49): Xaa in position 49 is Asn or Ser
  Variant (50)..(50): Xaa in position 50 is Arg or Ser
  Variant (51)..(51): Xaa in position 51 is Gly, Ile or Leu
  Variant (52)..(52): Xaa in position 52 is Ala, Ser or Thr
  Variant (53)..(53): Xaa in position 53 is Glu, Pro or Ser
  Variant (54)..(54): Xaa in position 54 is Ala or Val
  Variant (55)..(55): Xaa in position 55 is Glu or Thr
  Variant (56)..(56): Xaa in position 56 is any amino acid
  Variant (57)..(57): Xaa in position 57 is Ala or Asp
HXXXXXXXNXXIXXNXDGXXXXXXXXALXXFVXXSXXXVXFXXXXXXIXXXXXXXXX

SEQ ID NO: 67964 - protein, 31 aa, Artificial sequence
  protein pattern
  Variant (2)..(2): Xaa in position 2 is Gly, Ser or Thr
  Variant (3)..(3): Xaa in position 3 is any amino acid
  Variant (5)..(5): Xaa in position 5 is Asp or Glu
  Variant (6)..(6): Xaa in position 6 is Ile or Leu
  Variant (7)..(7): Xaa in position 7 is Phe or Ile
  Variant (8)..(8): Xaa in position 8 is Asp or Glu
  Variant (11)..(11): Xaa in position 11 is Asn or Ser
  Variant (12)..(12): Xaa in position 12 is Phe or Tyr
  Variant (15)..(15): Xaa in position 15 is any amino acid
  Variant (19)..(20): Xaa in position 19 to 20 is any or no amino acid
  Variant (22)..(23): Xaa in position 22 to 23 is any amino acid
  Variant (24)..(25): Xaa in position 24 to 25 is any or no amino acid
  Variant (28)..(30): Xaa in position 28 to 30 is any amino acid
  Variant (31)..(31): Xaa in position 31 is Asn or Arg
FXXKXXXXIAXXRNXLMVXXTXXXXYLXXXX

SEQ ID NO: 67965 - protein, 47 aa, Artificial sequence
  protein pattern
  Variant (2)..(3): Xaa in position 2 to 3 is any amino acid
  Variant (4)..(5): Xaa in position 4 to 5 is any or no amino acid
  Variant (7)..(8): Xaa in position 7 to 8 is any or no amino acid
  Variant (10)..(10): Xaa in position 10 is Ile or Leu
  Variant (11)..(11): Xaa in position 11 is Asp, Glu or Gln
  Variant (12)..(12): Xaa in position 12 is any amino acid
  Variant (13)..(13): Xaa in position 13 is Phe or Ile
  Variant (14)..(15): Xaa in position 14 to 15 is any amino acid
  Variant (16)..(16): Xaa in position 16 is Asn or Thr
  Variant (17)..(17): Xaa in position 17 is Leu or Pro
  Variant (18)..(18): Xaa in position 18 is Glu or Ser
  Variant (19)..(19): Xaa in position 19 is Gln or Ser
  Variant (21)..(21): Xaa in position 21 is Glu or Gly
  Variant (22)..(22): Xaa in position 22 is Ser or Thr
  Variant (25)..(25): Xaa in position 25 is Ala or Val
  Variant (29)..(30): Xaa in position 29 to 30 is Phe or Leu
  Variant (32)..(32): Xaa in position 32 is Glu, Gln or Ser
  Variant (33)..(33): Xaa in position 33 is any amino acid
  Variant (34)..(34): Xaa in position 34 is Trp or Tyr
  Variant (35)..(37): Xaa in position 35 to 37 is any amino acid
  Variant (38)..(38): Xaa in position 38 is Asn or Ser
  Variant (39)..(39): Xaa in position 39 is Ala, Glu or Asn
  Variant (40)..(40): Xaa in position 40 is Asp, Asn or Pro
  Variant (41)..(41): Xaa in position 41 is any amino acid
  Variant (42)..(42): Xaa in position 42 is Asp, Asn or Arg
  Variant (43)..(43): Xaa in position 43 is Pro or Ser
  Variant (44)..(46): Xaa in position 44 to 46 is any amino acid
  Variant (47)..(47): Xaa in position 47 is Ala, Asp or Thr
GXXXXDXXLXXXXXXXXXXPXXIAXCSNXXYXXXXXXXXXXXXXXXX

SEQ ID NO: 67966 - protein, 31 aa, Artificial sequence
  protein pattern
  Variant (2)..(2): Xaa in position 2 is any amino acid
  Variant (3)..(4): Xaa in position 3 to 4 is any or no amino acid
  Variant (6)..(7): Xaa in position 6 to 7 is any or no amino acid
  Variant (9)..(13): Xaa in position 9 to 13 is any amino acid
  Variant (14)..(14): Xaa in position 14 is Cys, Ser or Thr
  Variant (15)..(15): Xaa in position 15 is Ala, Ile or Val
  Variant (16)..(17): Xaa in position 16 to 17 is any amino acid
  Variant (18)..(18): Xaa in position 18 is Asp, Ser or Thr
  Variant (20)..(20): Xaa in position 20 is any amino acid
  Variant (21)..(21): Xaa in position 21 is Ala or Ile
  Variant (23)..(23): Xaa in position 23 is any amino acid
  Variant (24)..(24): Xaa in position 24 is Asp or Ser
  Variant (25)..(25): Xaa in position 25 is Ala or Ser
  Variant (26)..(26): Xaa in position 26 is any amino acid
  Variant (27)..(27): Xaa in position 27 is Asp or His
  Variant (28)..(28): Xaa in position 28 is any amino acid
  Variant (29)..(29): Xaa in position 29 is Ala, Pro or Thr
  Variant (30)..(30): Xaa in position 30 is any amino acid
  Variant (31)..(31): Xaa in position 31 is Asp, Glu or Ser
NXXXRXXNXXXXXXXXXXSXXTXXXXXXXXX

SEQ ID NO: 67967 - protein, 12 aa, Artificial sequence
  protein pattern
  Variant (8)..(8): Xaa in position 8 is Asn or Thr
  Variant (9)..(9): Xaa in position 9 is Ala or Cys
  Variant (11)..(11): Xaa in position 11 is any amino acid
  Variant (12)..(12): Xaa in position 12 is Ala or Val
GHSLGELXXLXX

SEQ ID NO: 67968 - DNA, 2403 bp, Saccharomyces cerevisiae
  CDS (1)..(2403)
atggcttctgtacctaaacgccatacatacggtggcaacgttgtcactgatagggaccgtcattctcttcaaagaaacaatgagattttgcatcctatacataaaaatcagcgaaaacatgctaccttcggaccatacataatcggttccactttgggtgagggagaatttggtaaagttaagctgggttggaccaaggcttcctcctcgaacgaggttcctaagcaagtggcaatcaaattaattagaagagatacaatcaagaaagatgccgataaagaaattaaaatataccgcgaaattaacgcactgaagcatttaactcatcctaacattatctatttagaagaggtcctgcagaattcgaaatacattggaatagtgctagagtttgtatctgggggagaattctataagtatattcaacgtaagaggagattaaaggaatcttctgcatgcagattgtttgcccaattaattagtggggtcaattatatgcactacaaaggacttgttcatagggacttaaaactggaaaatttattattagataagcacgaaaatttagtcatcacggattttggttttgtgaatgaattttttgaagataacgaattaatgaaaacttcttgtggttcgccctgttatgcagcaccagaactagttgttagtaccaaggcatatgaagcaagaaaggcagatgtttggtcgtgtggtgttattctttatgcaatgctcgctggatatttgccgtgggatgacgatcatgaaaatccaacgggtgacgatattgctagactgtacaaatacatcacgcaaacacctcttaaatttcccgaatatataacccctattccaagagatttgctgaggcgaatactggtacccaatccaagaagaagaataaacttacaaacaataaaaaggcatgtgtggttgaagcctcatgaagcgtttttgagcattcagccgaactattgggatgaacacttacagaaggaacgtccgaaaccgccaaacaaaggtgacgttggtcgccactcaacttattcttcatcagcatcttcgtactcaaaaagtagggatagaaactctttaattatagagtcgactctagagcaacatcgaatgtctccacagcttgcgaccagcagaccagcatcaccaacattctctactggttccaaagtggtgttaaacgatacgaaaaatgacatgaaagaatctaatataaatggcgagcgtactagtgcatcatgcaggtacacacgtgattcgaagggcaacggccagacccaaatagaacaagtatcagctagacactcatccagaggcaataagcacacatcggtcgcgggactcgtaacaatccctggctcccccacaactgcaagaacaaggaatgcaccatcatcaaagcttactgagcatgtaaaagattctagtcagacaagctttactcaggaggaattccaccgtattggtaattatcacgtgcctcgcagtagacctaggccaacttcatattatcctggactcagtcgtaacaccgcggataatagtttagcggatattccagtaaataagttgggttcgaatggtaggttgacagatgccaaagacccggtaccgttgaacgcaatacacgataccaacaaagctacaatctccaacaattccattatgctattatcagaaggtccggctgcaaagacttccccagtagattaccattatgctattggcgacttaaaccatggtgacaaacccataactgaggttatcgacaaaattaataaggaccttactcataaagcagctgaaaatggttttcctcgagagagcatcgacccagagagtacctcaacgatattagttacgaaagaacccactaactccaccgatgaagatcatgtagaatctcagctggagaatgttggccactcttctaataaatcagacgcttcttctgataaagatagtaaaaagatctacgaaaaaaaaaggttcagcttcatgtcgttgtactcatccttaaatggttcaagatccactgttgaatctcgtacctcaaaagggaatgcacctcctgtttcatctagaaatccatcaggacaatcgaatagaagtaacattaaaataactcagcagcaaccacgtaacctttccgacagagttccaaatcccgataagaaaattaatgataatagaataagagacaacgcacctagctatgctgaaagcgagaatccgggaaggtctgtacgggcttctgttatggtgtcaacactacgagaagaaaatcgatcggaattgtcgaatgaagggaataatgtcgaggcacagacttcaacagcaagaaaggttctgaattttttcaaaagaaggagcatgagggtttga

SEQ ID NO: 67969 - protein, 800 aa, Saccharomyces cerevisiae
MASVPKRHTYGGNVVTDRDRHSLQRNNEILHPIHKNQRKHATFGPYIIGSTLGEGEFGKVKLGWTKASSSNEVPKQVAIKLIRRDTIKKDADKEIKIYREINALKHLTHPNIIYLEEVLQNSKYIGIVLEFVSGGEFYKYIQRKRRLKESSACRLFAQLISGVNYMHYKGLVHRDLKLENLLLDKHENLVITDFGFVNEFFEDNELMKTSCGSPCYAAPELVVSTKAYEARKADVWSCGVILYAMLAGYLPWDDDHENPTGDDIARLYKYITQTPLKFPEYITPIPRDLLRRILVPNPRRRINLQTIKRHVWLKPHEAFLSIQPNYWDEHLQKERPKPPNKGDVGRHSTYSSSASSYSKSRDRNSLIIESTLEQHRMSPQLATSRPASPTFSTGSKVVLNDTKNDMKESNINGERTSASCRYTRDSKGNGQTQIEQVSARHSSRGNKHTSVAGLVTIPGSPTTARTRNAPSSKLTEHVKDSSQTSFTQEEFHRIGNYHVPRSRPRPTSYYPGLSRNTADNSLADIPVNKLGSNGRLTDAKDPVPLNAIHDTNKATISNNSIMLLSEGPAAKTSPVDYHYAIGDLNHGDKPITEVIDKINKDLTHKAAENGFPRESIDPESTSTILVTKEPTNSTDEDHVESQLENVGHSSNKSDASSDKDSKKIYEKKRFSFMSLYSSLNGSRSTVESRTSKGNAPPVSSRNPSGQSNRSNIKITQQQPRNLSDRVPNPDKKINDNRIRDNAPSYAESENPGRSVRASVMVSTLREENRSELSNEGNNVEAQTSTARKVLNFFKRRSMRV

SEQ ID NO: 67970 - DNA, 2598 bp, Saccharomyces cerevisiae
  CDS (1)..(2598)
atgtcgtacaccaataaacgtcatacatactacggagggtttaccaacgatttgtctgacacatttcagtaccctcaaagaacagatgagcaaaggcggaaacatgtaacgtttggtccttatatcctagggtcgacgttaggagaaggagagttcggaaaagtgaagctaggctggccaaagaatttttcaaacagctctaattcaacttttgacttcccaaaacaagtagcaattaaacttatcaaacgtgatagcatatcgaatgattacaggaaagaagttaaaatatacagagaaatcaacgccttaaaacacttatcacatccgaatatcgtaaaattagaagaagtgttgcaaaattctaggtacattggtattgtcctagagtacgcatgcgggggagaattctataaatatattcaaaaaaaaaggaggcttaaggaaatgaatgcatgcaggttattttctcagctaataagtggagtacattacatacattctaagggacttgttcacagagatctcaaattggaaaatctattactagacaagaatgagaacctagttattacagattttgggtttgtcaatgagttttgctcacgaaacgaattaatgaagacgtcatgtggctctccatgctacgcagcgcctgaactagtgataagcgccgaaccatacgaagctagaaaagcagatatatggtcatgtggagttatactttacgctatactagctggatatttaccgtgggatgatgatccaaataatcctgaaggcagcgatataggaagactttataattatattaactccacaccattaaagttccctgattatattcttcctatacctcgggacttattaagacgcatgctggtctcagacccaaagaaaagaataaacctgaaacagatcaagaaacatgaatggctaaagcctcattcttcattcttatccataacacctgatgagtgggacaaactaaacaatactcaatccgtgttcagattagcaaaaccaagaagaagatatggatctagaccacaatccagttgttctacctcatctcttggctcaaggagtgataaaagggattcactggtcattgattcaactttaattactttcccggctccgcctcaagaatcacaaaatcatattataaccagaccggcttctattgcatctgaccagcggctgtcacctataagaagatctaataggcacaatagaagtaactctgctgcatccgttgccttgcaggcagtggtgaacgcagatagggaatatgtgttaagtcatgaacaatcattatccccagtacaaaacattagacaaactacgggaaacatgactgccagtctttcacctccaccagccataagtccaggcgatattataatcgaaaccacacctattaaaagaaatacaatttctgggagtagtattgtaccaagtttagaagaagagtcgtctaccacaatgcaaacaagcaagattcaaccaaataacatggcttcatcacaaaatcatcaatacaataaaaataagacccaaaatagtctccaatctgctaaaaatttctaccgtacgtcttcctcatcccatacaaagccacggccaacttcataccatcctggctcatacacaacacctccctacaattcaaatacgctctccatatatgagatcaacgaaaaagctaaaagtagcgcttcatcacaaacgctgaatcaaagagacacatccccatttgattccacaccataccttgccctagatacatgcataacctcatcctcttccatcgaaagctctccaaagttaattacgcacggccaattttcagtagcaaaaccctctgttgatttgcaaagcgtatctggtgacttgatcaagtataagagggacgctgatgtagtaacgagaatctatgatgaaaaatacaaacagaagcgcaaaagtttgagatatagcggcatattcagtgacatctcatgcgatacggtcaccgaagagtctgatgaattgaggccaccagaatctcctcttcaacaacatgaaggacaagaatcaattgataaggcgaaaacggaggacacaagtgaaaagggtagtaaaagtagcaacatcgcgaaagctacagcacaaaaacacgtcaataaccatctagaaagatcacttaacgaagcagagtcaacaaagaaaagatttagctttctttccttgtactcttatgatacttccaaatctagtttatactcatcaatggattccaaacggaaaccttctccaccttcccaaagacgcccaaaaaaggatgacagttatcaaacaaattcaaagaatcattatatcactgcttcaaatatgcaaacatcccatcaagtctcaaaagacctgcctgcaccaacgatggtgcaaaataaatgtactttagaaactaaaaaagcggtccgaagcaacaggtcctccataatggtatctgaggtcaacaaggcaagcgtagacaataaagcagcccaaagtccagaacattcaaccgcaaaaagagtattagggtttttcaaaagaagaagtatgaaaatctag

SEQ ID NO: 67971 - protein, 865 aa, Saccharomyces cerevisiae
MSYTNKRHTYYGGFTNDLSDTFQYPQRTDEQRRKHVTFGPYILGSTLGEGEFGKVKLGWPKNFSNSSNSTFDFPKQVAIKLIKRDSISNDYRKEVKIYREINALKHLSHPNIVKLEEVLQNSRYIGIVLEYACGGEFYKYIQKKRRLKEMNACRLFSQLISGVHYIHSKGLVHRDLKLENLLLDKNENLVITDFGFVNEFCSRNELMKTSCGSPCYAAPELVISAEPYEARKADIWSCGVILYAILAGYLPWDDDPNNPEGSDIGRLYNYINSTPLKFPDYILPIPRDLLRRMLVSDPKKRINLKQIKKHEWLKPHSSFLSITPDEWDKLNNTQSVFRLAKPRRRYGSRPQSSCSTSSLGSRSDKRDSLVIDSTLITFPAPPQESQNHIITRPASIASDQRLSPIRRSNRHNRSNSAASVALQAVVNADREYVLSHEQSLSPVQNIRQTTGNMTASLSPPPAISPGDIIIETTPIKRNTISGSSIVPSLEEESSTTMQTSKIQPNNMASSQNHQYNKNKTQNSLQSAKNFYRTSSSSHTKPRPTSYHPGSYTTPPYNSNTLSIYEINEKAKSSASSQTLNQRDTSPFDSTPYLALDTCITSSSSIESSPKLITHGQFSVAKPSVDLQSVSGDLIKYKRDADVVTRIYDEKYKQKRKSLRYSGIFSDISCDTVTEESDELRPPESPLQQHEGQESIDKAKTEDTSEKGSKSSNIAKATAQKHVNNHLERSLNEAESTKKRFSFLSLYSYDTSKSSLYSSMDSKRKPSPPSQRRPKKDDSYQTNSKNHYITASNMQTSHQVSKDLPAPTMVQNKCTLETKKAVRSNRSSIMVSEVNKASVDNKAAQSPEHSTAKRVLGFFKRRSMKI

SEQ ID NO: 67972 - DNA, 2682 bp, Vanderwaltozyma polyspora DSM 70294
  CDS (1)..(2682)
atgtcttcaatttcaaatcgacatacctactatgggggtggatctaatacccagcataccactaacatggttagatctccatcggatagactttcaaaacttaaaaggaaacaaattacgtttggcccttattatatcggatctactttgggtgaaggtgaatttggtaaagtaaagttgggttggacaagaaatccaacgtcaaaccaagaggtttccaaacaggttgcaattaaattaattagaagggataaaattgtgaaaaattcagaaaaggaaattaagatttttagagaaattaatgcattgaaacatctgacacatcctaatatagttaaattagaagaagtactccaaaattccaaatacattggtattgtattagaatatgcctcaggcggtgaattctatagatatatacaaaggaaaaggagattaaaagagactgctggttgcagattattcacacaattagtaagtggtgttaattatatgcattcaaaaggtctagtccatagagatctgaagttggaaaatctgttattggataaacatgaaaatttagtgataacagacttcggttttgtaaatgaattcttgaaagataatgatttaatgaagacttcctgtggttcaccttgctatgcagctcctgaattagttattagcactaaaccttatgaagctcgcaaggctgatatttggtcttgtggtatcattctttatgcaatgcttgctggatatttaccctgggatgatgatccacaaaatcctgaaggtgatgacattgcgagattatactattttatcaccagaacatctctaaagtttccagaatatatttcccctatccctagagacttactaagaaggttattagtctcagatccacgaaaaagattgaacatacgacaaatccaacaacatgaatggttaaggccgcattctgaatttttatcaataactccagaagactgggataataaaatgaagaccgaagttgctctgtctaatccacaacagaataatgagaaactgaataaggcctcatctgtggagtcatcaacgtcaaaatattctaatagtgacaaacgggacactttaatcatcgatacagctatgctcctatcacctgtaccaccgcaagaatatcaatcttatattataacaaaaccatcatctgtgaatgaagatacttctagttctacacaaaaaaataaaaaaatgcacagtagaagcaactcggcggcatcaatagcattacaggcagttgttgatgctgaacttgaagctagtcaaagaaatcaagaccatatcaatacagtcaaaaatgaagttaacaggaatgaaaatatgaacaccaaggaaaaacggagtaacaataatagtgacaataagaagcaagagtatattaatttacaacaagtttctagaaatgatacaatgcaagatagaagtatgggaattcgagccgaatttattcgatcagctggaaataatgaaagggaagatattcaactgaaaaaggtagaaacaaattacaatggtgaaaattccactagggggtcgcataattccggaaaacatagaaaacctagaccaacttcttatcatcctggatctagttctggaaggacaaatttgtctccttatgatttcaatacatttaatactaatacagagagttcaactaaaaaagttatcagtcaacttgaaacgttacagtttgattcgacaccttcattaatagtcgatactgaagctacaggcatgcctgttaattcgtctccaaagatcctctctcaacgttcattttctatgagtaagccatctttggacttacaaagtgttactgctgatttgattaagtttcaaggagaaaatgattcagctgcgaagtctattcatgaacatgtaatgggcactaattggcaatatgttccacattctattagttctcctaaaaattcacttggccgcactcctgaagagtatgattcgtctttacaacatccaccaagtagcggaggtaaatatgaaactgtattaactgattctaatacatcatataattctattacacaggagagtgagaaatccaagacctctccgatgtatgaagcatatatgtttactgatgtttcgacacaaagagataaaatcaaagaggaaaagaagggaagtaaaaagagattcagcattttatcattttattcctcatataataacaattctaaaactagtttcgattcgtctgatacaaagagccgcgcagatcatagttccattggaagcccccaattgaccccaggtcatgccacgcaaggaagagcagatctatcagtaagagatcgtaatactagaatgccttcaatgacgaataataccaataattcacacttgaagaatgagagaattatctcccaagcagaaagtgatattgaagatgtttacagaaggcgttctagtaaaccaattaagaacgataagcgttattctagtattgaaattggtagagacaataccgccaataaaataggtacgaggaataaacgtgcatcaatgatggttccaaatttacaagagcataataccaatattcctgaactcagaccccaacgtgaacagtcaaccgccaaaaaagtaattgatttctttaagagaagaagcatgagattataa

SEQ ID NO: 67973 - protein, 893 aa, Vanderwaltozyma polyspora DSM 70294
MSSISNRHTYYGGGSNTQHTTNMVRSPSDRLSKLKRKQITFGPYYIGSTLGEGEFGKVKLGWTRNPTSNQEVSKQVAIKLIRRDKIVKNSEKEIKIFREINALKHLTHPNIVKLEEVLQNSKYIGIVLEYASGGEFYRYIQRKRRLKETAGCRLFTQLVSGVNYMHSKGLVHRDLKLENLLLDKHENLVITDFGFVNEFLKDNDLMKTSCGSPCYAAPELVISTKPYEARKADIWSCGIILYAMLAGYLPWDDDPQNPEGDDIARLYYFITRTSLKFPEYISPIPRDLLRRLLVSDPRKRLNIRQIQQHEWLRPHSEFLSITPEDWDNKMKTEVALSNPQQNNEKLNKASSVESSTSKYSNSDKRDTLIIDTAMLLSPVPPQEYQSYIITKPSSVNEDTSSSTQKNKKMHSRSNSAASIALQAVVDAELEASQRNQDHINTVKNEVNRNENMNTKEKRSNNNSDNKKQEYINLQQVSRNDTMQDRSMGIRAEFIRSAGNNEREDIQLKKVETNYNGENSTRGSHNSGKHRKPRPTSYHPGSSSGRTNLSPYDFNTFNTNTESSTKKVISQLETLQFDSTPSLIVDTEATGMPVNSSPKILSQRSFSMSKPSLDLQSVTADLIKFQGENDSAAKSIHEHVMGTNWQYVPHSISSPKNSLGRTPEEYDSSLQHPPSSGGKYETVLTDSNTSYNSITQESEKSKTSPMYEAYMFTDVSTQRDKIKEEKKGSKKRFSILSFYSSYNNNSKTSFDSSDTKSRADHSSIGSPQLTPGHATQGRADLSVRDRNTRMPSMTNNTNNSHLKNERIISQAESDIEDVYRRRSSKPIKNDKRYSSIEIGRDNTANKIGTRNKRASMMVPNLQEHNTNIPELRPQREQSTAKKVIDFFKRRSMRL

SEQ ID NO: 67974 - DNA, 2271 bp, Candida glabrata CBS 138
  CDS (1)..(2271)
atgactgccagcaaaagacatacatattatggaggcggaagcatatcatatgaaagaaccaataatagtgaacatgataagacacaacgaccccaggaccatcaagggccgaaacatcgcaaacatgtaacgttcggaccctatgtcatcggggccacacttggagagggagagtttggaaaagtaaaacttgcctggtcgaaatcggcataccaacagtgtgataacactgaaggtaatgccggaaacaagccaatgactttcaaagttcctaagcaagtagcgatcaaattgatcaaacgtgatttcataacaaaggacccttcaaaagaaacaaaaatatacagagaaattaacgcactaaagcatttatcacatccaaatattgtcaaactcgaagaagttctacaaaactcaaaatatataggaattgttctagaatatgccgctggaggtgaattctacaagtttattcaaaggaagaggagattaaaagagaaccacgcttgccgattattctctcaattgataagtgctgtgcactacatacactctaaaggactggtccatagagatttgaaacttgaaaacttattgctggacaatgaggaaaacttaataattactgattttggttttgttaacgaatttctacgacagaacggtatgatgaaaacatcatgcggatctccatgctatgctgcaccagaattggttgtttcaaacaggccttacgatgcaagaaaagctgatacgtggtcttgtggaattatcttgtttgctatgcttgctggttacttgccttgggatgatgatccaaaaaatccagatggccacgatatatcaaggttatacaattacattctcaatacccctctgaagtttccagaatacatcaatcctgtacctagggatttactgagaaaaatacttgtcatagatccaaagaagagaataaacataaggtcaatagaaaagcacccatggttagagtctcactcgacattcttgtcaataaccccagatgaatgggacagactttctaatacgaaaaatatatacagaaaatctaaaccccaattttatcccaacaagaggcctggctcaacttattccaactattcttctggttcaaaagacaataagcgtgactctttaattattgattcagccttggtgagcttaccagtaccaccaaaagaattccaatctcatattttggcacgcccttcttctttagttgtagaaagccgatattctccactcggtaaacgaaatggccataatagaagcaactcagcggcatctgctgctttacaggcagtatttgatgcaagtgagagagaatccttgaagagtgttgattcaaaaccaaggtctagaagtaatgaccataaagatattattgaaggcatacagcctcagaaacatgcgtttgtaaagccatctagaaaggtacgtccaacttctatgcaagcgcctggatcttcttacattcaccatggaaactttgaaggtcttcatgagctaatgaaaagagacaatagtacagcttcttctcatcaaacttcgatatcttctgaggctcgtatcttcgatgcttcaccaactttaatacccgatctaacaaagtctccaagctcctcaacgggtaactcaccaaaacttctcccaaggaaatccttcactgtcagcaagcctttattggacttaaaatttgcctctgcagatatcatcaaagctaatgagagcacagattcactttcaaagcgtatccatgaccaaatatatgaagtagagcatccaagacaaagaagacatagctatagatacagtgggattattagcgatttgatatttgggacattatcagaagaaggtgagataaacacatttgagaataaggatcataaatcagatgctgaagaatcagaaatgacaatttcagaatcaaaactagattctgtttcaatatgctcgcaacaaagtaatatacaccggaacattagcaaacaagcaagctctgttagcctgctgaggacaacaagtaaccacagcacgaataatctaaatgtgggatctcgtacctacggaagggcggagttatatgataagagacatttgaggcaaataccttcaaatacactaaatcagattaatgcaccgggcaacactcatagaaactccgctatatattctgaagacgacaaaaggaaatctactgcgaagcgagtatttgaattttttaaaagaagaagtatgagagtttaa

SEQ ID NO: 67975 - protein, 756 aa, Candida glabrata CBS 138
MTASKRHTYYGGGSISYERTNNSEHDKTQRPQDHQGPKHRKHVTFGPYVIGATLGEGEFGKVKLAWSKSAYQQCDNTEGNAGNKPMTFKVPKQVAIKLIKRDFITKDPSKETKIYREINALKHLSHPNIVKLEEVLQNSKYIGIVLEYAAGGEFYKFIQRKRRLKENHACRLFSQLISAVHYIHSKGLVHRDLKLENLLLDNEENLIITDFGFVNEFLRQNGMMKTSCGSPCYAAPELVVSNRPYDARKADTWSCGIILFAMLAGYLPWDDDPKNPDGHDISRLYNYILNTPLKFPEYINPVPRDLLRKILVIDPKKRINIRSIEKHPWLESHSTFLSITPDEWDRLSNTKNIYRKSKPQFYPNKRPGSTYSNYSSGSKDNKRDSLIIDSALVSLPVPPKEFQSHILARPSSLVVESRYSPLGKRNGHNRSNSAASAALQAVFDASERESLKSVDSKPRSRSNDHKDIIEGIQPQKHAFVKPSRKVRPTSMQAPGSSYIHHGNFEGLHELMKRDNSTASSHQTSISSEARIFDASPTLIPDLTKSPSSSTGNSPKLLPRKSFTVSKPLLDLKFASADIIKANESTDSLSKRIHDQIYEVEHPRQRRHSYRYSGIISDLIFGTLSEEGEINTFENKDHKSDAEESEMTISESKLDSVSICSQQSNIHRNISKQASSVSLLRTTSNHSTNNLNVGSRTYGRAELYDKRHLRQIPSNTLNQINAPGNTHRNSAIYSEDDKRKSTAKRVFEFFKRRSMRV

SEQ ID NO: 67976 - DNA, 2730 bp, Kluyveromyces lactis NRRL Y-1140
  CDS (1)..(2730)
atgtctacagaagcgcatcgtcacacctattacggtggacccaccaccaacacggagtcctctcatcatattcatacgagtcatgctcataactgttccaatggtagcagccgtcgacatagctcttcgcataacggtcgaagacggcaggtaacgtttggtccttacatcatcggtccgactttaggagaaggtgaatttgggaaagtcaagctagggtggtctaaaagcaattcggatgagtctaagaatgttgccattaagctgataagaagggatacgatccccaagaactctgagaaagaagtaaagatctatagagaaatcaacgcactaaaacacttggcgcatccaaatatagtaactttggaagaagtgttacaaaattcgaaatacatcggaatagtgttgcattacgcctcgggaggtgaattctacaaatatattcaaaagaagagaagactgaaagaacctgcagcatgccggttatttgcacagttaattagtggggtacattatatgcatcataaaggattggcacatagggatttgaaattagagaacctcttattggatgaacatgagaatttaataataacagattttggatttgtcaatgagttcagttctaggaacgatttgatgaaaacatcttgtgggtctccatgttacgctgctccagaattggtcgttactacaaaggcttacgaagcaagaaaggctgacgtttggtcatgtggggtaattttgtacgctatgctagctggatatctcccgtgggatgatgatccagataatcctgacggggatgatattgcaaaactatacaattatatcacaaagacgtcattgaaatttccggaatatatcaatccgattcccagagatattttgagaagaattcttgtatcggacccttccaagcgtatcactgttgaattgatcctaaaacatcaatggctgcaaccacacgcattattcctatctttgaaaccagaggattgggatattaaggcaaaggccgaaataagtaacatcttcaggcccccaccttcacaatcttcacaatctgcatattccagaccacactcaaattcttctgtatcttcaagtgaaaaacgtaattcgctgatcatagactccactctacatctgcaacctgtgcctcctcatgaatcacaatcacatgccattgccaaaccatcttctccatcgtcggatcttagatcaagcccaattaaaagagtcaatcactcaagaagcaactctgcagcatccatcgcattgcaagctgtcgtggatgcagaaagagaattcttccagtcatctcaatcaattttacaaattagtggcgtacaatccattgaacaatctcctaatactagagttcaaacgtatactgctacgagatcgttggcacataataattcctcatccttaatgaacagaaatagtataatcgttgaggtaagcccaaacaaggaggttatatcgtcatcatcctcatctgctataccgggaatgagttattccgcatccagagagtcatatatctcaacttctcccgttagaaatgcagcacagtcgccaaaattcgttccaggttctttcacttcgaataccagtcaccataataacaaatttggctcatcacagcagtctaggcccagacccacttcatatcatccaatatcatcatcatatttagaaatgcagccttctaattctcagaataactttatcacaaccactaacgagttttcttatattccaagaacagtcaatgcaaataactacatcgactctactcgcgcaatctctcctgaattgaacggaagaactgttgatggcacttccccgccattaaactcaagaaatttccagtcaggaatcatacgcaggggatcattttctgcaagcaaaccttcaccatcagtcgatctgaataatgtagaaggggaccttattaaaaccgatgcagaggatcataagaaactcaaacagcagcgtaggaaatctcaaagatacagtactgttattttagacaattcgattgccactgtacaagaagaaactgaggaaccaattacggcttacgatgcgaacattaaaaaacccgttgaaaattccaataacttgaccaaggaattcggaaagattgttattaatgaacctcgaaaggaagatgctcacattcctatcagcaaaccggagagcgaacacctacagaaacccccacaacaacatcaatcacaagcctcgatagcaagagcagactcacattccaagaaagagaaaaggttcagtttactatccttttactcatactataataattcaaagacgagtgtcagctccgactcttctggcggaagaagagtatctgcaaattcacagaaaacaaatgaaagaatttcttctgttaaatcgaatggtataccgtctagaaacgtatcggggtcgataaatcaattcgaaacatcaaaaccgagagtatcatcgaatccatcaaacagaacaaattacagacattcgatgttacctccaaagagttctcaagttatagacgcatctgccaaacgtatgaatcgttcttctgtaatggtttcttctgccaaagatataaccagttctgatggtaccgcaagtaaagaacataaagaacaacgtgaaccaagcactgccaaaagagtctttgatttcttcaagaggagaagtatgagagtataa

SEQ ID NO: 67977 - protein, 909 aa, Kluyveromyces lactis NRRL Y-1140
MSTEAHRHTYYGGPTTNTESSHHIHTSHAHNCSNGSSRRHSSSHNGRRRQVTFGPYIIGPTLGEGEFGKVKLGWSKSNSDESKNVAIKLIRRDTIPKNSEKEVKIYREINALKHLAHPNIVTLEEVLQNSKYIGIVLHYASGGEFYKYIQKKRRLKEPAACRLFAQLISGVHYMHHKGLAHRDLKLENLLLDEHENLIITDFGFVNEFSSRNDLMKTSCGSPCYAAPELVVTTKAYEARKADVWSCGVILYAMLAGYLPWDDDPDNPDGDDIAKLYNYITKTSLKFPEYINPIPRDILRRILVSDPSKRITVELILKHQWLQPHALFLSLKPEDWDIKAKAEISNIFRPPPSQSSQSAYSRPHSNSSVSSSEKRNSLIIDSTLHLQPVPPHESQSHAIAKPSSPSSDLRSSPIKRVNHSRSNSAASIALQAVVDAEREFFQSSQSILQISGVQSIEQSPNTRVQTYTATRSLAHNNSSSLMNRNSIIVEVSPNKEVISSSSSSAIPGMSYSASRESYISTSPVRNAAQSPKFVPGSFTSNTSHHNNKFGSSQQSRPRPTSYHPISSSYLEMQPSNSQNNFITTTNEFSYIPRTVNANNYIDSTRAISPELNGRTVDGTSPPLNSRNFQSGIIRRGSFSASKPSPSVDLNNVEGDLIKTDAEDHKKLKQQRRKSQRYSTVILDNSIATVQEETEEPITAYDANIKKPVENSNNLTKEFGKIVINEPRKEDAHIPISKPESEHLQKPPQQHQSQASIARADSHSKKEKRFSLLSFYSYYNNSKTSVSSDSSGGRRVSANSQKTNERISSVKSNGIPSRNVSGSINQFETSKPRVSSNPSNRTNYRHSMLPPKSSQVIDASAKRMNRSSVMVSSAKDITSSDGTASKEHKEQREPSTAKRVFDFFKRRSMRV

SEQ ID NO: 67978 - DNA, 2403 bp, Saccharomyces cerevisiae (strain RM11-1a)
  CDS (1)..(2403)
atggcttctgtacctaaacgccatacatacggtggcaacgttgtcactgatagggaccgtcattctcttcaaagaaacaatgagattttgcatcctatacataaaaatcagcgaaaacatgctaccttcggaccatacataatcggttccactttgggtgagggagaatttggtaaagttaagctgggttggaccaaggcttcctcctcgaacgaggttcctaagcaagtggcaatcaaattaattagaagagatacaatcaagaaagatgccgataaagaaattaaaatataccgcgaaattaacgcactgaagcatttaactcatcctaacattatctatttagaagaggtcctgcagaattcgaaatacattggaatagtgctagagtttgtatctgggggagaattctataagtatattcaacgtaagaggagattaaaggaatcttctgcatgcagattgtttgcccaattaattagtggggtcaattatatgcactacaaaggacttgttcatagggacttaaaactggaaaatttattattagataagcacgaaaatttagtcatcacggattttggttttgtgaatgaattttttgaagataacgaattaatgaaaacttcttgtggttcgccctgttatgcagcaccagaactagttgttagtaccaaggcatatgaagcaagaaaggcagatgtttggtcgtgtggtgttattctttatgcaatgctcgctggatatttgccgtgggatgacgatcatgaaaatccaacgggtgacgatattgctagactgtacaaatacatcacgcaaacacctcttaaatttcccgaatatataacccctattccaagagatttgctgaggcgaatactggtacccaatccaagaagaagaataaacttacaaacaataaaaaggcatgtgtggttgaagcctcatgaagcgtttttgagcattcagccgaactattgggatgaacacttacagaaggaacgtccgaaaccgccaaacaaaggtgacgttggtcgccactcaacttattcttcatcagcatcttcgtactcaaaaagtagggatagaaactctttaattatagagtcgactctagagcaacatcgaatgtctccacagcttgcgaccagcagaccagcatcaccaacattctctactggttccaaagtggtgttaaacgatacgaaaaatgacatgaaagaatctaatataaatggcgagcgtactagtgcatcatgcaggtacacacgtgattcgaagggcaacggccagacccaaatagaacaagtatcagctagacactcatccagaggcaataagcacacatcgatcgcgggactcgtaacaatccctggctcccccacaactgcaagaacaaggaatgcaccatcatcaaagcttactgagcatgtaaaagattctagtcagacaagctttactcaggaggaattccaccgtattggtaattatcacgtgcctcgcagtagacctaggccaacttcatattatcctggactcagtcgtaacaccgcggataatagtttagcggatattccagtaaataagttgggttcgaatggtaggttgacagatgccaaagacccggtaccgttgaacgcaatacacgataccaacaaagctacaatctccaacaattccattatgctattatcagaaggtccggctgcaaagacttccccagtagattaccattatgctattggcgacttaaaccatggtgacaaacccataactgaggttatcgacaaaattaataaggaccttactcataaagcagctgaaaatggttttcctcgagagagcatcgacccagagagtacctcaacgatattagttacgaaagaacccactaactccaccgatgaagatcatgtagaatctcagctggagaatgttggccactcttctaataaatcagacgcttcttctgataaagatagtaaaaagatctacgaaaaaaaaaggttcagcttcatgtcgttgtactcatccttaaatggttcaagatccactgttgaatctcgtacctcaaaagggaatgcacctcctgtttcatctagaaatccatcaggacaatcgaatagaagtaacattaaaataactcagcagcaaccacgtaacctttccgacagagttccaaatcccgataagaaaattaatgataatagaataagagacaacgcacctagctatgctgaaagcgagaatccgggaaggtctgtacgggcttctgttatggtgtcaacactacgagaagaaaatcgatcggaattgtcgaatgaagggaataatgtcgaggcacagacttcaacagcaagaaaggttctgaattttttcaaaagaaggagcatgagggtttga

SEQ ID NO: 67979 - protein, 800 aa, Saccharomyces cerevisiae (strain RM11-1a)
MASVPKRHTYGGNVVTDRDRHSLQRNNEILHPIHKNQRKHATFGPYIIGSTLGEGEFGKVKLGWTKASSSNEVPKQVAIKLIRRDTIKKDADKEIKIYREINALKHLTHPNIIYLEEVLQNSKYIGIVLEFVSGGEFYKYIQRKRRLKESSACRLFAQLISGVNYMHYKGLVHRDLKLENLLLDKHENLVITDFGFVNEFFEDNELMKTSCGSPCYAAPELVVSTKAYEARKADVWSCGVILYAMLAGYLPWDDDHENPTGDDIARLYKYITQTPLKFPEYITPIPRDLLRRILVPNPRRRINLQTIKRHVWLKPHEAFLSIQPNYWDEHLQKERPKPPNKGDVGRHSTYSSSASSYSKSRDRNSLIIESTLEQHRMSPQLATSRPASPTFSTGSKVVLNDTKNDMKESNINGERTSASCRYTRDSKGNGQTQIEQVSARHSSRGNKHTSIAGLVTIPGSPTTARTRNAPSSKLTEHVKDSSQTSFTQEEFHRIGNYHVPRSRPRPTSYYPGLSRNTADNSLADIPVNKLGSNGRLTDAKDPVPLNAIHDTNKATISNNSIMLLSEGPAAKTSPVDYHYAIGDLNHGDKPITEVIDKINKDLTHKAAENGFPRESIDPESTSTILVTKEPTNSTDEDHVESQLENVGHSSNKSDASSDKDSKKIYEKKRFSFMSLYSSLNGSRSTVESRTSKGNAPPVSSRNPSGQSNRSNIKITQQQPRNLSDRVPNPDKKINDNRIRDNAPSYAESENPGRSVRASVMVSTLREENRSELSNEGNNVEAQTSTARKVLNFFKRRSMRV

SEQ ID NO: 67980 - DNA, 2598 bp, Saccharomyces cerevisiae (strain RM11-1a)
  CDS (1)..(2598)
atgtcgtacaccaataaacgtcatacatactacggagggtttaccaacgatttgtctgacacatttcagtaccctcaaagaacagatgagcaaaggcggaaacatgtaacgtttggtccttatatcctagggtcgacgttaggagaaggagagttcggaaaagtgaagctaggctggccaaagaatttttcaaacagctctaattcaacttttgacttcccaaaacaagtagcaattaaacttatcaaacgtgatagcatatcgaatgattacaggaaagaagttaaaatatacagagaaatcaacgccttaaaacacttatcacatccgaatatcgtaaaattagaagaagtgttgcaaaattctaggtacattggtattgtcctagagtacgcatgcgggggagaattctataaatatattcaaaaaaaaaggaggcttaaggaaatgaatgcatgcaggttattttctcagctaataagtggagtacattacatacattctaagggacttgttcacagagatctcaaattggaaaatctattactagacaagaatgagaacctagttattacagattttgggtttgtcaatgagttttgctcacgaaacgaattaatgaagacgtcatgtggctctccatgctacgcagcgcctgaactagtgataagcgccgaaccatacgaagctagaaaagcagatatatggtcatgtggagttatactttacgctatactagctggatatttaccgtgggatgatgatccaaataatcctgaaggcagcgatataggaagactttataattatattaactccacaccattaaagttccctgattatattcttcctatacctcgggacttattaagacgcatgctggtctcagacccaaagaaaagaataaacctgaaacagatcaagaaacatgaatggctaaagcctcattcttcattcttatccataacacctgatgagtgggacaaactaaacaatactcaatccgtgttcagattagcaaaaccaagaagaagatatggatctagaccacaatccagttgttctacctcatctcttggctcaaggagtgataaaagggattcactggtcattgattcaactttaattactttcccggctccgcctcaagaatcacaaaatcatattataaccagaccggcttctattgcatctgaccagcggctgtcacctataagaagatctaataggcacaatagaagtaactctgctgcatccgttgccttgcaggcagtggtgaacgcagatagggaatatgtgttaagtcatgaacaatcattatccccagtacaaaacattagacaaactacgggaaacatgactgccagtctttcacccccaccagccataagtccaggcgatattataatcgaaaccacacctattaaaagaaatacaatttctgggagtagtattgtaccaagtttagaagaagagtcgtctaccacaatgcaaacaagcaagattcaaccaaataacatggcttcatcacaaaatcatcaatacaataaaaataagacccaaaatagtctccaatctgctaaaaatttctaccgtacgtcttcctcatcccatacaaagccacggccaacttcataccatcctggctcatacacaacacctccctacaattcaaatacgctctccatatatgagatcaacgaaaaagctaaaagtagcgcttcatcacaaacgctgaatcaaagagacacatccccatttgattccacaccataccttgccctagatacatgcataacctcatcctcttccatcgaaagctctccaaagttaattacgcacggccaattttcagtagcaaaaccctctgttgatttgcaaagcgtatctggtgacttgatcaagtataagagggacgctgatgtagtaacgagaatctatgatgaaaaatacaaacagaagcgcaaaagtttgagatatagcggcatattcagtgacatctcatgcgatacggtcaccgaagagtctgatgaattgaggccaccagaatctcctcttcaacaacatgaaggacaagaatcaattgataaggcgaaaacggaggacacaagtgaaaagggtagtaaaagtagcaacatcgcgaaagctacagcacaaaaacacgtcaataaccatctagaaagatcacttaacgaagcagagtcaacaaagaaaagatttagctttctttccttgtactcttatgatacttccaaatctagtttatactcatcaatggattccaaacggaaaccttctccaccttcccaaagacgcccaaaaaaggatgacagttatcaaacaaattcaaagaatcattatatcactgcttcaaatatgcaaacatcccatcaagtctcaaaagacctgcctgcaccaacgatggtgcaaaataaatgtacttcagaaactaaaaaagcggtccgaagcaacaggtcctccataatggtatctgaggtcaacaaggcaagcgtagacaataaagcagcccaaagtccagaacattcaaccgcaaaaagagtattagggtttttcaaaagaagaagtatgaaaatctag

SEQ ID NO: 67981 - protein, 865 aa, Saccharomyces cerevisiae (strain RM11-1a)
MSYTNKRHTYYGGFTNDLSDTFQYPQRTDEQRRKHVTFGPYILGSTLGEGEFGKVKLGWPKNFSNSSNSTFDFPKQVAIKLIKRDSISNDYRKEVKIYREINALKHLSHPNIVKLEEVLQNSRYIGIVLEYACGGEFYKYIQKKRRLKEMNACRLFSQLISGVHYIHSKGLVHRDLKLENLLLDKNENLVITDFGFVNEFCSRNELMKTSCGSPCYAAPELVISAEPYEARKADIWSCGVILYAILAGYLPWDDDPNNPEGSDIGRLYNYINSTPLKFPDYILPIPRDLLRRMLVSDPKKRINLKQIKKHEWLKPHSSFLSITPDEWDKLNNTQSVFRLAKPRRRYGSRPQSSCSTSSLGSRSDKRDSLVIDSTLITFPAPPQESQNHIITRPASIASDQRLSPIRRSNRHNRSNSAASVALQAVVNADREYVLSHEQSLSPVQNIRQTTGNMTASLSPPPAISPGDIIIETTPIKRNTISGSSIVPSLEEESSTTMQTSKIQPNNMASSQNHQYNKNKTQNSLQSAKNFYRTSSSSHTKPRPTSYHPGSYTTPPYNSNTLSIYEINEKAKSSASSQTLNQRDTSPFDSTPYLALDTCITSSSSIESSPKLITHGQFSVAKPSVDLQSVSGDLIKYKRDADVVTRIYDEKYKQKRKSLRYSGIFSDISCDTVTEESDELRPPESPLQQHEGQESIDKAKTEDTSEKGSKSSNIAKATAQKHVNNHLERSLNEAESTKKRFSFLSLYSYDTSKSSLYSSMDSKRKPSPPSQRRPKKDDSYQTNSKNHYITASNMQTSHQVSKDLPAPTMVQNKCTSETKKAVRSNRSSIMVSEVNKASVDNKAAQSPEHSTAKRVLGFFKRRSMKI

SEQ ID NO: 67982 - DNA, 24 bp, Artificial sequence
  primer
atggcttctgtacctaaacgccat

SEQ ID NO: 67983 - DNA, 24 bp, Artificial sequence
  primer
tcaaaccctcatgctccttctttt

SEQ ID NO: 67984 - protein, 965 aa, Artificial sequence
  consensus sequence
  Variant (2)..(5): Xaa in position 2 to 5 is any amino acid
  Variant (6)..(6): Xaa in position 6 is any or no amino acid
  Variant (11)..(11): Xaa in position 11 is any amino acid
  Variant (13)..(32): Xaa in position 13 to 32 is any amino acid
  Variant (33)..(47): Xaa in position 33 to 47 is any or no amino acid
  Variant (50)..(51): Xaa in position 50 to 51 is any amino acid
  Variant (57)..(58): Xaa in position 57 to 58 is any amino acid
  Variant (60)..(60): Xaa in position 60 is any amino acid
  Variant (75)..(75): Xaa in position 75 is any amino acid
  Variant (77)..(83): Xaa in position 77 to 83 is any amino acid
  Variant (84)..(99): Xaa in position 84 to 99 is any or no amino acid
  Variant (108)..(108): Xaa in position 108 is any amino acid
  Variant (111)..(111): Xaa in position 111 is any amino acid
  Variant (113)..(117): Xaa in position 113 to 117 is any amino acid
  Variant (120)..(120): Xaa in position 120 is any amino acid
  Variant (133)..(133): Xaa in position 133 is any amino acid
  Variant (138)..(139): Xaa in position 138 to 139 is any amino acid
  Variant (148)..(148): Xaa in position 148 is any amino acid
  Variant (156)..(158): Xaa in position 156 to 158 is any amino acid
  Variant (168)..(168): Xaa in position 168 is any amino acid
  Variant (175)..(176): Xaa in position 175 to 176 is any amino acid
  Variant (182)..(182): Xaa in position 182 is any amino acid
  Variant (189)..(189): Xaa in position 189 is any amino acid
  Variant (191)..(191): Xaa in position 191 is any amino acid
  Variant (193)..(193): Xaa in position 193 is any amino acid
  Variant (210)..(211): Xaa in position 210 to 211 is any amino acid
  Variant (215)..(215): Xaa in position 215 is any amino acid
  Variant (226)..(228): Xaa in position 226 to 228 is any amino acid
  Variant (230)..(230): Xaa in position 230 is any amino acid
  Variant (248)..(248): Xaa in position 248 is any amino acid
  Variant (250)..(252): Xaa in position 250 to 252 is any amino acid
  Variant (260)..(260): Xaa in position 260 is any amino acid
  Variant (265)..(265): Xaa in position 265 is any amino acid
  Variant (270)..(270): Xaa in position 270 is any amino acid
  Variant (281)..(282): Xaa in position 281 to 282 is any amino acid
  Variant (285)..(285): Xaa in position 285 is any amino acid
  Variant (287)..(287): Xaa in position 287 is any amino acid
  Variant (290)..(290): Xaa in position 290 is any amino acid
  Variant (294)..(294): Xaa in position 294 is any amino acid
  Variant (297)..(298): Xaa in position 297 to 298 is any amino acid
  Variant (300)..(300): Xaa in position 300 is any amino acid
  Variant (305)..(305): Xaa in position 305 is any amino acid
  Variant (308)..(308): Xaa in position 308 is any amino acid
  Variant (318)..(318): Xaa in position 318 is any amino acid
  Variant (321)..(322): Xaa in position 321 to 322 is any amino acid
  Variant (324)..(325): Xaa in position 324 to 325 is any amino acid
  Variant (329)..(331): Xaa in position 329 to 331 is any amino acid
  Variant (333)..(334): Xaa in position 333 to 334 is any amino acid
  Variant (336)..(336): Xaa in position 336 is any amino acid
  Variant (339)..(339): Xaa in position 339 is any amino acid
  Variant (342)..(343): Xaa in position 342 to 343 is any amino acid
  Variant (348)..(348): Xaa in position 348 is any amino acid
  Variant (350)..(351): Xaa in position 350 to 351 is any amino acid
  Variant (354)..(363): Xaa in position 354 to 363 is any amino acid
  Variant (364)..(366): Xaa in position 364 to 366 is any or no amino acid
  Variant (368)..(379): Xaa in position 368 to 379 is any amino acid
  Variant (381)..(382): Xaa in position 381 to 382 is any amino acid
  Variant (384)..(385): Xaa in position 384 to 385 is any amino acid
  Variant (387)..(387): Xaa in position 387 is any amino acid
  Variant (389)..(390): Xaa in position 389 to 390 is any amino acid
  Variant (392)..(392): Xaa in position 392 is any amino acid
  Variant (395)..(395): Xaa in position 395 is any amino acid
  Variant (397)..(397): Xaa in position 397 is any amino acid
  Variant (399)..(399): Xaa in position 399 is any amino acid
  Variant (401)..(406): Xaa in position 401 to 406 is any amino acid
  Variant (408)..(419): Xaa in position 408 to 419 is any amino acid
  Variant (421)..(438): Xaa in position 421 to 438 is any amino acid
  Variant (439)..(439): Xaa in position 439 is any or no amino acid
  Variant (441)..(445): Xaa in position 441 to 445 is any amino acid
  Variant (447)..(476): Xaa in position 447 to 476 is any amino acid
  Variant (477)..(514): Xaa in position 477 to 514 is any or no amino acid
  Variant (516)..(539): Xaa in position 516 to 539 is any amino acid
  Variant (540)..(575): Xaa in position 540 to 575 is any or no amino acid
  Variant (582)..(582): Xaa in position 582 is any amino acid
  Variant (585)..(587): Xaa in position 585 to 587 is any amino acid
  Variant (588)..(604): Xaa in position 588 to 604 is any or no amino acid
  Variant (606)..(624): Xaa in position 606 to 624 is any amino acid
  Variant (625)..(626): Xaa in position 625 to 626 is any or no amino acid
  Variant (628)..(629): Xaa in position 628 to 629 is any amino acid
  Variant (630)..(630): Xaa in position 630 is any or no amino acid
  Variant (632)..(632): Xaa in position 632 is any amino acid
  Variant (633)..(633): Xaa in position 633 is any or no amino acid
  Variant (635)..(647): Xaa in position 635 to 647 is any amino acid
  Variant (648)..(648): Xaa in position 648 is any or no amino acid
  Variant (650)..(662): Xaa in position 650 to 662 is any amino acid
  Variant (664)..(664): Xaa in position 664 is any amino acid
  Variant (665)..(667): Xaa in position 665 to 667 is any or no amino acid
  Variant (669)..(674): Xaa in position 669 to 674 is any amino acid
  Variant (677)..(710): Xaa in position 677 to 710 is any amino acid
  Variant (711)..(723): Xaa in position 711 to 723 is any or no amino acid
  Variant (725)..(730): Xaa in position 725 to 730 is any amino acid
  Variant (731)..(749): Xaa in position 731 to 749 is any or no amino acid
  Variant (751)..(787): Xaa in position 751 to 787 is any amino acid
  Variant (788)..(799): Xaa in position 788 to 799 is any or no amino acid
  Variant (804)..(805): Xaa in position 804 to 805 is any amino acid
  Variant (807)..(807): Xaa in position 807 is any amino acid
  Variant (810)..(824): Xaa in position 810 to 824 is any amino acid
  Variant (825)..(831): Xaa in position 825 to 831 is any or no amino acid
  Variant (833)..(848): Xaa in position 833 to 848 is any amino acid
  Variant (849)..(876): Xaa in position 849 to 876 is any or no amino acid
  Variant (878)..(889): Xaa in position 878 to 889 is any amino acid
  Variant (890)..(918): Xaa in position 890 to 918 is any or no amino acid
  Variant (920)..(921): Xaa in position 920 to 921 is any amino acid
  Variant (923)..(923): Xaa in position 923 is any amino acid
  Variant (925)..(925): Xaa in position 925 is any amino acid
  Variant (929)..(934): Xaa in position 929 to 934 is any amino acid
  Variant (935)..(950): Xaa in position 935 to 950 is any or no amino acid
  Variant (954)..(955): Xaa in position 954 to 955 is any amino acid
  Variant (957)..(958): Xaa in position 957 to 958 is any amino acid
MXXXXXRHTYXGXXXXXXXXXXXXXXXXXXXXXXXXXXXXXXXXXXXRKXXTFGPYXXGXTLGEGEFGKVKLGWXKXXXXXXXXXXXXXXXXXXXXXXXKQVAIKLIXRDXIXXXXXKEXKIYREINALKHLXHPNIXXLEEVLQNSXYIGIVLEXXXGGEFYKYIQXKRRLKEXXACRLFXQLISGVXYXHXKGLVHRDLKLENLLLDXXENLXITDFGFVNEFXXXNXLMKTSCGSPCYAAPELVXSXXXYEARKADXWSCGXILYAXLAGYLPWDDDXXNPXGXDIXRLYXYIXXTXLKFPXYIXPIPRDLLRRXLVXXPXXRINXXXIXXHXWLXPHXXFLSIXPXXWDXXXXXXXXXXXXXPXXXXXXXXXXXXSXXSXXSXSXXRXSLXIXSXLXXXXXXPXXXXXXXXXXXXSXXXXXXXXXXXXXXXXXXXNXXXXXAXXXXXXXXXXXXXXXXXXXXXXXXXXXXXXXXXXXXXXXXXXXXXXXXXXXXXXXXXXXXXXXXXXXXIXXXXXXXXXXXXXXXXXXXXXXXXXXXXXXXXXXXXXXXXXXXXXXXXXXXXXXXXXXXXPRPTSYXPGXXXXXXXXXXXXXXXXXXXXNXXXXXXXXXXXXXXXXXXXXXDXXXPXXLXXXXXXXXXXXXXXSXXXXXXXXXXXXXPXXXXDXXXXXXDLXXXXXXXXXXXXXXXXXXXXXXXXXXXXXXXXXXXXXXXXXXXXXXXEXXXXXXXXXXXXXXXXXXXXXXXXXEXXXXXXXXXXXXXXXXXXXXXXXXXXXXXXXXXXXXXXXXXXXXXXXXXKRFSXXSXYSXXXXXXXXXXXXXXXXXXXXXXSXXXXXXXXXXXXXXXXXXXXXXXXXXXXXXXXXXXXXXXXXXXXPXXXXXXXXXXXXXXXXXXXXXXXXXXXXXXXXXXXXXXXXXRXXRXSXMVSXXXXXXXXXXXXXXXXXXXXXXSTAXXVXXFFKRRSM

SEQ ID NO: 67985 - protein, 59 aa, Artificial sequence
  protein pattern
  Variant (8)..(9): Xaa in position 8 to 9 is any amino acid
  Variant (10)..(10): Xaa in position 10 is Asp or Arg
  Variant (12)..(12): Xaa in position 12 is Asp or Glu
  Variant (30)..(30): Xaa in position 30 is Ile or Val
  Variant (31)..(31): Xaa in position 31 is Ser or Thr
  Variant (32)..(32): Xaa in position 32 is Ala or Thr
  Variant (33)..(33): Xaa in position 33 is Glu or Lys
  Variant (34)..(34): Xaa in position 34 is Ala or Pro
  Variant (42)..(42): Xaa in position 42 is Ile or Val
  Variant (47)..(47): Xaa in position 47 is Ile or Val
  Variant (52)..(52): Xaa in position 52 is Ile or Met
FGFVNEFXXXNXLMKTSCGSPCYAAPELVXXXXXYEARKADXWSCGXILYAXLAGYLPW

SEQ ID NO: 67986 - protein, 60 aa, Artificial sequence
  protein pattern
  Variant (8)..(8): Xaa in position 8 is Lys or Arg
  Variant (16)..(16): Xaa in position 16 is Phe or Tyr
  Variant (17)..(17): Xaa in position 17 is Ala or Val
  Variant (18)..(18): Xaa in position 18 is Ala, Cys or Ser
  Variant (24)..(24): Xaa in position 24 is Lys or Arg
  Variant (25)..(25): Xaa in position 25 is Phe or Tyr
  Variant (28)..(28): Xaa in position 28 is Lys or Arg
  Variant (35)..(36): Xaa in position 35 to 36 is any amino acid
  Variant (37)..(37): Xaa in position 37 is Ala or Gly
  Variant (42)..(42): Xaa in position 42 is Ala, Ser or Thr
  Variant (45)..(45): Xaa in position 45 is Ile or Val
  Variant (47)..(47): Xaa in position 47 is Ala or Gly
  Variant (49)..(49): Xaa in position 49 is any amino acid
  Variant (51)..(51): Xaa in position 51 is Ile or Met
  Variant (53)..(53): Xaa in position 53 is any amino acid
EEVLQNSXYIGIVLEXXXGGEFYXXIQXKRRLKEXXXCRLFXQLXSXVXYXHXKGLVHRD

SEQ ID NO: 67987 - protein, 61 aa, Artificial sequence
  protein pattern
  Variant (4)..(5): Xaa in position 4 to 5 is any amino acid
  Variant (8)..(8): Xaa in position 8 is Asp, Glu or Thr
  Variant (10)..(10): Xaa in position 10 is any amino acid
  Variant (13)..(13): Xaa in position 13 is Ala, Gly or Ser
  Variant (17)..(17): Xaa in position 17 is any or no amino acid
  Variant (19)..(19): Xaa in position 19 is any or no amino acid
  Variant (21)..(21): Xaa in position 21 is any amino acid
  Variant (22)..(22): Xaa in position 22 is Asn, Gln, Arg or Ser
  Variant (24)..(24): Xaa in position 24 is Pro or Ser
  Variant (29)..(29): Xaa in position 29 is Asp or Glu
  Variant (32)..(32): Xaa in position 32 is any amino acid
  Variant (34)..(34): Xaa in position 34 is Ile or Val
  Variant (41)..(41): Xaa in position 41 is Lys or Arg
  Variant (42)..(42): Xaa in position 42 is Ile, Leu or Met
  Variant (45)..(45): Xaa in position 45 is any amino acid
  Variant (46)..(46): Xaa in position 46 is Asp or Asn
  Variant (48)..(49): Xaa in position 48 to 49 is Lys or Arg
  Variant (51)..(51): Xaa in position 51 is Ile or Leu
  Variant (53)..(53): Xaa in position 53 is Ile or Leu
  Variant (54)..(54): Xaa in position 54 is any amino acid
  Variant (55)..(55): Xaa in position 55 is Gln, Ser or Thr
  Variant (57)..(58): Xaa in position 57 to 58 is any amino acid
  Variant (60)..(60): Xaa in position 60 is any amino acid
DDDXXNPXGXDIXRLYXYXIXXTXLKFPXYIXPXPRDLLRXXLVXXPXXRXNXXXIXXHXW

SEQ ID NO: 67988 - protein, 42 aa, Artificial sequence
  protein pattern
  Variant (9)..(9): Xaa in position 9 is any or no amino acid
  Variant (11)..(11): Xaa in position 11 is any or no amino acid
  Variant (13)..(13): Xaa in position 13 is any amino acid
  Variant (15)..(16): Xaa in position 15 to 16 is any amino acid
  Variant (17)..(17): Xaa in position 17 is Asp or Asn
  Variant (18)..(18): Xaa in position 18 is any amino acid
  Variant (19)..(19): Xaa in position 19 is Asp, Glu, Arg or Ser
  Variant (22)..(22): Xaa in position 22 is any amino acid
  Variant (25)..(25): Xaa in position 25 is Phe or Tyr
  Variant (35)..(35): Xaa in position 35 is Ser or Thr
  Variant (40)..(40): Xaa in position 40 is Ile or Val
  Variant (41)..(41): Xaa in position 41 is any amino acid
KQVAIKLIXRXDXIXXXXXKEXKIXREINALKHLXHPNIXXL

SEQ ID NO: 67989 - protein, 30 aa, Artificial sequence
  protein pattern
  Variant (2)..(2): Xaa in position 2 is Lys or Arg
  Variant (3)..(3): Xaa in position 3 is any amino acid
  Variant (4)..(4): Xaa in position 4 is Ala, Ile or Val
  Variant (10)..(10): Xaa in position 10 is any or no amino acid
  Variant (12)..(12): Xaa in position 12 is any or no amino acid
  Variant (14)..(14): Xaa in position 14 is Pro or Ser
  Variant (29)..(29): Xaa in position 29 is Pro, Ser or Thr
  Variant (30)..(30): Xaa in position 30 is Lys or Arg
RXXXTFGPYXIXGXTLGEGEFGKVKLGWXX

SEQ ID NO: 67990 - protein, 42 aa, Artificial sequence
  protein pattern
  Variant (2)..(2): Xaa in position 2 is any amino acid
  Variant (3)..(3): Xaa in position 3 is any or no amino acid
  Variant (6)..(6): Xaa in position 6 is any amino acid
  Variant (7)..(7): Xaa in position 7 is any or no amino acid
  Variant (9)..(9): Xaa in position 9 is any amino acid
  Variant (10)..(10): Xaa in position 10 is Asp or Ser
  Variant (11)..(11): Xaa in position 11 is Asp, Glu, Asn or Arg
  Variant (12)..(12): Xaa in position 12 is Asp or Lys
  Variant (14)..(14): Xaa in position 14 is Asp or Asn
  Variant (17)..(17): Xaa in position 17 is Ile or Val
  Variant (19)..(19): Xaa in position 19 is Asp or Glu
  Variant (21)..(21): Xaa in position 21 is Ala or Thr
  Variant (23)..(27): Xaa in position 23 to 27 is any amino acid
  Variant (28)..(28): Xaa in position 28 is any or no amino acid
  Variant (30)..(30): Xaa in position 30 is Pro or Gln
  Variant (31)..(31): Xaa in position 31 is any amino acid
  Variant (32)..(32): Xaa in position 32 is Ala or Glu
  Variant (33)..(33): Xaa in position 33 is any amino acid
  Variant (34)..(34): Xaa in position 34 is Gln or Ser
  Variant (35)..(35): Xaa in position 35 is Asn, Arg or Ser
  Variant (36)..(36): Xaa in position 36 is any amino acid
  Variant (37)..(37): Xaa in position 37 is Ala or Ile
  Variant (38)..(38): Xaa in position 38 is any amino acid
  Variant (39)..(39): Xaa in position 39 is Ala, Pro or Thr
  Variant (40)..(41): Xaa in position 40 to 41 is any amino acid
  Variant (42)..(42): Xaa in position 42 is Ala or Ser
SXXSSXXSXXXXRXSLXIXSXLXXXXXXPXXXXXXXXXXXXX

SEQ ID NO: 67991 - protein, 18 aa, Artificial sequence
  protein pattern
  Variant (4)..(4): Xaa in position 4 is any or no amino acid
  Variant (6)..(6): Xaa in position 6 is any or no amino acid
  Variant (8)..(8): Xaa in position 8 is Phe or Leu
  Variant (9)..(9): Xaa in position 9 is Asp, Glu, Gly or Asn
  Variant (17)..(17): Xaa in position 17 is Lys or Arg
  Variant (18)..(18): Xaa in position 18 is Ile or Val
STAXKXVXXFFKRRSMXX

SEQ ID NO: 67992 - protein, 15 aa, Artificial sequence
  protein pattern
  Variant (8)..(8): Xaa in position 8 is Glu or Lys
  Variant (9)..(9): Xaa in position 9 is any amino acid
  Variant (13)..(13): Xaa in position 13 is Ile or Val
LENLLLDXXENLXIT

SEQ ID NO: 67993 - protein, 16 aa, Artificial sequence
  protein pattern
  Variant (2)..(2): Xaa in position 2 is Glu, Lys or Arg
  Variant (3)..(3): Xaa in position 3 is Pro or Ser
  Variant (5)..(5): Xaa in position 5 is Glu or Ser
  Variant (6)..(6): Xaa in position 6 is Ala, Glu, Ser or Thr
  Variant (11)..(11): Xaa in position 11 is Gln or Thr
  Variant (13)..(15): Xaa in position 13 to 15 is any or no amino acid
LXXHXXFLSIXPXXXD

SEQ ID NO: 67994 - protein, 22 aa, Artificial sequence
  protein pattern
  Variant (2)..(4): Xaa in position 2 to 4 is any or no amino acid
  Variant (6)..(6): Xaa in position 6 is any or no amino acid
  Variant (8)..(8): Xaa in position 8 is any amino acid
  Variant (9)..(9): Xaa in position 9 is Ala or Leu
  Variant (10)..(10): Xaa in position 10 is Ser or Thr
  Variant (11)..(12): Xaa in position 11 to 12 is any amino acid
  Variant (13)..(13): Xaa in position 13 is Leu or Val
  Variant (14)..(14): Xaa in position 14 is any amino acid
  Variant (15)..(15): Xaa in position 15 is Ala or Asp
  Variant (16)..(17): Xaa in position 16 to 17 is Ser or Val
  Variant (18)..(18): Xaa in position 18 is Asp, Asn or Gln
  Variant (19)..(19): Xaa in position 19 is Ala or Thr
  Variant (20)..(20): Xaa in position 20 is Asp, Glu or Ser
  Variant (21)..(21): Xaa in position 21 is any amino acid
  Variant (22)..(22): Xaa in position 22 is Glu or Thr
RXXXSXSXXXXXXXXXXXXXXX

SEQ ID NO: 67995 - protein, 12 aa, Artificial sequence
  protein pattern
  Variant (2)..(2): Xaa in position 2 is any or no amino acid
  Variant (6)..(6): Xaa in position 6 is any amino acid
  Variant (7)..(7): Xaa in position 7 is Ser, Thr or Val
  Variant (8)..(8): Xaa in position 8 is Asn, Thr or Val
  Variant (9)..(9): Xaa in position 9 is Asp, Asn or Thr
  Variant (10)..(11): Xaa in position 10 to 11 is any amino acid
  Variant (12)..(12): Xaa in position 12 is Asp, Ser or Thr
TXYGGXXXXXXX

SEQ ID NO: 67996 - protein, 16 aa, Artificial sequence
  protein pattern
  Variant (7)..(7): Xaa in position 7 is His or Tyr
  Variant (9)..(9): Xaa in position 9 is any amino acid
  Variant (10)..(10): Xaa in position 10 is any or no amino acid
  Variant (12)..(12): Xaa in position 12 is any amino acid
  Variant (13)..(13): Xaa in position 13 is Asn, Ser or Thr
  Variant (14)..(15): Xaa in position 14 to 15 is any amino acid
  Variant (16)..(16): Xaa in position 16 is Asp, Glu, Pro or Thr
PRPTSYXPXXSXXXXX

SEQ ID NO: 67997 - protein, 11 aa, Artificial sequence
  protein pattern
  Variant (2)..(2): Xaa in position 2 is Phe, Ile or Leu
  Variant (3)..(3): Xaa in position 3 is Leu or Met
  Variant (5)..(5): Xaa in position 5 is Phe or Leu
  Variant (8)..(9): Xaa in position 8 to 9 is any amino acid
  Variant (10)..(10): Xaa in position 10 is Asn or Thr
  Variant (11)..(11): Xaa in position 11 is Gly, Asn or Ser
SXXSXYSXXXX

SEQ ID NO: 67998 - DNA, 867 bp, Saccharomyces cerevisiae
  CDS (1)..(867)
atgactgccgacaacaatagtatgccccatggtgcagtatctagttacgccaaattagtgcaaaaccaaacacctgaagacattttggaagagtttcctgaaattattccattacaacaaagacctaatacccgatctagtgagacgtcaaatgacgaaagcggagaaacatgtttttctggtcatgatgaggagcaaattaagttaatgaatgaaaattgtattgttttggattgggacgataatgctattggtgccggtaccaagaaagtttgtcatttaatggaaaatattgaaaagggtttactacatcgtgcattctccgtctttattttcaatgaacaaggtgaattacttttacaacaaagagccactgaaaaaataactttccctgatctttggactaacacatgctgctctcatccactatgtattgatgacgaattaggtttgaagggtaagctagacgataagattaagggcgctattactgcggcggtgagaaaactagatcatgaattaggtattccagaagatgaaactaagacaaggggtaagtttcactttttaaacagaatccattacatggcaccaagcaatgaaccatggggtgaacatgaaattgattacatcctattttataagatcaacgctaaagaaaacttgactgtcaacccaaacgtcaatgaagttagagacttcaaatgggtttcaccaaatgatttgaaaactatgtttgctgacccaagttacaagtttacgccttggtttaagattatttgcgagaattacttattcaactggtgggagcaattagatgacctttctgaagtggaaaatgacaggcaaattcatagaatgctataa

SEQ ID NO: 67999 - protein, 288 aa, Saccharomyces cerevisiae
MTADNNSMPHGAVSSYAKLVQNQTPEDILEEFPEIIPLQQRPNTRSSETSNDESGETCFSGHDEEQIKLMNENCIVLDWDDNAIGAGTKKVCHLMENIEKGLLHRAFSVFIFNEQGELLLQQRATEKITFPDLWTNTCCSHPLCIDDELGLKGKLDDKIKGAITAAVRKLDHELGIPEDETKTRGKFHFLNRIHYMAPSNEPWGEHEIDYILFYKINAKENLTVNPNVNEVRDFKWVSPNDLKTMFADPSYKFTPWFKIICENYLFNWWEQLDDLSEVENDRQIHRML

SEQ ID NO: 68000 - DNA, 996 bp, Arabidopsis thaliana
  CDS (6)..(860)
caccaatgtctgtttcttctttatttaatctcccattgattcgcctcagatctctcgctctttcgtcttctttttcttctttccgatttgcccatcgtcctctgtcatcgatttcaccgagaaagttaccgaattttcgtgctttctctggtaccgctatgacagatactaaagatgctggtatggatgctgttcagagacgtctcatgtttgaggatgaatgcattcttgttgatgaaactgatcgtgttgtggggcatgtcagcaagtataattgtcatctgatggaaaatattgaagccaagaatttgctgcacagggcttttagtgtatttttattcaactcgaagtatgagttgcttctccagcaaaggtcaaacacaaaggttacgttccctctagtgtggactaacacttgttgcagccatcctctttaccgtgaatcagagcttatccaggacaatgcactaggtgtgaggaatgctgcacaaagaaagcttctcgatgagcttggtattgtagctgaagatgtaccagtcgatgagttcactcccttgggacgtatgctgtacaaggctccttctgatggcaaatggggagagcatgaacttgattacttgctcttcatcgtgcgagacgtgaaggttcaaccaaacccagatgaagtagctgagatcaagtatgtgagccgggaagagctgaaggagctggtgaagaaagcagatgcaggtgaggaaggtttgaaactgtcaccatggttcagattggtggtggacaatttcttgatgaagtggtgggatcatgttgagaaaggaactttggttgaagctatagacatgaaaaccatccacaaactctgaacatctttttttaaagtttttaaatcaatcaactttctcttcatcatttttatcttttcgatgataataatttgggatatgtgagacacttacaaaacttccaagcacctcaggcaataataaagtttgcggccgc

SEQ ID NO: 68001 - protein, 284 aa, Arabidopsis thaliana
MSVSSLFNLPLIRLRSLALSSSFSSFRFAHRPLSSISPRKLPNFRAFSGTAMTDTKDAGMDAVQRRLMFEDECILVDETDRVVGHVSKYNCHLMENIEAKNLLHRAFSVFLFNSKYELLLQQRSNTKVTFPLVWTNTCCSHPLYRESELIQDNALGVRNAAQRKLLDELGIVAEDVPVDEFTPLGRMLYKAPSDGKWGEHELDYLLFIVRDVKVQPNPDEVAEIKYVSREELKELVKKADAGEEGLKLSPWFRLVVDNFLMKWWDHVEKGTLVEAIDMKTIHKL

SEQ ID NO: 68002 - DNA, 747 bp, Bombyx mori
  CDS (1)..(747)
atgttggtcagaaagctaacaagatcactgtggagcaccctaagagtcgagaaaagatttttggcttcagaacctgtgaaacctgctactctagataaggatggtctggaattagcccaggcagaagctttagataaagatatttgcctgctagttgatgaaaaggacaacttcataggaacggctacaaagagagaatgtcataaagtaggacctgatggtgatgtgctactccatagagcattcagtgttttcctcttcaacaagagaggtgatatgttccttcagaggagatcaagccaaaaagtaacatatcccgattactacacaaatgcttgctgcagccatccactgtacatagatgagaagcccgaggaaatcataacggcagccagacgtaggatgaaccatgaactgggaatcccactagatcagttggacccggaactgtttacgttcatgacccgcgtgcactatcacgacccgggtgatggagtgtggggcgaacacgagatcgaccacatactgttcttccaaagcgacgttaaggtcaaaccgaactcggacgagatctcggagtattgtttcgtgccccaagcagaggttaattcgttccttccaaccttggagggtccgataacgccgtggttcaacatgatccgccgccaccgattgaaactctggtgggacaacttgcaccgcatcaaagagctcgccgaatccggagaaaataccaaaatttgttga

SEQ ID NO: 68003 - protein, 248 aa, Bombyx mori
MLVRKLTRSLWSTLRVEKRFLASEPVKPATLDKDGLELAQAEALDKDICLLVDEKDNFIGTATKRECHKVGPDGDVLLHRAFSVFLFNKRGDMFLQRRSSQKVTYPDYYTNACCSHPLYIDEKPEEIITAARRRMNHELGIPLDQLDPELFTFMTRVHYHDPGDGVWGEHEIDHILFFQSDVKVKPNSDEISEYCFVPQAEVNSFLPTLEGPITPWFNMIRRHRLKLWWDNLHRIKELAESGENTKIC

SEQ ID NO: 68004 - DNA, 882 bp, Oryza sativa (japonica cultivar-group)
  CDS (1)..(882)
atggcggcggcggcgcgctccctcgcgctgctctcgaccgcctccgcgtccctcggcctcggcgtcgcgcgctcctccgcccgccctcggtccccgtttgggcggggcctcgccctccgcggcctgtcgtcgtcctcgtcctccttcgccgccaccgccgcggtgatggggaaggccggcaccgcggaagccgccgacgccgggatggacgccgtccagcagcggctcatgttcgaggacgagtgtattttagtggacgaacaggacaacgtcattggccatgattccaagtataactgccatctcatggaaaagataaattctggtcatgtcctccacagagcgttcagtgtttttcttttcaactccaaatatgaattgttacttcagcaaaggtctgctacaaaagtgacatttccacttgtctggacaaacacttgctgtagccaccctctataccgcgagtccgagctcattgaagataaaagcctaggggtcagaaatgcagcacagcggaagctattcgatgaactgggaatacaagctgaagaactacctgttgaccaattcattcctcttgggaggatgctttacaaggctccatctgatggaaaatggggcgaacatgaactggactacctcctattcatggttcgtgatgtggagctcagcccgaatcctgaagaagtggccgacgtcaagtacgtgaatcgtgatgagctgaaggagttgctcaagaaggcagatgctggtgaaggcggcattaagctgtccccttggtttaggctggttgttgacaacttcctcatgagatggtgggatcatgttgagcaagggactctggaggaggccatcgacatgaaaacaattcataagttgtag

SEQ ID NO: 68005 - protein, 293 aa, Oryza sativa (japonica cultivar-group)
MAAAARSLALLSTASASLGLGVARSSARPRSPFGRGLALRGLSSSSSSFAATAAVMGKAGTAEAADAGMDAVQQRLMFEDECILVDEQDNVIGHDSKYNCHLMEKINSGHVLHRAFSVFLFNSKYELLLQQRSATKVTFPLVWTNTCCSHPLYRESELIEDKSLGVRNAAQRKLFDELGIQAEELPVDQFIPLGRMLYKAPSDGKWGEHELDYLLFMVRDVELSPNPEEVADVKYVNRDELKELLKKADAGEGGIKLSPWFRLVVDNFLMRWWDHVEQGTLEEAIDMKTIHKL

SEQ ID NO: 68006 - DNA, 717 bp, Oryza sativa (japonica cultivar-group)
  CDS (1)..(717)
atggccggcgccgccgccgccgtggaggacgccgggatggacgaggtccagaagcggctcatgttcgacgacgaatgcattttggtggatgaacaagacaatgttgttggccatgaatcaaaatataactgccatctgatggaaaaaatcgaatctgaaaatctacttcatagggctttcagtgtattcctgttcaactcaaaatatgaactcctactccagcaacgatctgcaacaaaggttacatttcctctagtttggaccaacacttgctgcagccatcctctgtaccgtgagtctgagcttatacaggaaaactaccttggtgttagaaatgctgctcagaggaagctcttggatgagctgggcatcccagctgaagatgtgccagttgaccaattcacccctcttggtcggatgctttacaaggccccatctgatggaaaatggggtgaacacgagcttgactacctgctgttcatcgtccgcgacgtgaaggtagtcccgaacccggacgaagtggccgatgtgaaatacgtgagccgtgagcagctgaaggagctcatccgcaaagcggacgccggagaggaaggcctgaagctgtctccctggttccggctggttgttgacaacttcctcatgggctggtgggatcacgtcgagaaaggcaccctcaacgaggccgtggacatggagaccatccacaagctgaagtaa

SEQ ID NO: 68007 - protein, 238 aa, Oryza sativa (japonica cultivar-group)
MAGAAAAVEDAGMDEVQKRLMFDDECILVDEQDNVVGHESKYNCHLMEKIESENLLHRAFSVFLFNSKYELLLQQRSATKVTFPLVWTNTCCSHPLYRESELIQENYLGVRNAAQRKLLDELGIPAEDVPVDQFTPLGRMLYKAPSDGKWGEHELDYLLFIVRDVKVVPNPDEVADVKYVSREQLKELIRKADAGEEGLKLSPWFRLVVDNFLMGWWDHVEKGTLNEAVDMETIHKLK

SEQ ID NO: 68008 - DNA, 876 bp, Arabidopsis thaliana
  CDS (1)..(876)
atgtctactgcttcactatttagcttcccttcatttcatctcagatccctccttccttctctctcttcttcttcttcttcttcctcttcccgatttgcccctccccgtctttctccgatccgatctccggcgccgaggactcagctgtctgttcgcgctttctcagccgtcaccatgaccgattctaacgatgctggaatggatgctgttcagagacgactcatgtttgaagacgaatgcattctcgttgatgaaaatgatcgtgtggtgggacatgacactaagtataactgtcatctgatggaaaagattgaagctgagaatttacttcacagagctttcagtgtgtttttattcaactccaagtatgagttgcttctccagcaacggtcaaaaacaaaggttactttcccacttgtgtggacaaacacttgttgcagccatcctctttaccgtgaatccgagcttattgaagagaatgtgcttggtgtaagaaatgccgcacaaaggaagcttttcgatgagctcggtattgtagcagaagatgtaccagtcgatgagttcactcccttgggacgcatgctttacaaggcaccttctgatgggaaatggggagagcacgaagttgactatctactcttcatcgtgcgggatgtgaagcttcaaccaaacccagatgaagtggctgagatcaagtacgtgagcagggaagagcttaaggagctggtgaagaaagcagatgctggcgatgaagctgtgaaactatctccatggttcagattggtggtggataatttcttgatgaagtggtgggatcatgttgagaaaggaactatcactgaagctgcagacatgaaaaccattcacaagctctga

SEQ ID NO: 68009 - protein, 291 aa, Arabidopsis thaliana
MSTASLFSFPSFHLRSLLPSLSSSSSSSSSRFAPPRLSPIRSPAPRTQLSVRAFSAVTMTDSNDAGMDAVQRRLMFEDECILVDENDRVVGHDTKYNCHLMEKIEAENLLHRAFSVFLFNSKYELLLQQRSKTKVTFPLVWTNTCCSHPLYRESELIEENVLGVRNAAQRKLFDELGIVAEDVPVDEFTPLGRMLYKAPSDGKWGEHEVDYLLFIVRDVKLQPNPDEVAEIKYVSREELKELVKKADAGDEAVKLSPWFRLVVDNFLMKWWDHVEKGTITEAADMKTIHKL

SEQ ID NO: 68010 - DNA, 771 bp, Drosophila melanogaster
  CDS (1)..(771)
atgttggcctctcgcttgaatctcctgttgccccgcgtatcctggctgcgcggttgctcaacgacagcggtgggccagaaacatcagcgccaggtgcccacggagttcgccgtacacgatcctctgcaggctcacgctctaaaggaacagtgcatcctggttgacgccaacgaccaagccattggggccgcctctaaggcagactgccaccgtgtgcatccagagacgaatgatgttaagctccatcgcgccttcagtgtttttctcttcaattctcagggagagatgctagtgcagaagcgatcgtctcacaagataaccttcccaaacacctacaccaacgcgtgctgcagccatccgctttacgaaatcgaacaggaacgtcaggagcgcaacgcacagggcatccgtgtggccgctcaacgacgtctcaactacgaactgggcattcccacagaggaactgcagccacaggactttcgctacctgacccgcatccactacgcagacacgggcgacggcgtgtggggcgagcacgagatagactacatcctgttcctgcaaaaagacgtgacgctgcgtccaaatagcaacgaggtcagtgaggtgcgctacttgcgccgcgataagatcgacgaggcggtggcgaagtttagtgccccgctgacaccctggttctctctgattctgcagcatcgattgaaactctggtgggacaatttgcaccagctggagcaatttgaggacttgagtaatattcagcgcttttaa

SEQ ID NO: 68011 - protein, 256 aa, Drosophila melanogaster
MLASRLNLLLPRVSWLRGCSTTAVGQKHQRQVPTEFAVHDPLQAHALKEQCILVDANDQAIGAASKADCHRVHPETNDVKLHRAFSVFLFNSQGEMLVQKRSSHKITFPNTYTNACCSHPLYEIEQERQERNAQGIRVAAQRRLNYELGIPTEELQPQDFRYLTRIHYADTGDGVWGEHEIDYILFLQKDVTLRPNSNEVSEVRYLRRDKIDEAVAKFSAPLTPWFSLILQHRLKLWWDNLHQLEQFEDLSNIQRF

SEQ ID NO: 68012 - DNA, 738 bp, Apis mellifera
  CDS (1)..(738)
atgatagctaaagtgcttcgaacagtgtttaatagtgtacaaactctaacatcttccagaatgaatttagtaagtactgctgaagctactttgcagctagctgctttacaagaacgttgtattcttgttgattcatatgataaatctattggtgatgctacaaagaaagagtgtcatattgttaatcctgatggacaagttttacttcatcgagcatttagtgtctttttattcaatgataaaggagaattattacttcaaaaaagatctgctaataaggtaacatttccaaatcattatacaaatacatgttgtagtcatccattatttgaaatttctggagaaactgaagaacacgatgcaattggaattcgtagagcagcacgaagaagactcaattatgaattaggaattcctctatcacaaatatcgatatcagattttgtatatttaactagaattcattattttgcagcagaaagtgaatggggtgaacatgaaatagattatgtactatttatacaaaaagataatttaaaattagatccaaatccagatgaaattagtgaactttgttggatatcacaatcagaaattaacaattttgtaaaaaatcttaatgctccattaactccttggtttaaattgatacttgaacataaattgccagaatggtggaataatttgcattcgttaaaaaaattacaagatcataatacaatacaaagatttgtataa

SEQ ID NO: 68013 - protein, 245 aa, Apis mellifera
MIAKVLRTVFNSVQTLTSSRMNLVSTAEATLQLAALQERCILVDSYDKSIGDATKKECHIVNPDGQVLLHRAFSVFLFNDKGELLLQKRSANKVTFPNHYTNTCCSHPLFEISGETEEHDAIGIRRAARRRLNYELGIPLSQISISDFVYLTRIHYFAAESEWGEHEIDYVLFIQKDNLKLDPNPDEISELCWISQSEINNFVKNLNAPLTPWFKLILEHKLPEWWNNLHSLKKLQDHNTIQRFV

SEQ ID NO: 68014 - DNA, 873 bp, Nasonia vitripennis
  CDS (1)..(873)
atgaactccgtgagctgccggacgccggtaggcggtagtcggtacacaggtttatcaggtcatcgcagcttcctgccactgaatacgaggtatgttgaagttcacacgtccctgagcaacggagtatacaagatgctggctgttggtagaagactgtgcaacgcactcaaagaggagctactcagtgttcgctcgcactacacgaacatgcagatagctccgctacagaggactgccctggaggagaggtgtatccttgtagacgagctcgacagacccgttggggaagctacgaagaagcactgtcacctcatcgccaaggatggaagtatacctctgcatagagcattcagcgtctttcttttcaacggcaagggtgatttgctgatccagaaaagatcggcaacaaagatcacttttcccggattctatacaaacacttgctgtagccacccgctagctgagattggaggtgaaagcgaagaaactgatgctcttggaattcggagagctgctcaaagaagacttggctacgaattgggcattccaatcaaagaagttcagccccaagattttacctacctaactagaatacactatcaagcaccaggcaacgacatctggggagagcatgaaattgattatgttctctttctgcaagtgaacaagatcacgcttgacccaaatccagatgaaatcagtgaaatcagatggatttccaaaagtggcattagcgaatttttgaagtccattgattctcctttgactccctggtttaaattgatactagagcaccaattgccagtgtggtggaacaatttagacaggctgcacgaatttcaagaccattcaaccattcatcgcttttcttaa

SEQ ID NO: 68015 - protein, 290 aa, Nasonia vitripennis
MNSVSCRTPVGGSRYTGLSGHRSFLPLNTRYVEVHTSLSNGVYKMLAVGRRLCNALKEELLSVRSHYTNMQIAPLQRTALEERCILVDELDRPVGEATKKHCHLIAKDGSIPLHRAFSVFLFNGKGDLLIQKRSATKITFPGFYTNTCCSHPLAEIGGESEETDALGIRRAAQRRLGYELGIPIKEVQPQDFTYLTRIHYQAPGNDIWGEHEIDYVLFLQVNKITLDPNPDEISEIRWISKSGISEFLKSIDSPLTPWFKLILEHQLPVWWNNLDRLHEFQDHSTIHRFS

SEQ ID NO: 68016 - DNA, 765 bp, Magnaporthe grisea 70-15
  CDS (1)..(765)
atgtcttccaccacgaccaccacggcgcagccgatcacagccgagaccatcttgagcctgttcccggatattgacaccagcggagaggctctggacggtcacgatgaggagcagatcaggctcatggacgaggtgtgcattgtcgtcgacgagaacgacatgcccatcgggaagggcagcaagaagatttgccacctcatgaccaacatagaaaagggtctattgcaccgggccttctctgtcttcctcttcaacgacaagaacgagctgctcctccagcagcgcgcgacggaaaagattaccttccccgacatgtggaccaacacctgctgctcgcaccctctcggaatcccaggcgagactggatcgaacctcccggactccatcatgggcgtcaagcgtgcggcgcagcgcaagctggaccacgagctcggcatcaagaaggagcaggtaccactcgagaacttccacttcctcactcgcatacactacaaggcacccagtgacggtaaatggggtgagcacgaggtcgattacatcctcttcatcaaggcgaatgtggatctcgacatcaacaagaacgaggtccaggccacacaatatacctcggcagatggtctcaaggccttcttcaaggaccccgcagccaagttcacaccgtggttcaagctgatatgcgagtcaatgctcttcgagtggtggcagcaccttgactctggtttggagaagtataccaacgagcaaggaatccgaagaatgctctaa

SEQ ID NO: 68017 - protein, 254 aa, Magnaporthe grisea 70-15
MSSTTTTTAQPITAETILSLFPDIDTSGEALDGHDEEQIRLMDEVCIVVDENDMPIGKGSKKICHLMTNIEKGLLHRAFSVFLFNDKNELLLQQRATEKITFPDMWTNTCCSHPLGIPGETGSNLPDSIMGVKRAAQRKLDHELGIKKEQVPLENFHFLTRIHYKAPSDGKWGEHEVDYILFIKANVDLDINKNEVQATQYTSADGLKAFFKDPAAKFTPWFKLICESMLFEWWQHLDSGLEKYTNEQGIRRML

SEQ ID NO: 68018 - DNA, 762 bp, Gibberella zeae PH-1
  CDS (1)..(762)
atgtctacaacaactaccacaaccaaccagcctatcacggccgaatctatgcttcgtctcttcccggacattgatactagctcagcgcctctctccggtcacgatgaggagcagattcgtcttatggacgaggtttgcattgtcctcgacgaggacgacaagcccattggaacagccagcaagaagatttgccatctcatgaccaacattgacaagggcctccttcaccgtgccttctccgtcttcctctttaacgacaagaacgagctcctcctccaacagcgcgccaccgagaagatcaccttccccgacatgtggaccaacacttgctgctctcaccctcttcacatccctaccgagactggttccactctcgaggactctatcgcgggtgtcaagcgagctgcccagcgcaagcttgagcatgaattgggtatcaagaaggagcaggtccccttcgaggactttcacttcctgacccgtattcactacaaggctcccagtgacggaatgtggggtgagcatgagattgactacattctttttatcaaggccaacgtcgaccttgacatcaacaagaacgaggtccgagatacccaatacgttactcccgagagcctcaagcaacaattcgacgatcccagcctggttttcactccttggttcaagctcatctgcaactctatgctctttgagtggtggcagaacctcgactctggtctcgacaagtacttgaacgaacaggagatccgacgcatgtaa

SEQ ID NO: 68019 - protein, 253 aa, Gibberella zeae PH-1
MSTTTTTTNQPITAESMLRLFPDIDTSSAPLSGHDEEQIRLMDEVCIVLDEDDKPIGTASKKICHLMTNIDKGLLHRAFSVFLFNDKNELLLQQRATEKITFPDMWTNTCCSHPLHIPTETGSTLEDSIAGVKRAAQRKLEHELGIKKEQVPFEDFHFLTRIHYKAPSDGMWGEHEIDYILFIKANVDLDINKNEVRDTQYVTPESLKQQFDDPSLVFTPWFKLICNSMLFEWWQNLDSGLDKYLNEQEIRRM

SEQ ID NO: 68020 - DNA, 828 bp, Candida glabrata CBS 138
  CDS (1)..(828)
atgtcagaatacaggaagctagtggaaggtctagatgaggctgctatcttggagaatttcccagagattatcccattgcagagcagaccaaatacacactcaagcgaagacgccagtcgtggcaaggatgatgtgtttgcaggacatgatcaagagcagatacgattgatgaatgagaactgtatcgtcttagactgggaagataacgccatcggtgccggaaccaaaaaagtgtgccacctaatggacaacatcaaccgtggtcttctgcatagagccttctctgtgtttatattcaacactgagggtaaactattgttgcaacaaagagctaccgaaaagattacattccctgatctatggaccaacacttgttgttcccatccactttgtgttgatgacgaactcggtgaaaacggctctttgccagctaaggttcttggtgccaagactgcagcaagcagaaagttggagcatgagctaggtatcccagaagcggagactgctactagaggtaagttccatttcttgaacagaattcactatatggctccttctaacgagccatggggtgagcatgaaattgattacattctattctacaagatcgatgaaggtaaacaactcactgtacaaccaaacttaaatgaagtcagggatttccgttgggtttcggccgatgaattgaaggctatgtttaacgacccacaatacaagttcactccttggttcaaaattatctgcgatagttatttattccaatggtgggagcaattacaggacttgtcaaaggttgaaaacgattctcaaatacatagaatgttatga

SEQ ID NO: 68021 - protein, 275 aa, Candida glabrata CBS 138
MSEYRKLVEGLDEAAILENFPEIIPLQSRPNTHSSEDASRGKDDVFAGHDQEQIRLMNENCIVLDWEDNAIGAGTKKVCHLMDNINRGLLHRAFSVFIFNTEGKLLLQQRATEKITFPDLWTNTCCSHPLCVDDELGENGSLPAKVLGAKTAASRKLEHELGIPEAETATRGKFHFLNRIHYMAPSNEPWGEHEIDYILFYKIDEGKQLTVQPNLNEVRDFRWVSADELKAMFNDPQYKFTPWFKIICDSYLFQWWEQLQDLSKVENDSQIHRML

SEQ ID NO: 68022 - DNA, 837 bp, Kluyveromyces lactis NRRL Y-1140
  CDS (1)..(837)
atgtcaactcaaacttctacctatgcggaccttgtgcattcattagaacaagatgacatcttagaaaagtttcctgaggtcatcccattgaacaacagaccaaatacacattctactgaatcctctggcgaaacggataatttgctagatggatatgatgaggaacaaatcagattgatgaatgaaaattgtatagttttggattggaacgatactgcgattggtgctggtacaaaaaaactatgtcatttgatggagaacatcaaccaaggtctattacatcgcgcattttctgtgttcctttttgacagcgatggtaaattactattacaacaacgtgccactgaaaagattacttttgcagatctttggaccaacacatgctgttcacaccctttgtgcgtcgatgacgaacttggactgaacggctctttggaaagtaaaatagagggtgccagaactgcagcagttagaaaattggaacatgaactaggtatcccaccacaagaggttgaatctaaaggagaattccactttttgaaccgtattcattacatggctccaagcgatggtgcttggggagaacacgaaattgattatatattcatctatcaattgagaaaaggagagactctgaccgtcgagccaagcactaatgaagtaagagatattgcttgggtatctcaagaagaattaaagcaaatgttcgcagatggtaacctaaaattcactccatggttcaaattaatttgtgacaattatctattccaatggtggaatcaattaaatgatttgaacaaagtcgaaaatgataccaaaattcacagaatgatgtaa

SEQ ID NO: 68023 - protein, 278 aa, Kluyveromyces lactis NRRL Y-1140
MSTQTSTYADLVHSLEQDDILEKFPEVIPLNNRPNTHSTESSGETDNLLDGYDEEQIRLMNENCIVLDWNDTAIGAGTKKLCHLMENINQGLLHRAFSVFLFDSDGKLLLQQRATEKITFADLWTNTCCSHPLCVDDELGLNGSLESKIEGARTAAVRKLEHELGIPPQEVESKGEFHFLNRIHYMAPSDGAWGEHEIDYIFIYQLRKGETLTVEPSTNEVRDIAWVSQEELKQMFADGNLKFTPWFKLICDNYLFQWWNQLNDLNKVENDTKIHRMM

SEQ ID NO: 68024 - DNA, 861 bp, Debaryomyces hansenii CBS767
  CDS (1)..(861)
atgtcagattacgctaagctagttgctgggttaacgggtgaagacattttgaacaaatggagcgaagttactccgttgaaacagatctctggagttccgaaatcagcaggttcaagcacagacaattccatcatcaacgaaacgatatttgaaggccacaacgaggaacaaattaaattgatggatgaattgtgcattgttttagactacgaggacaagcccatcggagctggtaccaagaagttgtgccatataatgaccaacatcgacgaagggttgttgcacagagcattttctgtgtttctcttcaacgaggacggaaagttgttattacaacagagagctgacgaaaagatcacattcccacagatgtggaccaacacctgctgttcgcatccgttgtgcgtgcctgatgaattaggcataacggcagagggtggaagctcgaaccaaaatgacttgtcgaccgccattgcgggagccaaggtggcagcgcaaagaaagttggagcacgaactaggcattccttacggagatgctcctcttgccgactttcagtacttgaccagaatccactacaagtcgcctagtggaggtgacgactccaagtggggtgagcacgagatcgactacatcttgatcttgaagaccaagaacgacatcaccataaatgccaactacaacgaggtcaaggactacaagtacgtgggtcaagacgaattgaagcaaatgtttgaagatgactcgttggtattcaccccatggttcaaattgatctgccaaactttcttgttcaactggtggggtaatttggacgacttgcactctttcaaagacgataaagtccaccgtttactctaa

SEQ ID NO: 68025 - protein, 286 aa, Debaryomyces hansenii CBS767
MSDYAKLVAGLTGEDILNKWSEVTPLKQISGVPKSAGSSTDNSIINETIFEGHNEEQIKLMDELCIVLDYEDKPIGAGTKKLCHIMTNIDEGLLHRAFSVFLFNEDGKLLLQQRADEKITFPQMWTNTCCSHPLCVPDELGITAEGGSSNQNDLSTAIAGAKVAAQRKLEHELGIPYGDAPLADFQYLTRIHYKSPSGGDDSKWGEHEIDYILILKTKNDITINANYNEVKDYKYVGQDELKQMFEDDSLVFTPWFKLICQTFLFNWWGNLDDLHSFKDDKVHRLL

SEQ ID NO: 68026 - DNA, 813 bp, Yarrowia lipolytica CLIB122
  CDS (1)..(813)
atgacgacgtcttacagcgacaaaatcaagagtatcagcgtgagctctgtggctcagcagtttcctgaggtggcgccgattgcggacgtgtccaaggctagccggcccagcacggagtcgtcggactcgtcggccaagctatttgatggccacgacgaggagcagatcaagctgatggacgagatctgtgtggtgctggactgggacgacaagccgattggcggcgcgtccaaaaagtgctgtcatctgatggacaacatcaacgacggactggtgcatcgggccttttccgtgttcatgttcaacgaccgcggtgagctgcttctgcagcagcgggcggcggaaaaaatcacctttgccaacatgtggaccaacacgtgctgctcgcatcctctggcggtgcccagcgagatgggcgggctggatctggagtcccggatccagggcgccaaaaacgccgcggtccggaagcttgagcacgagctgggaatcgaccccaaggccgttccggcagacaagttccatttcctcacccggatccactacgccgcgccctcctcgggcccctggggcgagcacgagattgactacattctgtttgtccggggcgaccccgagctcaaggtggtggccaacgaggtccgcgataccgtgtgggtgtcgcagcagggactcaaggacatgatggccgatcccaagctggttttcaccccttggttccggctcatttgtgagcaggcgctgtttccctggtgggaccagttggacaatctgcccgcgggcgatgacgagattcggcggtggatcaagtag

SEQ ID NO: 68027 - protein, 270 aa, Yarrowia lipolytica CLIB122
MTTSYSDKIKSISVSSVAQQFPEVAPIADVSKASRPSTESSDSSAKLFDGHDEEQIKLMDEICVVLDWDDKPIGGASKKCCHLMDNINDGLVHRAFSVFMFNDRGELLLQQRAAEKITFANMWTNTCCSHPLAVPSEMGGLDLESRIQGAKNAAVRKLEHELGIDPKAVPADKFHFLTRIHYAAPSSGPWGEHEIDYILFVRGDPELKVVANEVRDTVWVSQQGLKDMMADPKLVFTPWFRLICEQALFPWWDQLDNLPAGDDEIRRWIK

SEQ ID NO: 68028 - DNA, 807 bp, Aspergillus nidulans FGSC A4
  CDS (1)..(807)
atgagcgccacagagacaatcaccaggataacggccgacaatgtcgctgatatctttcccgacgtcgatacctcgctagcccgggaagttcttccccaggcgacgactacctcggtcgcgaacagcaatgatctcgctggatacgatgaggagcaggtccgtcttatggatgaggtctgcatcgtcttggatgacgatgataagccgattgggagcgctagcaagaaaacatgccatttaatgacaaacatcgatcgcggcctcctacatcgcgccttctccgtttttctcttcgactcccagaaccgcctccttctacaacagcgtgcctccgagaaaatcacctttccggacatgtggacgaatacctgctgctcgcacccgctagggatccctggtgaaacggggtcgcagctggacgcggcgatcctgggtgtaaagcgcgcagcgcagaggaagttaaaccacgagctggggattaagccggaggaggtccctattgagaaatttgagttcttcacaaggattcattataaggcgccgagtgatgggaagtggggagagcatgagattgactatatcctctttatccaggcggacgtcgttctcgagccaaatctcaacgaagtccgcgacacgcgatatgtgtctgcggacgagctgaaggagatgttcaagcagaccaatctgaaattcacaccgtggttcaagctcatctgcaactcgatgctgtttgagtggtggagccaccttggttctccttcactggatcagtacaagggggagacgcagatacgtcggatgtga

SEQ ID NO: 68029 - protein, 268 aa, Aspergillus nidulans FGSC A4
MSATETITRITADNVADIFPDVDTSLAREVLPQATTTSVANSNDLAGYDEEQVRLMDEVCIVLDDDDKPIGSASKKTCHLMTNIDRGLLHRAFSVFLFDSQNRLLLQQRASEKITFPDMWTNTCCSHPLGIPGETGSQLDAAILGVKRAAQRKLNHELGIKPEEVPIEKFEFFTRIHYKAPSDGKWGEHEIDYILFIQADVVLEPNLNEVRDTRYVSADELKEMFKQTNLKFTPWFKLICNSMLFEWWSHLGSPSLDQYKGETQIRRM

SEQ ID NO: 68030 - DNA, 855 bp, Candida albicans SC5314
  CDS (1)..(855): transl_table=12
atgtcatcagaatacgccaagttagttgctagtctttctaatcaagatattttaaccaaatggccagaagttacccccttgaagaagatttctggtattccaagatctgctggatctgacagcagtgattctgatttatttgatggtcatgatgaagaacaaattagattaatggaagaattgtgtatcgttttagattatgatgacaagcctgttggtgcaggaacaaaaaaattgtgtcacataatggataatattaatgctgggttgttacatcgtgcattttctgtgtttttattcaatgaagatgggaaattattattacaacaaagagctgatgaaaaaatcactttcgcaaacatgtggacaaacacttgttgctctcatcctttatgtgttccaagtgaattgggtgttgattcgtcattggaaggttctaaagatgtcaacaatttgactaatgctgttaagggtgctaaggttgctgcacaaagaaaattggaacacgaattgggaataccatttgaagatgccccaatagaaaatttcacctacttgactagaatccattacaaatcaccaagtggtgacgaatcttccaaatggggggaacacgaaattgattatatattaattttgaaaactaaaaatgatatcactgttaatgctaattataatgaggttaaagatttcaaatatgtcagtgctgatgaattgaaagtcatgtttgaagatgactccttggtgtttaccccatggttcaaattgatttgccaatctttcttattcaaatggtgggataacttggacaatttagatcaattcaaagatgaagaaatccatcgtttactctga

SEQ ID NO: 68031 - protein, 284 aa, Candida albicans SC5314
MSSEYAKLVASLSNQDILTKWPEVTPLKKISGIPRSAGSDSSDSDLFDGHDEEQIRLMEELCIVLDYDDKPVGAGTKKLCHIMDNINAGLLHRAFSVFLFNEDGKLLLQQRADEKITFANMWTNTCCSHPLCVPSELGVDSSLEGSKDVNNLTNAVKGAKVAAQRKLEHELGIPFEDAPIENFTYLTRIHYKSPSGDESSKWGEHEIDYILILKTKNDITVNANYNEVKDFKYVSADELKVMFEDDSLVFTPWFKLICQSFLFKWWDNLDNLDQFKDEEIHRLL

SEQ ID NO: 68032 - DNA, 789 bp, Ustilago maydis 521
  CDS (1)..(789)
atgtcgaccgccaccgtcaccgagacagcgacacatcgcacctcgtccaccatcacgctagactcagcgccactcaccggctatgatgaggagcagatccgtctcatggaagagcgatgtatcgtgctcgacaatgacgacaagtacgtccgcgatggcagtaagaaggaatgccatctcatgaccaacatcaacaagggtctcttgcatcgtgctttctccgtgttcctctttgatcctactacgggaaagctgttgcttcagcgaagggcgctcgaaaagatcactttccccaacatgtggaccaacacttgctgctctcatccgttggcgatcaagggagagctcgaggaagcagagcagatcggtgtacgccgtgcagcgcagcgcaagctcgatcacgaactcggcatccgcgccgaacaagtgccattggatgaattccagtacctcacccgaatccactacctcgctcccaacaacgacgccaataacatgtggggcgaacacgaaatcgactacatcctcttcatcactgccgacgtcacgttgaaacccaacctgaacgaggtctgcgataccaaatgggtttcgcccgaagagttgaaggcgctcatgaccgagttggaccctgcgtcatttacgccatggttcaagttgattgtgcacaagtttctcttcccctggtggagcgagttgctcgcaaggagaggcgcggatcacagcaaaccatttgacgccaagtcgctgtcggatcttacagatcacagcattcaccgcctcctctga

SEQ ID NO: 68033 - protein, 262 aa, Ustilago maydis 521
MSTATVTETATHRTSSTITLDSAPLTGYDEEQIRLMEERCIVLDNDDKYVRDGSKKECHLMTNINKGLLHRAFSVFLFDPTTGKLLLQRRALEKITFPNMWTNTCCSHPLAIKGELEEAEQIGVRRAAQRKLDHELGIRAEQVPLDEFQYLTRIHYLAPNNDANNMWGEHEIDYILFITADVTLKPNLNEVCDTKWVSPEELKALMTELDPASFTPWFKLIVHKFLFPWWSELLARRGADHSKPFDAKSLSDLTDHSIHRLL

SEQ ID NO: 68034 - DNA, 798 bp, Cryptococcus neoformans var. neoformans B-3501A
  CDS (1)..(798)
atgtcgacaactgctgtagaaaccgtcaccacctctcccgcgactctcaccactgccgtcaatgatattaatctcgattcgtatgatgaagagcaagtaagacttatggaggagaggtgcattcttgtcactcccgaggacaaggtttatggcgaaggaagtaaaaaagtctgtcacctcatgtctaacatcaacactggtcttcttcatcgtgctttttccgttttccttttccgccccgccgatggccgtctcctccttcaaaaacgtgccgacgaaaagataactttccccagcatgtggaccaatacttgctgttctcatccgttgagtatcaaagctgaacttgtggaagagcaccaggcaggcgtgaaagccgccgccattagaaaacttcctcaagagctgggaataccagagagtcaacttaagcctgaggacttccatttcctcactcggatacactatctggcgcctagtagtggcgtctggggagagcacgagatcgactacattctgttctctaccctcaacgtggaccttgacctcaaccccaacgaggtcagtgatgccaaatatgtttcaaaatctgaacttgaggccatgttcaccgatccttccaattcattcaccccgtggttcaagcttattgctcgagaccttcttttcccttggtgggatgagatgcttgccaagtctagatcggccgggtgggacgaggagagcggagttggagaggttcgagcggacgtactggctaacggaccgaaaataaatgagctcattcggatgatctga

SEQ ID NO: 68035 - protein, 265 aa, Cryptococcus neoformans var. neoformans B-3501A
MSTTAVETVTTSPATLTTAVNDINLDSYDEEQVRLMEERCILVTPEDKVYGEGSKKVCHLMSNINTGLLHRAFSVFLFRPADGRLLLQKRADEKITFPSMWTNTCCSHPLSIKAELVEEHQAGVKAAAIRKLPQELGIPESQLKPEDFHFLTRIHYLAPSSGVWGEHEIDYILFSTLNVDLDLNPNEVSDAKYVSKSELEAMFTDPSNSFTPWFKLIARDLLFPWWDEMLAKSRSAGWDEESGVGEVRADVLANGPKINELIRMI

SEQ ID NO: 68036 - DNA, 771 bp, Tribolium castaneum
  CDS (1)..(771)
atgatgctgactctcccctttagaaattttataaagaaagctgcaaatcgcactttgcaaaacagtcttttactgcgggccaagtcgaccaaggaagagaaaagtgaggctgagaagagccaagaagctgctctcgaagagaaactttttctggttgatgagaatgataaagttatagggcatgcctctaagagggagtgccaccaagtgaagaaagacggcgaaattccgctgcatagggcctttagtgtgtttctgtttagcagccatggagatttgctgttgcaaaggcgctctgaagaaaaaatcacataccctggactgtacacgaattcgtgttgtagtcaccccatcgtggacattgaaggggagggagaggagtgcgacgctttgggggtgaaaaaggcggctcagaggaggttagggtttgagttggggattcccaaagacaagttacctctagagaagtttaattatatcacgagagtgcactataaggacgaagggaatggagaatggggcgaacacgagattgattacgtcttgttcttccaaggtgatgtccctgtgaatccgaatccgaacgaaatctcagaaattagctacgtcccgagacacgaattagaccagcatttaccaaccctagggaccctaacaccctggtttcacctaatcctcaagcacagactcaaactttggtgggataatttagacaaaatagataaaatcatcgatcacgagaaaatcctcaagttaggattcccgaagtaa

SEQ ID NO: 68037 - protein, 256 aa, Tribolium castaneum
MMLTLPFRNFIKKAANRTLQNSLLLRAKSTKEEKSEAEKSQEAALEEKLFLVDENDKVIGHASKRECHQVKKDGEIPLHRAFSVFLFSSHGDLLLQRRSEEKITYPGLYTNSCCSHPIVDIEGEGEECDALGVKKAAQRRLGFELGIPKDKLPLEKFNYITRVHYKDEGNGEWGEHEIDYVLFFQGDVPVNPNPNEISEISYVPRHELDQHLPTLGTLTPWFHLILKHRLKLWWDNLDKIDKIIDHEKILKLGFPK

SEQ ID NO: 68038 - DNA, 534 bp, Cytophaga hutchinsonii ATCC 33406
  CDS (1)..(534): transl_table=11
gtgaataaagaagagtacgtattattggttgatgagcaggataatgaaatcggttccatggaaaagatggaagcacaccggaaaggactgcttcaccgggcattttctgtttttatttttaatacaaaaggagaattactacttcagcaacgtgctgcttctaaatatcactccccattaaagtggaccaatacatgctgcagccatcagcgtaaaaacgaaaccacactccaggccgcagcccgtagaatgcaggaagaaatgggtatcacctgcaacgtatcgctttcctatacattcatttataaggcagatgtcggacagggtttattcgaacatgaattagatcatgtattgatcggtacaacaacacaaacaactattccttttaataaaaatgaggtacatgcggtacggtttgcttcactggaagatatagaaaaagaaatgagcattaatccggaagactttacgaaatggtttttaataactttttcagatctgagaaaatatatcagcgagcatcctgtttaa

SEQ ID NO: 68039 - protein, 177 aa, Cytophaga hutchinsonii ATCC 33406
MNKEEYVLLVDEQDNEIGSMEKMEAHRKGLLHRAFSVFIFNTKGELLLQQRAASKYHSPLKWTNTCCSHQRKNETTLQAAARRMQEEMGITCNVSLSYTFIYKADVGQGLFEHELDHVLIGTTTQTTIPFNKNEVHAVRFASLEDIEKEMSINPEDFTKWFLITFSDLRKYISEHPV

SEQ ID NO: 68040 - DNA, 525 bp, Croceibacter atlanticus HTCC2559
  CDS (1)..(525): transl_table=11
atgagtaaaataaaagaagaacaagttattcttgtaaaccaaaatgatgagcagataggcttaatggccaagatggaagctcatgaaaaagcattattgcaccgtgcattttcagtatttgtatttaataaaaatggtgaacttatgttgcaacaaagagcactacacaaataccatacgccaggattatggacaaatacgtgctgtagtcatcaaagagaaggagagacaaatattgctgcaggaaaaagaagattacaagaagaaatgggttttagtacagatttaaaagaatccatatcttttatttataaagctccgtttgaaaatgggcttacagaacacgaatatgaccatatcttaataggtgaatttaatgataagccaaatataaacccagatgaagtggcagcttggaaatgggcttcattagaggatattaaaacagatatgaaagaaaacccaaacctgtacacggcttggtttaaaattatcttcgataaatattatgaccatataacataa

SEQ ID NO: 68041 - protein, 174 aa, Croceibacter atlanticus HTCC2559
MSKIKEEQVILVNQNDEQIGLMAKMEAHEKALLHRAFSVFVFNKNGELMLQQRALHKYHTPGLWTNTCCSHQREGETNIAAGKRRLQEEMGFSTDLKESISFIYKAPFENGLTEHEYDHILIGEFNDKPNINPDEVAAWKWASLEDIKTDMKENPNLYTAWFKIIFDKYYDHIT

SEQ ID NO: 68042 - DNA, 519 bp, Flavobacteria bacterium BBFL7
  CDS (1)..(519): transl_table=11
atggataataaagagtacgttatattagtaaatccgcaggatgaaaaagtaggcttaatggaaaaaattgaggcccatgaaaaagcactacttcatagagcgttttcagtttttattattaatgataaagatgagattttacttcaacaaagagcgcttagtaaatatcactctccaggtttatggactaacacttgctgtagtcaccaacgcgatggagaaggaaatgttgaagcaggtagaagaagattaatggaagaaatgggtatgacagcccagcttaaagaactttttcacttcatttatattgctccatttgataacggtcttacagaacacgaactagatcatgtaatggttggctattcaaatgaagaccctataattaatccagatgaagttgccagttttaaatggatgactgcaaatgatattaaagaagatatgatcgctcagccagatctttatacagcatggtttaagatcatttttgataaatattacaaacacatatcatga

SEQ ID NO: 68043 - protein, 172 aa, Flavobacteria bacterium BBFL7
MDNKEYVILVNPQDEKVGLMEKIEAHEKALLHRAFSVFIINDKDEILLQQRALSKYHSPGLWTNTCCSHQRDGEGNVEAGRRRLMEEMGMTAQLKELFHFIYIAPFDNGLTEHELDHVMVGYSNEDPIINPDEVASFKWMTANDIKEDMIAQPDLYTAWFKIIFDKYYKHIS

SEQ ID NO: 68044 - DNA, 771 bp, Drosophila melanogaster
  CDS (1)..(771)
atgttggcctctcgcttgaatctcctgttgccccacgtatcctggctgcgcggttgctcaacgacagcggtgggccagaaacatcagcgccaggtgcccacggagttcgccgtacacgatcctctgcaggctcacgctctaaaggaacagtgcatcctggtcgatgccaacgaccaagccattggggccgcctctaaggcagactgccaccgtgtgcatccagagacgaatgatgttaagctccatcgcgccttcagtgtttttctcttcaattctcagggagagatgctagtgcagaagcgatcgtctcacaagataaccttcccaaacacctacaccaacgcgtgctgcagccatccgctttacgagatcgaacaggaacgtcaggagcgcaacgcacagggcatccgtgtggccgctcaacgacgtctcaactacgaactgggcattcccacagaggaactgcagccacaggactttcgctacctgacccgcatccactacgcagacacgggcgacggcgtgtggggcgagcacgagatagactacatcctgttcctgcaaaaagacgtgacgctgcgtccaaatagcaacgaggtcagtgaggtgcgctacttgcgccgcgataagatcgacgaggcggtggcgaagtttagtgccccgctgacaccctggttctctctgattctgcagcatcgattgaaactctggtgggacaatttgcaccagctggagcaatttgaggacttgagtaatattcagcgcttttaa

SEQ ID NO: 68045 - protein, 256 aa, Drosophila melanogaster
MLASRLNLLLPHVSWLRGCSTTAVGQKHQRQVPTEFAVHDPLQAHALKEQCILVDANDQAIGAASKADCHRVHPETNDVKLHRAFSVFLFNSQGEMLVQKRSSHKITFPNTYTNACCSHPLYEIEQERQERNAQGIRVAAQRRLNYELGIPTEELQPQDFRYLTRIHYADTGDGVWGEHEIDYILFLQKDVTLRPNSNEVSEVRYLRRDKIDEAVAKFSAPLTPWFSLILQHRLKLWWDNLHQLEQFEDLSNIQRF

SEQ ID NO: 68046 - DNA, 771 bp, Drosophila simulans
  CDS (1)..(771)
atgttggcctctcgcttgaagcttctgctgccccgcatgtcctggctgcgcggttgctctacgacagcggtgggccagcaacagcagcgccaggtgcccacggagttcgccgtacacgatcctctgcaggctcacgctctcaaggagcagtgcatcctggtggacgccaacgaccaggccattggggccgcctcaaaggcagactgccaccgtgtgcatccagagacgaatgatgttaagctccatcgggcattcagtgtttttctcttcaattcccagggagagatgctagtgcagaagcgatcgtctcacaagataaccttccccaacacctacaccaacgcgtgctgcagccatccgctttacgagatcgaagaggaacgccaggagagcaacgccctgggcatccgtgtggccgctcagcggcgtctcaactacgaactgggcattcccacagaggaactgcagccacaggactttcgctacctgacccgcatccactacgcagatacgggcgacggcgtatggggcgagcacgagatagactacatcctgttcctgcagaaagacgtgacgctgcgtccaaatagcaacgaggtcagtgaggtgcgctacttgcggcgcgataagatcgacgaggcggtggccaagtttagtgccccgctgacaccctggttctctctgattctgcagcatcgattgaaactctggtgggacaatttgcaccagctggagcaatttgaggacttgagtaatattcagcgcttttaa

SEQ ID NO: 68047 - protein, 256 aa, Drosophila simulans
MLASRLKLLLPRMSWLRGCSTTAVGQQQQRQVPTEFAVHDPLQAHALKEQCILVDANDQAIGAASKADCHRVHPETNDVKLHRAFSVFLFNSQGEMLVQKRSSHKITFPNTYTNACCSHPLYEIEEERQESNALGIRVAAQRRLNYELGIPTEELQPQDFRYLTRIHYADTGDGVWGEHEIDYILFLQKDVTLRPNSNEVSEVRYLRRDKIDEAVAKFSAPLTPWFSLILQHRLKLWWDNLHQLEQFEDLSNIQRF

SEQ ID NO: 68048 - DNA, 1023 bp, Stevia rebaudiana
  CDS (120)..(818)
atcgctcgtcaatccaattaaaccgcttcgcccctaaatctctaccaaaaacgcctcaaatctcattctcctccgctctcactgtcccccgccggtcttccgccaccgtaactgccggtatgggtgacgattccggcatggacgccgtccagagacgcctcatgtttgatgatgaatgcattttggtagatgagaatgacaatgtggttggacatgataccaaatacaactgccacttgatggagaagattgaaaaatataatttgctgcacagggcattcagtgtatttctatttaattcaaaatatgagttactccttcagcaacggtctggaaccaaggtgacattccctatggtatggaccaacacatgttgcagccatccgctctacagagaatcggagctcattcccgaaaatgcccttggtgtgagaaatgctgcccagaggaagctgttggatgaacttggtatccctgctgaagatgttccagttgatcagtttacgcctttgggtcgcatgctctacaaggctccgtctgatggaaagtggggagaacatgaacttgactacctactcttcattgtgcgagacgttgctgtgagcccaaacccagatgaagtggcagatatcaaatatgtgaaccaagacgagttaaaagagttgctaaggaaggcggatgcaggggaggatgggttgaagctgtctccatggttcaggttagtggttgacaacttcttgttcaaatggtgggatcatgttcaaaagggtacgcttcctgaagcaattgacatgaagaccatccataagttgatataaaccacatatgcccctcaactcattggtatggggctaatagtgtttaatctgtcttagcatgtggttcttgtatgttgggtttttgtttcatgagtgtaataacgagccacgttggttctagtcaaaacttgggaactttttttttttacatgtatttccttttctttctaagaagataacttgctgaatttctatttttgctccc

SEQ ID NO: 68049 - protein, 232 aa, Stevia rebaudiana
MGDDSGMDAVQRRLMFDDECILVDENDNVVGHDTKYNCHLMEKIEKYNLLHRAFSVFLFNSKYELLLQQRSGTKVTFPMVWTNTCCSHPLYRESELIPENALGVRNAAQRKLLDELGIPAEDVPVDQFTPLGRMLYKAPSDGKWGEHELDYLLFIVRDVAVSPNPDEVADIKYVNQDELKELLRKADAGEDGLKLSPWFRLVVDNFLFKWWDHVQKGTLPEAIDMKTIHKLI

SEQ ID NO: 68050 - DNA, 990 bp, Picrorhiza kurrooa
  CDS (90)..(797)
ggaacttcattcagatctacccttcttaaaccgaggagatccctcttttctcctcctcttcgtattcgtcacccgcctctctatcgacaatggctgatgtcacagctgattccaccatggacgctgtccagaggcgcctcatgttcgaagacgaatgcatattggttgatgaaaatgacagtgttgtagaccacgacactaaatacaattgccatctgatggaaaaaatcgagaccggaaaaatgttgcacagagctttcagcgtgtttctctttaactcgaaatatgaattattgcttcagcaacgttctgcaaccaaggtgacttttcctttggtatggacaaacacttgctgcagccaccccctgtacagagattccgagctcattgaagaaaacattcttggggtgagaaacgctgctcagaggaagctgttggatgagctgggtatcccagcagatgacgtcccagtagatcaattcaccccattaggtcgtatgctgtacaaagctccatcagatggaaaatggggagaacatgaattggattatctcctattcactgtaagggatgttagtgtgcaccctaacccagatgaagtagcggacgtcacatatgtgaaccgtgagcaattgaaagagattttgagaaaggcagatgctggtgaggagggtttgaaactttcgccatggtttagactagttgtggacaacttcttgtttaagtggtgggatcacgttgagaaaggtacactcaatgaagctgctgacatgaaaaccattcacaagttggtctagaaactgcaagttatcaatctttaatttaattttctgagaatcgtgatggttttgtatgaataagtttgcaatgatgcggattttctagtagtgtgctaataagtttgttagtcagtgtggatctgctgtttcgttttcagaactttttaatttggttttgccatgcaaaaaaaaaaaaaaaaaaaaaaaaaaa

SEQ ID NO: 68051 - protein, 235 aa, Picrorhiza kurrooa
MADVTADSTMDAVQRRLMFEDECILVDENDSVVDHDTKYNCHLMEKIETGKMLHRAFSVFLFNSKYELLLQQRSATKVTFPLVWTNTCCSHPLYRDSELIEENILGVRNAAQRKLLDELGIPADDVPVDQFTPLGRMLYKAPSDGKWGEHELDYLLFTVRDVSVHPNPDEVADVTYVNREQLKEILRKADAGEEGLKLSPWFRLVVDNFLFKWWDHVEKGTLNEAADMKTIHKLV

SEQ ID NO: 68052 - DNA, 735 bp, Adonis aestivalis var
  CDS (1)..(735)
atgctgactcttgggagagcccaactctgcgtacatcaggcgttctcccgcttgctgtcaacttcagcatgcagaatgcagcacgcacaactgtcagatttgccagaagatcagtgtattcttgtggataagaatgacaaagttattggtgaagaagccaaaagtacttgccatattgtttctcctgatggaaatctgctgttgcatcgtgcttttagtgtcttcctgttcaattccaagggtgaccttctgctgcaaaagagagcatcagcaaaggttacttaccctgaccactacaccaatacgtgttgcagtcatccactctccacaattcctgcagagatgatagaaacagatgcccttggcattcgtaatgctgctcaacggcgtttgcagattgaacttggagttccacctgagcaggccaaaccagaggaaatggtttggctaacccgtattcattacatggatcgcggtgatggaaagtttggagaacatgaaatagattacattctatttttgcagaaagatgttgatcttgatctgaacccagatgaagttagtgaagtcaaatatgtgaaacgtgaggagttgaaaagttttcttactaatttaaacgagcctgttaccccatggtttgatctcattgccaaaaatcagttacctacatggtgggataacttacaccaacttcataagttttatgaccataaaaccatacatagatatgtataa

SEQ ID NO: 68053 - protein, 244 aa, Adonis aestivalis var
MLTLGRAQLCVHQAFSRLLSTSACRMQHAQLSDLPEDQCILVDKNDKVIGEEAKSTCHIVSPDGNLLLHRAFSVFLFNSKGDLLLQKRASAKVTYPDHYTNTCCSHPLSTIPAEMIETDALGIRNAAQRRLQIELGVPPEQAKPEEMVWLTRIHYMDRGDGKFGEHEIDYILFLQKDVDLDLNPDEVSEVKYVKREELKSFLTNLNEPVTPWFDLIAKNQLPTWWDNLHQLHKFYDHKTIHRYV

SEQ ID NO: 68054 - DNA, 918 bp, Haematococcus pluvialis
  CDS (1)..(918)
atgcttcgttcgttgctcagaggcctcacgcatatcccccgcgtgaactccgcccagcagcccagctgtgcacacgcgcgactccagtttaagctcaggagcatgcagatgacgctcatgcagcccagcatctcagccaatctgtcgcgcgccgaggaccgcacagaccacatgaggggtgcaagcacctgggcaggcgggcagtcgcaggatgagctgatgctgaaggacgagtgcatcttggtggatgttgaggacaacatcacaggccatgccagcaagctggagtgtcacaagttcctaccacatcagcctgcaggcctgctgcaccgggccttctctgtgttcctgtttgacgatcaggggcgactgctgctgcaacagcgtgcacgctcaaaaatcaccttcccaagtgtgtggacgaacacctgctgcagccaccctttacatgggcagaccccagatgaggtggaccaactaagccaggtggccgacggaacagtacctggcgcaaaggctgctgccatccgcaagttggagcacgagctggggataccagcgcaccagctgccggcaagcgcgtttcgcttcctcacgcgtttgcactactgtgccgcggacgtgcagccagctgcgacacaatcagcgctctggggcgagcacgaaatggactacatcttgttcatccgggccaacgtcaccttggcgcccaaccctgacgaggtggacgaagtcaggtacgtgacgcaagaggagctgcggcagatgatgcagccggacaacgggctgcaatggtcgccgtggtttcgcatcatcgccgcgcgcttccttgagcgttggtgggctgacctggacgcggccctaaacactgacaaacacgaggattggggaacggtgcatcacatcaacgaagcgtga

SEQ ID NO: 68055 - protein, 305 aa, Haematococcus pluvialis
MLRSLLRGLTHIPRVNSAQQPSCAHARLQFKLRSMQMTLMQPSISANLSRAEDRTDHMRGASTWAGGQSQDELMLKDECILVDVEDNITGHASKLECHKFLPHQPAGLLHRAFSVFLFDDQGRLLLQQRARSKITFPSVWTNTCCSHPLHGQTPDEVDQLSQVADGTVPGAKAAAIRKLEHELGIPAHQLPASAFRFLTRLHYCAADVQPAATQSALWGEHEMDYILFIRANVTLAPNPDEVDEVRYVTQEELRQMMQPDNGLQWSPWFRIIAARFLERWWADLDAALNTDKHEDWGTVHHINEA

SEQ ID NO: 68056 - DNA, 924 bp, Chlamydomonas reinhardtii
  CDS (1)..(924)
atgagatccagtttcatcgagcccaagcccagagcgcaacctgtcttaagccgcggcagggcgtccatgcgcctcgcgcaaagccgtgctctcgttgcgcgtgtcagctccgccctgtggccgggagcaggactttcacaggctcaaagcgttgcggtgcgaatggcgagttcgtcaacctgggaaggcacgggcctgagccaggatgacttcatgcagcgggacgagtgcttggtggtggacgagcaggaccggctgctaggcaccgccaacaagtacgactgccaccgcttcgaggcggccaagggccagccctgcggccgcctgcaccgcgccttctccgtgttcctgttcagccccgacggccgactgctgctgcagcagcgcgcagccagcaaggtgacgttcccgggtgtgtggaccaacacctgctgctcgcacccgctggcgggccaggcgccggacgaggtggacctgccggcggcggtagcctcgggccaggtgccgggcatcaaggcggcggcggtgcgcaagctgcagcacgagctggggataccgccggagcaggttcccgcctcctccttctccttcctcacgcgtctgcactactgcgccgccgacaccgccacgcacggcccggcggcggagtggggcgagcacgaggtggactacgtgctgttcgtgcggccgcagcagcccgtcagcctgcagcccaacccagacgaggtggacgccacgcgctacgtgacgctgccggagcttcagtccatgatggcggaccccggcctcagctggagcccctggttccgcatcctggccacacagcccgccttcctgcccgcctggtggggcgacctgaagcggcgctggcgcccgggcggcagccgactgtcggactggggcaccatccaccgcgtcatgtga

SEQ ID NO: 68057 - protein, 307 aa, Chlamydomonas reinhardtii
MRSSFIEPKPRAQPVLSRGRASMRLAQSRALVARVSSALWPGAGLSQAQSVAVRMASSSTWEGTGLSQDDFMQRDECLVVDEQDRLLGTANKYDCHRFEAAKGQPCGRLHRAFSVFLFSPDGRLLLQQRAASKVTFPGVWTNTCCSHPLAGQAPDEVDLPAAVASGQVPGIKAAAVRKLQHELGIPPEQVPASSFSFLTRLHYCAADTATHGPAAEWGEHEVDYVLFVRPQQPVSLQPNPDEVDATRYVTLPELQSMMADPGLSWSPWFRILATQPAFLPAWWGDLKRRWRPGGSRLSDWGTIHRVM

SEQ ID NO: 68058 - DNA, 1157 bp, Nicotiana langsdorffii x Nicotiana sanderae
  CDS (40)..(918)
agaaagaggaatcaaacagttgatggggagaagtcccagatgtcgctgacaacaacgccttcttttcaaatctggcggaggttcatcgcagcctcccctataatttgtcgttcatccctctcactagtatccgtatccaaatcccctcttcttaaaagccatagaagagctgcctctctccgctgctattcctcatctagtgctacaagaatggctgacgccgtttctgatgctaacatggacgctgttcagcgccgtctcatgtttgaagacgagtgtattctggtggatgaggatgaccgtgttgttggtcatgacaccaagtataattgtcatttaatggaaaagatcgaagccgaaaatttgctgcatagagctttcagtgtatttctatttaactcaaaatatgaattgcttcttcagcaacgatcagcaacaaaggtgacctttcctttggtatggactaacacttgctgcagtcatccactctaccgagactctgagctcattgaggagaatgctcttggggtaagaaatgctgcacaaaggaagcttcttgacgaattgggcattcctgctgaagatgtcccagttgaccagttcaccccattgggtcgtatactttataaagctccatctgatgggaagtggggagaacatgaacttgattatcttctattcacagtccgtgaagttaacatgaaaccgaacccggatgaagttgctgatgttaaatacgtgaaccgagaacagctgaaagagcttttgaggaaagcagatgctggcgagggaggtctgaagctatccccttggttcagacttgtcgttgacaactttttgttcaagtggtgggatcatcttgagaagggaactctcgaggaagtcattgatatgaaaaccatccgcaaattgacttaaaaggagctgccttgcgatctggttgtaccatcgtagttctgtccctataaactaataacttcagttgtgattttctgaaggcatatttctgcattatgtttgttgctttttgtagaacttgaaggaggtattttttgactgattgtaccttgtaacatagctgtggctttctgtcgaaactcaataaaatagcttcttttttggcgtccaaaaaaaaaaaaaaaaaaaaaaaaaaaaaa

SEQ ID NO: 68059 - protein, 292 aa, Nicotiana langsdorffii x Nicotiana sanderae
MSLTTTPSFQIWRRFIAASPIICRSSLSLVSVSKSPLLKSHRRAASLRCYSSSSATRMADAVSDANMDAVQRRLMFEDECILVDEDDRVVGHDTKYNCHLMEKIEAENLLHRAFSVFLFNSKYELLLQQRSATKVTFPLVWTNTCCSHPLYRDSELIEENALGVRNAAQRKLLDELGIPAEDVPVDQFTPLGRILYKAPSDGKWGEHELDYLLFTVREVNMKPNPDEVADVKYVNREQLKELLRKADAGEGGLKLSPWFRLVVDNFLFKWWDHLEKGTLEEVIDMKTIRKLT

SEQ ID NO: 68060 - DNA, 930 bp, Camptotheca acuminata
  CDS (1)..(930)
atgtcggcagcctcacatatacacagcgtcgcctgtaggctctcctcttcatttctcgcgtctcccaaactcaaacttcatcctcgcctctcctttttctttcattcctcttccttcagaaaccatatcatcaccagaagcgttttctgctcttcatcgcatctctctgtccacgtttcgtcctatcattcgtccgccgcagccaaagctaccacttccgccatgggtgacaccgttaccgatgctggcatggacgctgtccagaggcgtctcatgttcgaagacgaatgtattttggtagatgagaatgatcatgttgttgggcatgataccaaatacaattgccacctgatggaaaagattgaatctgacaatttgctacacagagccttcagtgtgtttttatttaactcaaagtatgggttactccttcagcaacggtctgcaacaaaggtaacattccctctggcgtggacgaacacctgctgcagccatccactataccgagaatctgagcttgttgatgaaaatgctcttggggtgagaaatgctgcacaaaggaagcttttggatgaacttggtattcctgctgaagatgtgccagttgatcagttcatcccactgggtcgtatgctatacaaggcaccatctgatggaaaatggggagagcatgagcttgattacctgctgttcatcatccgagatgttaacgtgcatctgaaccctgatgaagttgctgatgttaagtatgtaaaccaggatcagttgaaagatcttttgagaaaagcagatgctggcgaggaaggcctgaagctttcaccttggtttagactagtggtggagaatttcttgttcaagtggtgggatcatgttgaaaaagggaccctacaggacgctactgatatgaaaaccattcacaagttgacataa

SEQ ID NO: 68061 - protein, 309 aa, Camptotheca acuminata
MSAASHIHSVACRLSSSFLASPKLKLHPRLSFFFHSSSFRNHIITRSVFCSSSHLSVHVSSYHSSAAAKATTSAMGDTVTDAGMDAVQRRLMFEDECILVDENDHVVGHDTKYNCHLMEKIESDNLLHRAFSVFLFNSKYGLLLQQRSATKVTFPLAWTNTCCSHPLYRESELVDENALGVRNAAQRKLLDELGIPAEDVPVDQFIPLGRMLYKAPSDGKWGEHELDYLLFIIRDVNVHLNPDEVADVKYVNQDQLKDLLRKADAGEEGLKLSPWFRLVVENFLFKWWDHVEKGTLQDATDMKTIHKLT

SEQ ID NO: 68062 - DNA, 1155 bp, Ipomoea batatas
  CDS (68)..(958)
aagcaagacgccaagggccaaggctggctgcaagaagcaaagaggaacgaacactgtgaatatcccaatgtcgatgatggcttctgttcaaatctgtcggagattctctcccctagtcgcccggccggcgatttactctgccaattcttcattcctctcaccagtctctttcgcctcttcttctctttcaattatgccgatccgcctccgctgcagagcttcagtacactctgtccgcgccgcctccaccatgggggacaccatcactgatgccaacatggatgctgtccagcgccgcctcatgtttgacgacgagtgtattttggtggatgagaatgaccgtgttgttggtcatgataccaagtataattgtcatcttatggagaagattgaatctgagaatctgcttcacagagctttcagtgttttcttatttaattcaaactatgagttgcttcttcagcaacgatctgcgacaaaggtcaccttccctttggtgtggactaacacctgctgcagccatcctctgtaccgggagtctgagttgattgaagagaatgctcttggtgtgaggaatgctgcacaaagaaagcttcttgatgaactggggattcctgcagaggatgtcccagttgatgaattcacaacattgggccgtatcctgtataaagcaccttctgatgggagatggggagagcatgaacttgattatcttctcttcattgtgagggatgttggcatgcacccaaacccggatgaggttgcagatgttaaatatgtgaatagggaacagctgaaagagatcttgaggaaagcaaatgctggagaggatggtataaagctttccccttggttcagattagtcgtcgaaaatttcttgttcaaatggtgggatcatgtcgagaaaggcaccctaatggaagctgcagatatgaaaaccattcacaagttggcctaaacagccattggctgagcttttgttaaacccttacatctaccattcacttaactgagcaaaaatatattctatggtcttctgcttagtttcatgcttcatgcttgaactttcaagttttatgttacttttggctgttaggaactagtaatatatgtgaacttgctatcaaaaaaaaaaaaaaaaaaaaaaaaaaaaaa

SEQ ID NO: 68063 - protein, 296 aa, Ipomoea batatas
MSMMASVQICRRFSPLVARPAIYSANSSFLSPVSFASSSLSIMPIRLRCRASVHSVRAASTMGDTITDANMDAVQRRLMFDDECILVDENDRVVGHDTKYNCHLMEKIESENLLHRAFSVFLFNSNYELLLQQRSATKVTFPLVWTNTCCSHPLYRESELIEENALGVRNAAQRKLLDELGIPAEDVPVDEFTTLGRILYKAPSDGRWGEHELDYLLFIVRDVGMHPNPDEVADVKYVNREQLKEILRKANAGEDGIKLSPWFRLVVENFLFKWWDHVEKGTLMEAADMKTIHKLA

SEQ ID NO: 68064 - DNA, 1002 bp, Gentiana lutea
  CDS (63)..(770)
aaactcctccctctttccgcctttccgcgtctgcttcttctaccaccaccgccgcctctactatgggtaccgttgttgaggattccaccatggacgccgtccaaaagcgcctcatgtttgaagacgaatgcattttggtggatgtgaatgataacgtagttggacatgactccaagtacaactgtcacttgatggaaaagattgaatctgaaaatttgctgcatagagcgtttagcgttttcctttttaactcgaaatacgatttacttcttcagcaacgatctggtacgaaggtgacatttcctcttgtgtggacaaatacttgctgtagccatcctttatacagagaatctgagctgattaaagagaaatatcttggcgtgaggaatgctgcacaaaggaaacttctagatgaactcggtattcctcctgaggatgtccccgttgatgagttcattccattgggccgtattctatacaaagctccatccgatgggaaatggggagagcacgaaattgattacctgctctttatagtgagggatgttaaggtaaacccaaatccagatgaagttgctgatgcaaaatacgtgaaccgcgagcaattaaaggatatactgagaaaggcagatgcaggagaagaaggcttgaaactttcaccttggtttcgactagtcgtcgataacttcttgttcaaatggtgggaccatgtggagaagggtaccctccaagaagctactgacatgaaaactatccataagttgacttgaggaatgaggaaaggcctgtgtcagacatcttttttttttttttggcctaatttgtttcaagtaataatttgtttttctgttgttgaatctttcctgaaattttgactaattcttgaagctctctcctgttgtttgtaacacattacatttgaggactcagatttttgaagaataaataaacccttctatatctgatggcttcaacgttcgaaaaaaaaaaaaaaaaaaaaaa

SEQ ID NO: 68065 - protein, 235 aa, Gentiana lutea
MGTVVEDSTMDAVQKRLMFEDECILVDVNDNVVGHDSKYNCHLMEKIESENLLHRAFSVFLFNSKYDLLLQQRSGTKVTFPLVWTNTCCSHPLYRESELIKEKYLGVRNAAQRKLLDELGIPPEDVPVDEFIPLGRILYKAPSDGKWGEHEIDYLLFIVRDVKVNPNPDEVADAKYVNREQLKDILRKADAGEEGLKLSPWFRLVVDNFLFKWWDHVEKGTLQEATDMKTIHKLT

SEQ ID NO: 68066 - DNA, 708 bp, Gentiana lutea
  CDS (1)..(708)
atgggtactgttgttgaggattccaccatggacgccgtccaaaagcgcctcatgtttgaagacgaatgcattttggtggatgcgaatgataccgtagttgggcatgactccaagtacaattgtcacttgatggaaaagattgaatctgaaaatttgctgcatagagcattcagcgtgttcctatttaactcgaaatacgagctacttcttcagcaacgatctgatacgaaggtgacgtttcctcttgtgtggacaaatacttgctgtagccatcctttatacagagaatctgagctcattgaagagaaatatcttggagtgaggaatgctgcacaaaggaaacttctagatgaactgggtattcctgctgaggatgtccccgttgatgagttcattccattgggccgtattctatacaaagctccatccgatgggaaatggggagagcacgaacttgattacctgctatttatagtgagggatgttaaggtaaacccaaatccagatgaagttgctgatgcaaaatacgtgaatcgcgagcaattgaaggaaatattgagaaaggcagatgcaggagaagaaggcttgaaactgtcaccttggtttcgactagtcgtcgataacttcttgttcaaatggtgggaccatgtggaaaagggtaccctacaagaagctgctgacatgaaaactatccataagttgacttga

SEQ ID NO: 68067 - protein, 235 aa, Gentiana lutea
MGTVVEDSTMDAVQKRLMFEDECILVDANDTVVGHDSKYNCHLMEKIESENLLHRAFSVFLFNSKYELLLQQRSDTKVTFPLVWTNTCCSHPLYRESELIEEKYLGVRNAAQRKLLDELGIPAEDVPVDEFIPLGRILYKAPSDGKWGEHELDYLLFIVRDVKVNPNPDEVADAKYVNREQLKEILRKADAGEEGLKLSPWFRLVVDNFLFKWWDHVEKGTLQEAADMKTIHKLT

SEQ ID NO: 68068 - DNA, 1208 bp, Chrysanthemum x morifolium
  CDS (129)..(965)
  misc_feature (341)..(341): s is g or c
  misc_feature (456)..(456): k is g or t
ctaatacgactcactatagggcaagcagtggtatcaacgccgagtacgcgggacatggaacatattttgtccccactaggtcatttaaaaatgtaaccacctaaaagattgtgacaccttccataaaaatgttaaaattttctccctttaaaaccatcgccaccgcaacaaaactttttcctacacatttcaaatcacttccaaaatctcaactctttccctcttcagtccctctccgccgtcgttactccgccctaaccgccgccatgggtgatgattccggcatggatgctgttcaaagacgccttatgtttgatgatgaatgcattttggtggatgasagcgacaatgtggttgggcatgataccaagtacaattgccacttgatggagaagattgaaacaggaaaaatgttgcacagagcattcagtgtattcttgttcaattcaaaatackaattactccttcagcaacgctctggaaccaaggtgacatttcctttggtatggaccaacacctgttgcagccatccattatacagggaatctgagcttatttctgaagacgtccttggggtgagaaatgctgcacagaggaagctcttggatgaactcggtatccctgccgaagatgttccagttgatcagtttacccctgtaagtcgcatgctgtacaaggctccatctgatgggaagtggggagaacatgaacttgactacctgctcttcatcgtgcgtgatgttgctgtgaacccaaacccagacgaggtggcagagatcaaatatgtgaaccaagaagagttaaaagagttactaaggaaggcagatgctggcgaggagggtttgaaactttccccttggtttaggttagtcgttgacaacttcttgtacaaatggtgggatcatgttcaaaagggttctctctctgaagccattgatatgaaaaccgtccataagttgctttaagaaaacccactcaaatgacatggtgttatgctttgaagacctcaccacctctgtttcattattccttttagaaagctttatctacatctcaccatgttctgtgcaacgtagtacttttggtctttcgtttgaagagtgcaataacgaaccgcttgatagttcggaactttgaaatttatggttgctttttacctttaatttaaatgtattttagcccccaaaaaaaaaaaaaaaaaaaaaaaa

SEQ ID NO: 68069 - protein, 278 aa, Chrysanthemum x morifolium
  misc_feature (71)..(71): The Xaa at location 71 stands for Asp, or Glu.
  misc_feature (110)..(110): The Xaa at location 110 stands for Stop, or Glu.
MLKFSPFKTIATATKLFPTHFKSLPKSQLFPSSVPLRRRYSALTAAMGDDSGMDAVQRRLMFDDECILVDXSDNVVGHDTKYNCHLMEKIETGKMLHRAFSVFLFNSKYXLLLQQRSGTKVTFPLVWTNTCCSHPLYRESELISEDVLGVRNAAQRKLLDELGIPAEDVPVDQFTPVSRMLYKAPSDGKWGEHELDYLLFIVRDVAVNPNPDEVAEIKYVNQEELKELLRKADAGEEGLKLSPWFRLVVDNFLYKWWDHVQKGSLSEAIDMKTVHKLL

SEQ ID NO: 68070 - DNA, 759 bp, Dendroctonus jeffreyi
  CDS (1)..(759)
atgttcacctcaatgataaagcttgtgggcaaagccccaagactttacgttgcacgggctgtggccagcgtgtcagcgacaaacaacaagcaactggatcctcaagatgaagccatggaaaaagagcagtgtttcctcgtggacgataacgatattgtaacaggtcaggccagtaaaagagactgccacttggtgcaagaggatggaaacatccctctgcatcgggcatttagtgtgtttttgttcaatcaaaaaggcgacttgttgctgcagaagcgatcatcggaaaagatcacttatcctgaccactatacaaactcgtgctgcagccatccgctaaccaattttcctggtgaggaagaagaagcaaacgctttgggggtcaggaaagccgcccaaaggcgcttgaactacgagttgggcatttctctaggcagcattcccattgacagcattaattacattaccagggtgcactacaaagaccaagggaacggcaaatatggcgagcatgagatcgactatgttctattcattcaaagggacgtcaagttgaaccccaacccaagcgaagtatcggaaatcagcttcattcctcggacagagtttgacgattctattccgactctaactggccagtggacgccgtggttttcactgattttgaagcatcggctcaagttctggtgggaccatttggatcggctggacgagatcaaagaccacaagaagattctacgctttgacagcgaaaagtga

SEQ ID NO: 68071 - protein, 252 aa, Dendroctonus jeffreyi
MFTSMIKLVGKAPRLYVARAVASVSATNNKQLDPQDEAMEKEQCFLVDDNDIVTGQASKRDCHLVQEDGNIPLHRAFSVFLFNQKGDLLLQKRSSEKITYPDHYTNSCCSHPLTNFPGEEEEANALGVRKAAQRRLNYELGISLGSIPIDSINYITRVHYKDQGNGKYGEHEIDYVLFIQRDVKLNPNPSEVSEISFIPRTEFDDSIPTLTGQWTPWFSLILKHRLKFWWDHLDRLDEIKDHKKILRFDSEK

SEQ ID NO: 68072 - DNA, 1252 bp, Pueraria lobata
  CDS (58)..(963)
gaattcggcacgagggtgaggagaggttcaggaacgaaacgaaaggaaaatccgaaaatggcacagtcctcgatcgtcgttaatttgagccagcacctgtttaaaaggaaccttacctctctgagtgtgattgctcactcttcttatttcggatctcgttctctttcttcgctctccttctctcagagaagaagaggaccccacactcctctcactctcaccgcctccttctcttctcacaccgccatgggcgaaacctccgctcccgccgccgatgccggcatggacgccgtccagcgccgcctcatgttcgaagacgaatgcattttggtggatgagaatgaccgtgtggttggtcatgattccaaatacaattgtcacttgatggaaaagattgaagctgaaaatttgctgcatagagctttcagtgtattcctgttcaactcaaagtatgagttgcttcttcagcaacgatctgcaaccaaggtaacattccctcttgtgtggacaaacacctgttgcagccatccactgtaccgtgaatctgagcttattgaggagaatgcccttggagtaagaaatgcagctcagaggaagcttttggatgagcttggtattgttgccgaagatgtaccagttgatcagttcaccccattgggtcgcattctttacaaggcaccttctgatggcaaatggggagagcatgaactggactatctgcttttcattgtccgggatgttaacgtgaatcccaatcctgatgaagtggctgatatcaaatatgtgaaccgcgatcagttgaaggagctgttgaggaaagctgatgcaggtgaggaaggtctgaagctatcaccttggttcagactagttgtggacaatttcttattcaaatggtgggaccatcttgagcaaggaactcttggggaggtcactgacatgaaaaccattcacaagttgacataaactcagagaggtgcttgcatccatgtaatgaaagggtagctgtattccgacccaataagaaccaaattcgacctattttgagaagaatcttcggagcactgccccccatatgaagttgttggatccttttggtattcgatgatagctagaacaataaacgtctgagtgtaatcttaaactagtagtattttttgttgcaaatttcggattctgggatgcaggcaagtactcaatattgaacttgaaattaaagatgttagtgatttgaatcacgttaaaaaaaaaaaag

SEQ ID NO: 68073 - protein, 301 aa, Pueraria lobata
MAQSSIVVNLSQHLFKRNLTSLSVIAHSSYFGSRSLSSLSFSQRRRGPHTPLTLTASFSSHTAMGETSAPAADAGMDAVQRRLMFEDECILVDENDRVVGHDSKYNCHLMEKIEAENLLHRAFSVFLFNSKYELLLQQRSATKVTFPLVWTNTCCSHPLYRESELIEENALGVRNAAQRKLLDELGIVAEDVPVDQFTPLGRILYKAPSDGKWGEHELDYLLFIVRDVNVNPNPDEVADIKYVNRDQLKELLRKADAGEEGLKLSPWFRLVVDNFLFKWWDHLEQGTLGEVTDMKTIHKLT

SEQ ID NO: 68074 - DNA, 1095 bp, Zea mays
  CDS (94)..(807)
cgcacaccccggcagccgcaaacgccttcgccgtcgcgtcccgctcctccgcccgcccgacgcgacccctaggacctggagagagaggtcggcatggctgccgcagtggtcgacgacgctggtatggacgccgtccagaagcgcctcatgttcgaagacgaatgcattttggtggacgagcaggacaatgttgttggccatgagtcaaagtacaactgccatttgatggaaaagattgattctgagaatctgctacatagggcattcagtgtgttccttttcaactcaaaatatgagctgctacttcagcaaaggtccgcgacaaaggttacctttcctttagtttggaccaatacctgctgcagccaccctctgtaccgtgagtctgagcttatccaggagaactaccttggtgtgagaaatgcagcacagaggaagctactggatgagctgggcatcccagcagaagatgccccagttgaccaattcacccctctgggccgaatgctttacaaggcaccatctgacgggaaatggggggagcatgagcttgactacctgctgttcatcgtccgggacgtgaaggtgcagccgaacccagatgaagtcgctgacgtgaagtacgtgaaccgcgacgagctcaaggagctcatccggaaggctgacgctggcgaggacggggtgaagatctccccctggttcaggctggtggtggacaacttcctcatgggctggtgggaccatgtcgagaaaggcaccctcggcgaggccgtggacatggagaccatccataagctgaaggagtgaggggccgccggccggccggctccgatgacctcaccacctgttgatgttgctgctgctgctgcactgcatgtttatcaaaagttatcgctcctgctcgcggaaagtgagcttgactgttgccggggtggaagtgtcgttttggactgaagatgagtgccgcggaggggtttgttgtttgtttgtttgtttgttcggtgaccgaatcgcgagttggacgcctgtttaatccgtgcttatacatcgtctgagtaaacagcaataagagggacatccgtaagctctttccgt

SEQ ID NO: 68075 - protein, 237 aa, Zea mays
MAAAVVDDAGMDAVQKRLMFEDECILVDEQDNVVGHESKYNCHLMEKIDSENLLHRAFSVFLFNSKYELLLQQRSATKVTFPLVWTNTCCSHPLYRESELIQENYLGVRNAAQRKLLDELGIPAEDAPVDQFTPLGRMLYKAPSDGKWGEHELDYLLFIVRDVKVQPNPDEVADVKYVNRDELKELIRKADAGEDGVKISPWFRLVVDNFLMGWWDHVEKGTLGEAVDMETIHKLKE

SEQ ID NO: 68076 - DNA, 1203 bp, Periploca sepium
  CDS (195)..(902)
gaatctccctctccccttcttctactacagcacccattacttcttctctcaagtataaattcccatcatttccttcaatctttgcttctccggcactttcctactctcgctcttcttccaccaccaccaccaccaccaccaccaccaccaccatttctccttttccttgcttctcatccgtctcagctccttccatgggtgacgcagttgctgattccgccatggacgccgtccaaaggcgtctcatgtttgaggacgaatgcattttggttgacgagaatgatcatgttgttggtcatgataccaaatacaactgtcacttgatggaaaagattgaatctgagaatttgctccacagagctttcagtgtattcttgttcaactcaaaatatgagttacttcttcagcaacgatctgcaaccaaagtgacctttcccctggtctggacaaacacttgctgcagccatcctctatacagagaatctgaactgattgaagagggcgctctcggagtaaggaatgctgctcaaaggaaacttttggatgaacttggtattgttcctgaagctgttcctgtagatgcattcacaccattgggccgcatgctttacaaagcaccctctgacggaaagtggggggagcatgaacttgactacctgctctttattgtccgggatgttaaggtgaatcccaatcctgatgaagttgctgatgtcaagtatgtgaatcgggatgagttgaaagaacttttgagaaaagcagatgctggtgaagggggcttgaagctatccccatggttcagattggttgttgacaatttcttgttgaagtggtgggagcacgttgagaaagggaccctcctggaagcttctgacatgaaaaccattcacaaactaacttaagtagtttaaacggtattttgtttgctcatcacaattctagtcccttgaaagaaataagttcgagcatttaagatgcacaaagatgcaacaggcatttaagatgcataaaggtgcagttggaactcttttagatttttgtgctttattgcctaattttgctatagctttatagagcttgttgttcaaaaagcgttttagattgacattgtttaagaggaagaaagaagtaaacatttgtgcacttgtgagcttaagctttatatataaacttcttcctttttttttttcaaaaaaaaaaaaa

SEQ ID NO: 68077 - protein, 235 aa, Periploca sepium
MGDAVADSAMDAVQRRLMFEDECILVDENDHVVGHDTKYNCHLMEKIESENLLHRAFSVFLFNSKYELLLQQRSATKVTFPLVWTNTCCSHPLYRESELIEEGALGVRNAAQRKLLDELGIVPEAVPVDAFTPLGRMLYKAPSDGKWGEHELDYLLFIVRDVKVNPNPDEVADVKYVNRDELKELLRKADAGEGGLKLSPWFRLVVDNFLLKWWEHVEKGTLLEASDMKTIHKLT

SEQ ID NO: 68078 - DNA, 771 bp, Drosophila melanogaster
  CDS (1)..(771)
atgttggcctctcgcttgaatctcctgttgccccgcgtatcctggctgcgcggttgctcaacgacagcggtgggccagaaacatcagcgccaggtgcccacggagttcgccgtacacgatcctctgcaggctcacgctctaaaggaacagtgcatcctggttgacgccaacgaccaagccattggggccgcctctaaggcagactgccaccgtgtgcatccagagacgaatgatgttaagctccatcgcgccttcagtgtttttctcttcaattctcagggagagatgctagtgcagaagcgatcgtctcacaaggtaaccttcccaaacacctacaccaacgcgtgctgcagccatccgctttacgaaatcgaacaggaacgtcaggagcgcaacgcacagggcatccgtgtggccgctcaacgacgtctcaactacgaactgggcattcccacagaggaactgcagccacaggactttcgctacctgacccgcatccactacgcagacacgggcgacggcgtgtggggcgagcacgagatagactacatcctgttcctgcaaaaagacgtgacgctgcgtccaaatagcaacgaggtcagtgaggtgcgctacttgcgccgcgataagatcgacgaggcggtggcgaagtttagtgccccgctgacaccctggttctctctgattctgcagcatcgattgaaactctggtgggacaatttgcaccagctggagcaatttgaggacttgagtaatattcagcgcttttaa

SEQ ID NO: 68079 - protein, 256 aa, Drosophila melanogaster
MLASRLNLLLPRVSWLRGCSTTAVGQKHQRQVPTEFAVHDPLQAHALKEQCILVDANDQAIGAASKADCHRVHPETNDVKLHRAFSVFLFNSQGEMLVQKRSSHKVTFPNTYTNACCSHPLYEIEQERQERNAQGIRVAAQRRLNYELGIPTEELQPQDFRYLTRIHYADTGDGVWGEHEIDYILFLQKDVTLRPNSNEVSEVRYLRRDKIDEAVAKFSAPLTPWFSLILQHRLKLWWDNLHQLEQFEDLSNIQRF

SEQ ID NO: 68080 - DNA, 681 bp, Melaleuca alternifolia
  CDS (1)..(681)
atggacgccgtccagaggcgccttatgttcgaggacgaatgcattttggttgacgaaaatgatcaggttgtcggtcatgaatcaaaatataattgtcacttgatggagaaaattgaaaaggaaaatctgttgcacagagctttcagtgttttcctcttcaactcgaagtacgagttactgcttcagcaacgatctgccacaaaggtaactttcccccttgtatggacaaacgcctgctgcagtcatcccttgtaccgggagtccgagcttatcgatgacaatgctttgggtgtcaggaatgcggcacagaggaagctcttggacgagctgggtattcctgctgatgatttgccagttgatcaattcatcccactaactcgcatgctgtataaggctccttccgatggcaaatggggagaacatgaacttgactacttgctcttcattgttcgagatgtcagtgtccatccaaatcctgatgaagttgccgatgtcaaatatgtgaatagggagcagctaaaagagctgctcaggaaagtcgatggtggtgaggaaggactgaagctgtcgccctggttcagattagttgtggacaatttcttattcaagtggtgggatcatgtcgaaaaagggactctcaaggaggttgttgatatggaaaaaattcacaagctcacttaa

SEQ ID NO: 68081 - protein, 226 aa, Melaleuca alternifolia
MDAVQRRLMFEDECILVDENDQVVGHESKYNCHLMEKIEKENLLHRAFSVFLFNSKYELLLQQRSATKVTFPLVWTNACCSHPLYRESELIDDNALGVRNAAQRKLLDELGIPADDLPVDQFIPLTRMLYKAPSDGKWGEHELDYLLFIVRDVSVHPNPDEVADVKYVNREQLKELLRKVDGGEEGLKLSPWFRLVVDNFLFKWWDHVEKGTLKEVVDMEKIHKLT

SEQ ID NO: 68082 - DNA, 1063 bp, Melaleuca alternifolia
  CDS (41)..(748)
accaggtcgttccttgtcgactctccctcgaccgatcaccatggccgatgctgctgctgatgctggcatggacgccgtccagagacgcctcatgttcgaggacgaatgcatcttggtggatcagaacgacaatgttgtcggtcacgagtcgaaatataactgtcatttgatggagaagattgagtccttgaatctgttgcacagagccttcagtgtgtttttattcaactcaaagtatgagctactgcttcagcaacgctccgccacaaaggtgacgttcccccttgtgtggacaaacacctgctgcagtcatccattgtaccgggagtccgagcttattgctgagaacgcccttggggcaaggaatgctgcacaaaggaagctcttggacgaactgggcatttctgctgaagatgtgccggttgatgaattcattcctttgggtcgcatcctttataaggcaccttctgatgggaagtggggagagcatgaacttgattacttgctgttcattgttcgagatgtgaaggttaatccgaaccctgatgaggttgcggatatcaaatatgtgaaccgggagcagttgaaggagctgttgaggaaagccgatgcaggcgaagggggtctgaagctgtcgccctggttcagattagtggtggacaacttcttgttcaagtggtgggatcatgttgagaaggggactctgaaggaagcagctgatatgaaaaccattcacaagctaacctgagatgtgttgaaatagcagtctaataaggacgtggattgaacttcaattgatgttattaagctggtcaattccaataatgttggactcaaatttcaaattcaatcttccaactcgttttcagccagggtcatttccaagttaatgggaacagccattgccactgttggcagcagagttattctatgatccctgagacgattaagtgatttgcctagaaagttactgcatattgttatggaacttcattagagctcaagttataatgcaaatggaggtgattactaccatattggaacaaaaaaaaaaaaaaaaaaa

SEQ ID NO: 68083 - protein, 235 aa, Melaleuca alternifolia
MADAAADAGMDAVQRRLMFEDECILVDQNDNVVGHESKYNCHLMEKIESLNLLHRAFSVFLFNSKYELLLQQRSATKVTFPLVWTNTCCSHPLYRESELIAENALGARNAAQRKLLDELGISAEDVPVDEFIPLGRILYKAPSDGKWGEHELDYLLFIVRDVKVNPNPDEVADIKYVNREQLKELLRKADAGEGGLKLSPWFRLVVDNFLFKWWDHVEKGTLKEAADMKTIHKLT

SEQ ID NO: 68084 - DNA, 708 bp, Nicotiana tabacum
  CDS (1)..(708)
atgggtgatgttgaagctgatgccaatatggacgctgtccaacgccgtctcatgtttgaagacgaatgtattttggtggatgagaatgaccaggttgttgggcatgacaccaagtacaattgtcatttgatggaaaggattgaatctttgaatttgctgcacagagctttcagtgtatttcttttcaactcgaagtatgagcttcttcttcagcaacgatctgcaacaaaggtaacctttcctttggtatggacgaacacatgctgcagccatccgctctaccgagagtctgagctaattgaggagaatgctcttggtgtaagaaacgcagcacaaaggaagcttcttgatgaattgggtattccagctgaagatgtcccagttgaccagttcacgccattgggccgtatgctttacaaggcaccatctgatggaaagtggggagagcatgaacttgattatcttctattcatcgtccgtgatgttaatgtgaacccgaacccggatgaagttgctgatatcaaatatgtgaaccaagaacaactgaaagaacttttgaggaaagcagatgcaggtgaggacggtttgaagctatctccttggttcagactagtcgtcgacaacttcttgttcaagtggtgggaccatgttgagaaggggactatccaggaagctgctgatatgaaaaccattcacaagttgacttaa

SEQ ID NO: 68085 - protein, 235 aa, Nicotiana tabacum
MGDVEADANMDAVQRRLMFEDECILVDENDQVVGHDTKYNCHLMERIESLNLLHRAFSVFLFNSKYELLLQQRSATKVTFPLVWTNTCCSHPLYRESELIEENALGVRNAAQRKLLDELGIPAEDVPVDQFTPLGRMLYKAPSDGKWGEHELDYLLFIVRDVNVNPNPDEVADIKYVNQEQLKELLRKADAGEDGLKLSPWFRLVVDNFLFKWWDHVEKGTIQEAADMKTIHKLT

SEQ ID NO: 68086 - DNA, 1107 bp, Nicotiana tabacum
  CDS (14)..(886)
ggagaagtcccagatgtcgctgacaactacgccttcttttcaaatctggcggaggttcatcgcagcctcccctataacttgtccttcatccctctcacttgtatccgtatccaaatcccctcttcttaaaagccatagaatagctgcctctctccgctgctattcctcttctacaagaatgggtgacgccattgctgatgctaacatggacgctgttcagcgccgtctcatgtttgaagacgaatgtattctggtggatgagaatgaccgtgttgttggtcatgacaccaagtataattgtcatttaatggaaaagatcgaagccgaaaatttgctgcatagagctttcagtgtatttctatttaactcaaaatatgaattgcttcttcagcaacgatcagcaacaaaggtaacctttcctttggtatggactaacacctgctgcagccatccactctaccgagactctgagctcattgaggagaatgctcttggggtaagaaatgctgcacaaaggaagcttcttgacgaattgggcattcctgctgaagatgtcccagttgaccagttcaccccattgggtcgtatactttataaagctccatccgatggaaagtggggagaacatgaacttgattatcttctattcaccgttcgtgaagttaacatgaaaccaaacccagatgaagttgctgatgttaaatacgtgaaccgagaacaactgaaagagcttttgaggaaagcagatgctggtgagggaggtctgaagctatccccttggttcagacttgtcgttgacaacttcttgttcaagtggtgggatcatcttgagaagggaactctcgaggaagtcattgatatgaaaaccatccacaaattgacttaaaaggagctgccttacgatctggttgtaccatcgtagttctgtccctacaaaccaataacttcagttgtgattttctgaaggcatatttctgcattatgttgttgcttttgtagaatttgaaggagttatttttttgactgattgtaccttgtaacatagctgtggctttctgtcgagactcaataagatagcttcttgtttggtgaaaaaaaaaaaaaaaa

SEQ ID NO: 68087 - protein, 290 aa, Nicotiana tabacum
MSLTTTPSFQIWRRFIAASPITCPSSLSLVSVSKSPLLKSHRIAASLRCYSSSTRMGDAIADANMDAVQRRLMFEDECILVDENDRVVGHDTKYNCHLMEKIEAENLLHRAFSVFLFNSKYELLLQQRSATKVTFPLVWTNTCCSHPLYRDSELIEENALGVRNAAQRKLLDELGIPAEDVPVDQFTPLGRILYKAPSDGKWGEHELDYLLFTVREVNMKPNPDEVADVKYVNREQLKELLRKADAGEGGLKLSPWFRLVVDNFLFKWWDHLEKGTLEEVIDMKTIHKLT

SEQ ID NO: 68088 - DNA, 1028 bp, Eucommia ulmoides
  CDS (123)..(797)
gcggagccgcacgaactcggtccagctttcgtcttctctcctccatcgtcttctcgtctctcactgccatgggtgataccgccgtcgctgattctggcatggacgccgtccagaggcgtctcatgttcgaggacgaatgtattttggtggatgagagtgaccacgttgttggtcatgataccaaatataattgtcacttgatggagaagattgaatcagaaaacttactccatagagctttcagtgtgtttttattcaactcaaaatatgagctgctccttcagcaacgatcagggacaaaggtaacattccctttggtgtggacgaacacatgctgcagccatccattatatcgagaatccgagcttattgaggagaatgcacttggagtacggaatgctgcacaaaggaagcttttggatgaactgggtattcctgctgaggatgttccagtcgatcagtttatgccattgggtcgaatgctctacaaggctccttctgatgggaagtggggcgaacatgaactggattaccttctctttatcgtgcgcgatgtgaacattcacccaaacccagacgaagtcgcggatgtgaagtatgtgaaccaggaagagttgaaagagctgttaagaaaagccgatgctggtgaggagggtctgaaattgtctccttggttcagactagttgtggacaatttcttgttcaagtggtgggatcatgttgtgaaaggcaccctccaggaagctgctgacatgaataccattcacaagctgattcaggaaaatcagtctgcttagttatatatatatatatatatacatatatatatatatatacatacatacatatatttaaaaatttcagtttggttcctaggaaataaaaatcgggaacgatctgattgccaaaaggcactttctagaatcgtgtgctgtgttatctctcagctctagcatttacctggttggggcttttaatttgagaaatgtatctacagttgggaagtcattaaaaaaaaaaaaaaaaaa

SEQ ID NO: 68089 - protein, 224 aa, Eucommia ulmoides
MFEDECILVDESDHVVGHDTKYNCHLMEKIESENLLHRAFSVFLFNSKYELLLQQRSGTKVTFPLVWTNTCCSHPLYRESELIEENALGVRNAAQRKLLDELGIPAEDVPVDQFMPLGRMLYKAPSDGKWGEHELDYLLFIVRDVNIHPNPDEVADVKYVNQEELKELLRKADAGEEGLKLSPWFRLVVDNFLFKWWDHVVKGTLQEAADMNTIHKLIQENQSA

SEQ ID NO: 68090 - DNA, 843 bp, Lactuca sativa
  CDS (1)..(843)
atgttgaaatttcccccttttaaaaccattgctaccatgatctcttctccatattcttccttcttgctgcctcggaaatcttctttccctccaatgccgtctctcgcagccgctagtgttttcctccaccctctttcgtctgccgctatgggcgattccagcatggatgctgtccagcgacgtctcatgttcgatgacgaatgcattttggtggatgagaatgacaaagtggttggccatgatactaaatacaattgtcatttgatggagaagattgaaaagggaaatatgctacacagagcattcagtgtgttcttgttcaactcgaaatatgaattactccttcagcaacgttctgcaaccaaggtgactttccctttggtatggacaaacacgtgttgcagccatccactatacagggagagtgagcttattgacgaaaacgcccttggggtgaggaatgctgcacagaggaagctcctggatgaactcggcatccctggagcagatgttccggttgatgagttcactccattgggtcgcattctatacaaggccgcatcggatggaaagtggggagaacatgaacttgattacctgctgtttatggtacgtgatgttggtttggatccgaacccagatgaagtgaaagatgtaaaatatgtgaaccgggaagagctgaaggaattggtaaggaaggcggatgctggtgaagagggtgtgaagctgtccccgtggttcaaattgattgtcgataatttcttgtttcagtggtgggatcgactccataagggaaccctaaccgaagctattgatatgaaaacaatccacaaactcacataa

SEQ ID NO: 68091 - protein, 280 aa, Lactuca sativa
MLKFPPFKTIATMISSPYSSFLLPRKSSFPPMPSLAAASVFLHPLSSAAMGDSSMDAVQRRLMFDDECILVDENDKVVGHDTKYNCHLMEKIEKGNMLHRAFSVFLFNSKYELLLQQRSATKVTFPLVWTNTCCSHPLYRESELIDENALGVRNAAQRKLLDELGIPGADVPVDEFTPLGRILYKAASDGKWGEHELDYLLFMVRDVGLDPNPDEVKDVKYVNREELKELVRKADAGEEGVKLSPWFKLIVDNFLFQWWDRLHKGTLTEAIDMKTIHKLT

SEQ ID NO: 68092 - DNA, 888 bp, Adonis aestivalis var
  CDS (1)..(888)
atgtcgtcgatcaggattaatcctttatatagtatcttctccaccaccactaaaacattatcagcttcgtgttcttctcccgctgttcatcttcagcagcgttgtcgtactctttctatttcttcttccatcactaacagtcctcgccgagggttgaatcggctgttcgcctcaacgtcgactatgggtgaagtcgctgatgctggtatggatgccgtccagaagcggcttatgttcgacgatgaatgtattttggtggatgagaatgacaaggtcgtcggacatgattccaaatacaactgtcatttgatggaaaagatagaggcagaaaacttgcttcacagagccttcagtgttttcttattcaactcaaaatacgagttgcttcttcagcaacgatctgcaacgaaggtaacattcccgctcgtatggacaaacacctgttgcagccatcccctcttccgtgattccgaactcatagaagaaaattttctcggggtacgaaacgctgcacaaaggaagcttttagacgagctaggcattccagctgaagacgtaccagttgatgaattcactcctcttggtcgcattctttacaaagctccatctgacggaaaatggggagagcacgaactggactatcttctgtttattgtccgagatgtgaaatacgatccaaacccagatgaagttgctgacgctaagtacgttaatcgcgaggagttgaaagagatactgagaaaagctgatgcaggtgaagagggaataaagttgtctccttggtttagattggttgtggataactttttgttcaagtggtgggatcatgtagaggaggggaagattaaggacgtcgccgacatgaaaactatccacaagttgacttaa

SEQ ID NO: 68093 - protein, 295 aa, Adonis aestivalis var
MSSIRINPLYSIFSTTTKTLSASCSSPAVHLQQRCRTLSISSSITNSPRRGLNRLFASTSTMGEVADAGMDAVQKRLMFDDECILVDENDKVVGHDSKYNCHLMEKIEAENLLHRAFSVFLFNSKYELLLQQRSATKVTFPLVWTNTCCSHPLFRDSELIEENFLGVRNAAQRKLLDELGIPAEDVPVDEFTPLGRILYKAPSDGKWGEHELDYLLFIVRDVKYDPNPDEVADAKYVNREELKEILRKADAGEEGIKLSPWFRLVVDNFLFKWWDHVEEGKIKDVADMKTIHKLT

SEQ ID NO: 68094 - DNA, 1009 bp, Hevea brasiliensis
  CDS (184)..(888)
gccaccaccagactctcgtcctcgcttccctcctctgcttctcctcgttattcttactttctctctacccaatttgcctctccttctctcattcaattccctctaactcttaaaccttcgtctacctcttcgttctctagggtattttcgtcttctccatctgcaatcaccgctacttccaccatgggtgaggctccagatgtcggcatggatgctgtccagaaacgcctcatgttcgacgatgaatgcattttagtagatgagaacgatggtgttgttggtcatgcttccaaatataattgtcatttgtgggaaaatattttgaaggggaacgcattacatagagcttttagcgtatttctcttcaactcaaaatatgagctactccttcagcaacgctctgggacaaaggtgacattcccgcttgtatggacaaacacttgctgtagtcatcctctgtaccgtgaatctgagcttattgatgaggatgctcttggtgtgagaaatgctgcacaaaggaagcttttcgatgagcttggtatccctgctgaagatgttccagttgatcagtttactccactaggacgtatactatataaggcgtcctccgatggaaagtggggagagcatgaacttgattatctgctctttatagtccgtgatgttaatgtaaatccaaaccctgatgaggtagctgatgtaaagtatgttaaccgggatcagttgaaggagctcttgaggaaggcggattctggcgaggaaggtataaatttgtcaccttggtttagactagttgtggacaacttcttgttgaaatggtgggaaaatgtcgaaaatgggacactcaaggaagcagttgacatgaaaacgattcacaagttgagttgagataaatatctatacagtatcaaatttgattgtggcatcacctgtagctttattatttgaataaatttggtaatgtcagttgtaaacgagttagcctaaaaaaaaaaaaaaaaaaaaaaaa

SEQ ID NO: 68095 - protein, 234 aa, Hevea brasiliensis
MGEAPDVGMDAVQKRLMFDDECILVDENDGVVGHASKYNCHLWENILKGNALHRAFSVFLFNSKYELLLQQRSGTKVTFPLVWTNTCCSHPLYRESELIDEDALGVRNAAQRKLFDELGIPAEDVPVDQFTPLGRILYKASSDGKWGEHELDYLLFIVRDVNVNPNPDEVADVKYVNRDQLKELLRKADSGEEGINLSPWFRLVVDNFLLKWWENVENGTLKEAVDMKTIHKLS

SEQ ID NO: 68096 - DNA, 1058 bp, Haematococcus pluvialis
  CDS (43)..(924)
atcgctacttggaacctggcccggcggcagtccgatgacgcgatgcttcgttcgttgctcagaggcctcacgcatttcccccgcgtgaactccgcgcagcagcccagctgtgcacacgcgcgactccagtttaggcccagaagcatgcagctgcttgccgaggaccgcacagaccatatgaggggtgcaagtacctgggcaggcgggcagtcgcaggatgagctgatgctgaaggacgagtgcatcttggtggatgctgacgacaacattacaggccatgtcagcaagctggagtgccacaagttcctaccacatcagcctgcaggcctgctgcaccgggccttctctgtattcctgtttgacgaccaggggcgactgctgctgcaacagcgtgcacgatcaaaaatcacattccccagtgtgtggaccaacacctgctgcagccaccctctacatgggcagaccccagatgaggtggaccaactaagccaggtggccgacggcacagtacctggcgcaaaggctgctgccatccgcaagttggagcacgagctggggataccagcgcaccagctgccggccagcgcgtttcgcttcctcacgcgtttgcactactgcgccgcggacgtgcagccggctgcgacacaatcagcactctggggcgagcacgaaatggactacatcttattcatccgggccaacgtcacccttgcgcccaaccctgacgaggtggacgaagtcaggtacgtgacgcaggaggagctgcggcagatgatgcagccggacaatgggttgcaatggtcgccgtggtttcgcatcatcgccgcgcgcttccttgagcgctggtgggctgacctagacgcggccctgaacactgacaaacacgaggattggggaacggtgcatcacatcaacgaagcgtgaaaacagaagctgtaggatgtcaagacacgtcatgagggggcttggcatcttggcggcttcgtatctctttttactgagactgaacctgcagctggagacaatggtgagcccaattcaactttccgctgcactgg

SEQ ID NO: 68097 - protein, 293 aa, Haematococcus pluvialis
MLRSLLRGLTHFPRVNSAQQPSCAHARLQFRPRSMQLLAEDRTDHMRGASTWAGGQSQDELMLKDECILVDADDNITGHVSKLECHKFLPHQPAGLLHRAFSVFLFDDQGRLLLQQRARSKITFPSVWTNTCCSHPLHGQTPDEVDQLSQVADGTVPGAKAAAIRKLEHELGIPAHQLPASAFRFLTRLHYCAADVQPAATQSALWGEHEMDYILFIRANVTLAPNPDEVDEVRYVTQEELRQMMQPDNGLQWSPWFRIIAARFLERWWADLDAALNTDKHEDWGTVHHINEA

SEQ ID NO: 68098 - DNA, 1099 bp, Phaffia rhodozyma
  CDS (99)..(854)
cccacgcgtccgcacatctcgcatatatcactttcctccttccagaacaagttctgagtcaaccgaaaagaaagaaggcagaggaaaatatattctagatgtccatgcccaacattgttccccccgccgaggtccgaaccgaaggactcagtttagaagagtacgatgaggagcaggtcaggctgatggaggagcgatgtattcttgttaacccggacgatgtggcctatggagaggcttcgaaaaagacctgccacttgatgtccaacatcaacgcgcccaaggacctcctccaccgagcattctccgtgtttctcttccgcccatcggacggagcactcctgcttcagcgaagagcggacgagaagattacgttccctggaatgtggaccaacacgtgttgcagtcatcctttgagcatcaagggcgaggttgaagaggagaaccagatcggtgttcgacgagctgcgtcccgaaagttggagcacgagcttggcgtgcctacatcgtcgactccgcccgactcgttcacctacctcactaggatacattacctcgctccgagtgacggactctggggagaacacgagatcgactacattctcttctcaaccacacctacagaacacactggaaaccctaacgaagtctctgacactcgatatgtcaccaagcccgagctccaggcgatgtttgaggacgagtctaactcatttaccccttggttcaagttgattgcccgagacttcctgtttggctggtgggatcaacttctcgccagacgaaatgaaaagggtgaggtcgatgccaaatcgttggaggatctctcggacaacaaagtctggaagatgtagtcgacccttctttctgtacagtcatctcagttcgcctgttggttgcttgcttcttgctcttctttctatatatcttttttcttgcctgggtagacttgatctttctacatagcatacgcatacatacataaactctatttcttgttctttatctctcttctaagggaatcttcaagatcaatttctttttgggctacaacatttcagatcaatgttgcttttcagactacaaaaaaaaaaaaaaa

SEQ ID NO: 68099 - protein, 251 aa, Phaffia rhodozyma
MSMPNIVPPAEVRTEGLSLEEYDEEQVRLMEERCILVNPDDVAYGEASKKTCHLMSNINAPKDLLHRAFSVFLFRPSDGALLLQRRADEKITFPGMWTNTCCSHPLSIKGEVEEENQIGVRRAASRKLEHELGVPTSSTPPDSFTYLTRIHYLAPSDGLWGEHEIDYILFSTTPTEHTGNPNEVSDTRYVTKPELQAMFEDESNSFTPWFKLIARDFLFGWWDQLLARRNEKGEVDAKSLEDLSDNKVWKM

SEQ ID NO: 68100 - DNA, 1139 bp, Camptotheca acuminata
  CDS (70)..(777)
ccagcttcgcgcctctgcctctctgtctctgccctcgtgacttcctttcattcgtttgccaccgccgccatgggtgacgccgctaccgatgctggcatggacgctgtccaaaagcgtctcatgtttgaagacaaatgtattttggtggacgaaaatgataatgttgttggccatgataccaaatacaattgccacttgatggaaaagattgaatctgaaaatttgctacacagagctttcagtgtatttttgttcaactcaaaatatgagctactccttcagcaacggtctgcaacaaaggtaacattccctctggtgtggacaaacacctgttgcagccatccactttatcgagaatctgagcttatcaaggagaatgcccttggggccaggaatgctgcacaaaggaagcttttggacgaacttggtattcctgctgaagatgtgccagttgatcagttcatcccactgggtcgtatactgtacaaagcaccatctgacggcaaatggggagagcatgaacttgattacctactctttatagtccgagatgttaatgttaatccaaaccctgatgaagtcgccgatattaaatatgtgacccgggatcagttgaaagagctactaaggaaagcagatgcgggtgaggagggtctgaaactgtctccttggttcagactagttgtggataattttttgttcaagtggtgggaccatgttgaaaaggggaccatgcacgaagctgctgatatgaaaagcattcataagttgatttaaaaacagcagtctactataggtatctttagataatagtattctcagtatctttttcaaataaatttggacatggcaattccaagaaatatgctttgcagacaggctgacatgttcttattcttgccattggtctctaatgtttgtgcccaaacaaatttctatggcattttattgaattttttttcctttgggatcttttttagctggcttggacttgtaatttagatttcatttcgctgttttggagaatttaataaagaaaccatattaagacctttaattggacttggctttgcaattttagagagttcaataaaagactatttttatatccatgtgttcaaaaaaaaaaaaaaaaaaaa

SEQ ID NO: 68101 - protein, 235 aa, Camptotheca acuminata
MGDAATDAGMDAVQKRLMFEDKCILVDENDNVVGHDTKYNCHLMEKIESENLLHRAFSVFLFNSKYELLLQQRSATKVTFPLVWTNTCCSHPLYRESELIKENALGARNAAQRKLLDELGIPAEDVPVDQFIPLGRILYKAPSDGKWGEHELDYLLFIVRDVNVNPNPDEVADIKYVTRDQLKELLRKADAGEEGLKLSPWFRLVVDNFLFKWWDHVEKGTMHEAADMKSIHKLI

SEQ ID NO: 68102 - DNA, 1207 bp, Clarkia breweri
  CDS (11)..(874)
attctctgcaatgtcttcttccatgcttaatttcaccgccagccgcatcgtttcgcttcctcttctatcttctcctccttcacgcgttcaccttcccctctgcttcttctcacccatttcacttacgcaacgcttctccgccaagttgactttttcttcgcaggccaccaccatgggtgaggttgttgatgccggcatggatgccgtccagaggcgccttatgtttgaggacgaatgcatcctagttgatgagaatgataaagttgttggtcacgaatccaaatataactgtcacttgatggaaaagatagaatctgaaaatctattgcatagagctttcagtgtattcttgttcaactccaaatatgagctactacttcagcaaaggtctgctacaaaggtgacatttcctctcgtgtggacaaacacatgctgcagtcatccattgtaccgggaatctgagcttattgatgagaattgcctgggagtgaggaatgctgcgcaaaggaagttattggatgagctgggcattcctgctgaagacctgcctgttgaccaattcataccgctcagtcgtattctttacaaggcaccttctgatggcaagtggggagaacacgaacttgattacctgctattcatcatcagagatgtaaatcttgatccaaatcctgatgaagttgcggaggtgaagtacatgaacagggatgatctgaaggagctgctgagaaaggcggatgcagaggaggaaggggtgaagctgtcgccgtggtttaggttagtagttgacaatttcttgttcaagtggtgggatcacgtcgagaaaggctccctcaaggatgcagctgacatgaaaaccattcacaaactataagacttcatctttctttccgtaaaagtaaacccagaagataataaatatagaggaagaatgaagtcctgagtttgatgattaatgttggtatttttcttcttgtgagattgtggccagacttcttaataatgtcgaatatatgattgttatagttattaggttcattcatagccaataagtaagcagccatgttcacggttgtgtttatgtatttgaggtttaataatttgtatgttatgcactactgtactctacacctaccaatgacctgtttattgttcaatatgtatgtcccatcatctacaacacaataagatcacttgccctactctt

SEQ ID NO: 68103 - protein, 287 aa, Clarkia breweri
MSSSMLNFTASRIVSLPLLSSPPSRVHLPLCFFSPISLTQRFSAKLTFSSQATTMGEVVDAGMDAVQRRLMFEDECILVDENDKVVGHESKYNCHLMEKIESENLLHRAFSVFLFNSKYELLLQQRSATKVTFPLVWTNTCCSHPLYRESELIDENCLGVRNAAQRKLLDELGIPAEDLPVDQFIPLSRILYKAPSDGKWGEHELDYLLFIIRDVNLDPNPDEVAEVKYMNRDDLKELLRKADAEEEGVKLSPWFRLVVDNFLFKWWDHVEKGSLKDAADMKTIHKL

SEQ ID NO: 68104 - DNA, 684 bp, Schizosaccharomyces pombe
  CDS (1)..(684)
atgagttcccaacaagagaaaaaggattatgatgaagaacaattaaggttgatggaagaagtttgtatcgttgtagatgaaaatgatgtccctttaagatatggaacgaaaaaggagtgtcatttgatggaaaatataaataaaggtcttttgcatagagcattctctatgttcatctttgatgagcaaaatcgccttttacttcagcagcgtgcagaagagaaaattacatttccatccttatggacgaatacatgttgctcccacccattggatgttgctggtgaacgtggtaatactttacctgaagctgttgaaggtgttaagaatgcagctcaacgcaagctgttccatgaattgggtattcaagccaagtatattcccaaagacaaatttcagtttcttacacgaatccattaccttgctcctagtactggtgcttggggagagcatgaaattgactacattcttttcttcaaaggtaaagttgagctggatatcaatcccaatgaagttcaagcctataagtatgttactatggaagagttaaaagagatgttttccgatcctcaatatggattcacaccatggttcaaacttatttgtgagcattttatgtttaaatggtggcaggatgtagatcatgcgtcaaaattccaagataccttaattcatcgttgctaa

SEQ ID NO: 68105 - protein, 227 aa, Schizosaccharomyces pombe
MSSQQEKKDYDEEQLRLMEEVCIVVDENDVPLRYGTKKECHLMENINKGLLHRAFSMFIFDEQNRLLLQQRAEEKITFPSLWTNTCCSHPLDVAGERGNTLPEAVEGVKNAAQRKLFHELGIQAKYIPKDKFQFLTRIHYLAPSTGAWGEHEIDYILFFKGKVELDINPNEVQAYKYVTMEELKEMFSDPQYGFTPWFKLICEHFMFKWWQDVDHASKFQDTLIHRC

SEQ ID NO: 68106 - DNA, 855 bp, Arabidopsis thaliana
  CDS (1)..(855)
atgtctgcttcttctttatttaatctcccattgattcgcctcagatctctcgctctttcgtcttctttttcttctttccgatttgcccatcgtcctctgtcatcgatttcaccgagaaagttaccgaattttcgtgctttctctggtaccgctatgacagatactaaagatgctggtatggatgctgttcagagacgtctcatgtttgaggatgaatgcattcttgttgatgaaactgatcgtgttgtggggcatgacagcaagtataattgtcatctgatggaaaatattgaagccaagaatttgctgcacagggcttttagtgtatttttattcaactcgaagtatgagttgcttctccagcaaaggtcaaacacaaaggttacgttccctctagtgtggactaacacttgttgcagccatcctctttaccgtgaatcagagcttatccaggacaatgcactaggtgtgaggaatgctgcacaaagaaagcttctcgatgagcttggtattgtagctgaagatgtaccagtcgatgagttcactcccttgggacgtatgctgtacaaggctccttctgatggcaaatggggagagcatgaacttgattacttgctcttcatcgtgcgagacgtgaaggttcaaccaaacccagatgaagtagctgagatcaagtatgtgagccgggaagagctgaaggagctggtgaagaaagcagatgcaggtgaggaaggtttgaaactgtcaccatggttcagattggtggtggacaatttcttgatgaagtggtgggatcatgttgagaaaggaactttggttgaagctatagacatgaaaaccatccacaaactctga

SEQ ID NO: 68107 - protein, 284 aa, Arabidopsis thaliana
MSASSLFNLPLIRLRSLALSSSFSSFRFAHRPLSSISPRKLPNFRAFSGTAMTDTKDAGMDAVQRRLMFEDECILVDETDRVVGHDSKYNCHLMENIEAKNLLHRAFSVFLFNSKYELLLQQRSNTKVTFPLVWTNTCCSHPLYRESELIQDNALGVRNAAQRKLLDELGIVAEDVPVDEFTPLGRMLYKAPSDGKWGEHELDYLLFIVRDVKVQPNPDEVAEIKYVSREELKELVKKADAGEEGLKLSPWFRLVVDNFLMKWWDHVEKGTLVEAIDMKTIHKL

SEQ ID NO: 68108 - DNA, 930 bp, Camptotheca acuminata
  CDS (1)..(930)
atgtcggcagcctcacatatacacagcgtcgcctgtaggctctcctcttcatttctcgcgtctcccaaactcaaacttcatcctcgcctctcctttttctttcattcctcttccttcagaaaccatatcatcaccagaagcgttttctgctcttcatcgcatctctctgttcgcgtttcgtcctatcattcgtccgtcgcagccaaagctaccacttccgccatgggtgacaccgctaccgatgctggcatggacgctgtccagaggcgtctcatgttcgaagacgaatgtattttggtagatgagaatgatcatgttgttgggcatgataccaaatacaattgccacctgatggaaaagattgaatctgacaatttgctacacagagctttcagtgtgtttttatttaactcaaagtatgagttactccttcagcaacggtctgcaacaaaggtaacattccctctggtgtggacgaacacctgctgcagccatccacgataccgagaatctgagcttgttgatgaaaatgctcttggggtgagaaatgctgcacaaaggaagcttttggatgaacttggtattcctgctgaagatgtgccagttgatcagttcatcccactgggtcgtatgctatacaaggcaccatctgatggaaaatggggcgagcatgagcttgattacctgctgttcatcatccgagacgttaacgtgcatccgaaccctgatgaagttgctgatgttaagtatgtaaaccaggatcagttgaaagatcttttgagaaaagtagatgctggcgaggaaggcctgaagctttcaccttggtttagactagtggtggagaatttcttgttcaagtggtgggatcatgttgaaaaggggaccctacaggacgctactgatatgaaaaccattcacaagttgacataa

SEQ ID NO: 68109 - protein, 309 aa, Camptotheca acuminata
MSAASHIHSVACRLSSSFLASPKLKLHPRLSFFFHSSSFRNHIITRSVFCSSSHLSVRVSSYHSSVAAKATTSAMGDTATDAGMDAVQRRLMFEDECILVDENDHVVGHDTKYNCHLMEKIESDNLLHRAFSVFLFNSKYELLLQQRSATKVTFPLVWTNTCCSHPRYRESELVDENALGVRNAAQRKLLDELGIPAEDVPVDQFIPLGRMLYKAPSDGKWGEHELDYLLFIIRDVNVHPNPDEVADVKYVNQDQLKDLLRKVDAGEEGLKLSPWFRLVVENFLFKWWDHVEKGTLQDATDMKTIHKLT

SEQ ID NO: 68110 - DNA, 534 bp, Photorhabdus luminescens subsp
  CDS (1)..(534): transl_table=11
atggatgagatacttgttcttgttgataaacatgataatcccattggttcagcgggaaaagctgatattcatcagaaaggtatgttacatcgggccttttctatctttgtttttgataataaaggaaatttactcttacagaagcgagcggcaaccaaatatcattcagccgggctttggaccaatagctgttgtggtcaccctagggttggtgaagctctggaggccgctgcacatcggcgtcttggcgaagagatgggttttgactgtccattgaaaaaggtttcgtcatttatttatcacgcgatacttcctaataatttgattgaatacgagtatgatcatgtttttattggacgctttgataaagaaccgataattaaccttgacgaagtatccgattataaatgggttaatcttctgaaattgagggcgctaattaataatgctcctgatgtgtatacggtttggttcaaaaaaatcattaatggtctttcgtatcaagatattgaggagtggcaaaggctgatttga

SEQ ID NO: 68111 - protein, 177 aa, Photorhabdus luminescens subsp
MDEILVLVDKHDNPIGSAGKADIHQKGMLHRAFSIFVFDNKGNLLLQKRAATKYHSAGLWTNSCCGHPRVGEALEAAAHRRLGEEMGFDCPLKKVSSFIYHAILPNNLIEYEYDHVFIGRFDKEPIINLDEVSDYKWVNLLKLRALINNAPDVYTVWFKKIINGLSYQDIEEWQRLI

SEQ ID NO: 68112 - DNA, 528 bp, Nocardia farcinica
  CDS (1)..(528): transl_table=11
atgcccgtcgagctcgtggacgaggcaggccgggcggtgggcgcctgcccggtcgccgaggcgcaccgggatcccggcaagctgcatcgcgcgttctccgtcctgctcttcgacaccgccgggcgggtactgctgcaacagcgggccgcggtcaagacccgcttcccgctgctgtgggccaacacctgctgcgggcatcccgcgcccggtgagtccgtcgaagcggcggccgccacccgcctggccgaggaactcggcgtcgccgccggtctcaccgaggtcggcgtcttccgctaccgggccgccgacaccgccaccgggcgcgtcgagcacgagtgggatcacgtgctcatcggcaccctggacaccaccccgcacccggacccggccgaggtcgcgaacctgcgctgggtgcggcccgccgaggtgcgggcgaagctggccgccgagcccgccgcgtacaccccctggctggccgaggtgctcgagatcgccgacgcggcgtatcgggagtcggccgggcgctga

SEQ ID NO: 68113 - protein, 175 aa, Nocardia farcinica
MPVELVDEAGRAVGACPVAEAHRDPGKLHRAFSVLLFDTAGRVLLQQRAAVKTRFPLLWANTCCGHPAPGESVEAAAATRLAEELGVAAGLTEVGVFRYRAADTATGRVEHEWDHVLIGTLDTTPHPDPAEVANLRWVRPAEVRAKLAAEPAAYTPWLAEVLEIADAAYRESAGR

SEQ ID NO: 68114 - DNA, 543 bp, Photobacterium profundum
  CDS (1)..(543): transl_table=11
atgataattgaagaacaggttgtattggtcgatcagcagggacgagcactaggtttgcaggaaaaaatgcaagctcaccgtgatggagctttgcatttggctttttctgttttgttgtatcgtgagacgacgcagggcatagaatttctcatgcagcagcgagccttgggtaagtatcacagtggcggtttgtggaccaacacatgttgctctcaccctaggcaaggtgaaacgttagagcaagcaggtttgcgtcgtttaaccgaagagatgggcattgtcggcttagagtcattggatgatattgcaagctttgtttatcgtgcagaacttgataatcaattaatcgagcacgagtgggatcatgtattgatcgccaacgggactgaattagcgatcattcctaattctgaagaagtgaagtcttatcgctggtggtctaaagcagatcttgagttagggctagctgatacccctgaactatttacggcttggtttccccaagtattacagtatgtaattaatgagctatcaagccagtaa

SEQ ID NO: 68115 - protein, 180 aa, Photobacterium profundum
MIIEEQVVLVDQQGRALGLQEKMQAHRDGALHLAFSVLLYRETTQGIEFLMQQRALGKYHSGGLWTNTCCSHPRQGETLEQAGLRRLTEEMGIVGLESLDDIASFVYRAELDNQLIEHEWDHVLIANGTELAIIPNSEEVKSYRWWSKADLELGLADTPELFTAWFPQVLQYVINELSSQ

SEQ ID NO: 68116 - DNA, 531 bp, Rhodobacter capsulatus
  CDS (1)..(531): transl_table=11
atggccgaggagatgatccccgcctgggtcgagggcgtgctgcaacccgtcgagaagctggaggcccaccgcaagggcctgcggcatctggcgatttcggtcttcgtgacgcgcggcaacaaggtgcttttgcagcaacgcgcgctgtcgaaatatcacacgccggggctttgggcgaatacctgctgcacccatccctattggggcgaggatgcgccgacctgcgccgcccgccgtctggggcaggagctgggcatcgtcgggctgaagctgcgccacatggggcagctggaataccgcgccgatgtgaacaacggcatgatcgagcatgaggtggtggaggtcttcaccgccgaagcgcccgaggggatcgagccgcaacccgaccccgaggaagtggccgataccgaatgggtgcgcatcgacgcgctgcgctcggagatccacgccaatccggaacgcttcacgccctggctcaagatctatatcgagcagcaccgcgacatgatctttccgccggtgacggcctga

SEQ ID NO: 68117 - protein, 176 aa, Rhodobacter capsulatus
MAEEMIPAWVEGVLQPVEKLEAHRKGLRHLAISVFVTRGNKVLLQQRALSKYHTPGLWANTCCTHPYWGEDAPTCAARRLGQELGIVGLKLRHMGQLEYRADVNNGMIEHEVVEVFTAEAPEGIEPQPDPEEVADTEWVRIDALRSEIHANPERFTPWLKIYIEQHRDMIFPPVTA

SEQ ID NO: 68118 - DNA, 891 bp, Zea mays
  CDS (1)..(891)
atggcggcatcagcgtctcggcccctcgcgctcctcgcgtgcacctcggcatctcacggcgctgggcggcgggcgtgggctcgcttggctgtctcttcctattcggcgaggtcggcgctccccaggctccgcgggcgtcggtcgttcgccgcctccgcagggggcgccgtgatggggaacccaggccccggcgccgttgacgccgacgtcgggatggacgccgtccagcggcggctcatgtttgaggacgagtgcattttagtggatgaacaagacaatgtcatcggccacgagtccaagtataactgccatctcatggagaagatagaagctggaaatgtcctgcacagagctttcagtgttttccttttcaactccaaatatgaattgctactacagcaaaggtctgcaacaaaagtgacatttccacttgtctggacaaacacctgctgtagccatcctctctaccgcgagtcagagttgattgaggaaaattgtgcaggggtgagaaatgcagcccagcgcaaactatttgatgaactgggaatagttgctgacgaattacctgttgaccagttcatcctccttgggaggatgctttacatggctccttcagatggaaaatggggcgaacacgagttggattacctcctgttcatggttcgtgacgtgaagctcaacccgaatcctgaagaggtggccgacgtcaagtacgtgaaccgcgatcagctgaaggagctgctcaggaaagctgatgctggggaagatggcgttaagatgtccccttggttcaggctggtggtggacaacttcctcatgggttggtgggatcatgtcgagcaagggactctgcagggggcagcggacatgaaaaccatccataaattgtaa

SEQ ID NO: 68119 - protein, 296 aa, Zea mays
MAASASRPLALLACTSASHGAGRRAWARLAVSSYSARSALPRLRGRRSFAASAGGAVMGNPGPGAVDADVGMDAVQRRLMFEDECILVDEQDNVIGHESKYNCHLMEKIEAGNVLHRAFSVFLFNSKYELLLQQRSATKVTFPLVWTNTCCSHPLYRESELIEENCAGVRNAAQRKLFDELGIVADELPVDQFILLGRMLYMAPSDGKWGEHELDYLLFMVRDVKLNPNPEEVADVKYVNRDQLKELLRKADAGEDGVKMSPWFRLVVDNFLMGWWDHVEQGTLQGAADMKTIHKL

SEQ ID NO: 68120 - DNA, 906 bp, Glycine max
  CDS (1)..(906)
atggcacattcctcgatcgtcgttactctgagccagaacttgtttaaaaggaacctcacctgtgtaaaaattcacgctcattctccttcttcttctttcggatctcgttctctttctcttccttccttctccttctctcagagaacaactcctctctctctcaccgcctccttctcctctcacaccgccatgggcgagacttccgctcccgccgctgatgccggcatggacgccgtccagcgccgtctcatgttcgaagacgaatgcattttggtggatgagaatgaccgtgtggttggtcatgattccaaatacaattgtcacttgatggaaaagattgaagctgagaatttgctgcatagagctttcagtgtattcctgttcaactctaagtatgagttgcttcttcagcaacgatctgcaaccaaggtaacattccctcttgtgtggacaaacacctgttgcagccatccactgtaccgtgaatctgagcttattgatgagaatgcccttggagtaagaaatgcagctcagaggaagcttttggatgagcttggtattgttgctgaagatgtaccagttgatcagttcaccccattgggtcgcattctttacaaggcaccttctgatggcaaatggggagagcatgaactggactatctgcttttcattgtccgggatgttaacgtgaaccccaatcctgacgaagtggctgatatcaaatatgtgaactgcgatcagttgaaggagctgttgaggaaagctgatgcaggtgaggaaggtctgaagctatcgccatggttcagacttgttgtggacaatttcttgttcaaatggtgggaccatcttgagcgaggaactcttggggaggtcactgacatgaagaccattcacaagttgacataa

SEQ ID NO: 68121 - protein, 301 aa, Glycine max
MAHSSIVVTLSQNLFKRNLTCVKIHAHSPSSSFGSRSLSLPSFSFSQRTTPLSLTASFSSHTAMGETSAPAADAGMDAVQRRLMFEDECILVDENDRVVGHDSKYNCHLMEKIEAENLLHRAFSVFLFNSKYELLLQQRSATKVTFPLVWTNTCCSHPLYRESELIDENALGVRNAAQRKLLDELGIVAEDVPVDQFTPLGRILYKAPSDGKWGEHELDYLLFIVRDVNVNPNPDEVADIKYVNCDQLKELLRKADAGEEGLKLSPWFRLVVDNFLFKWWDHLERGTLGEVTDMKTIHKLT

SEQ ID NO: 68122 - DNA, 888 bp, Glycine max
  CDS (1)..(888)
atggcacagtcctcctcgatcgtcgttactctgaggcagcacttgtttaaaaggaacctcacctctctcactctgcctcactctccttctcttccttccttctccttctctctgagaacaacaccccacactcctctctctctctccgcttccttctcttctcacacctccatggcccacacttcccttccctccgccgatgccggcatggacgctgtccagcgccgtctcatgttcgaagacgaatgcattttggtggatgagaatgaccgtgtggttggtcatgattcaaaatacaattgtcacttgatggaaaagattgaagctgagaatttgctgcatagagctttcagtgtattcctgttcaactcaaagtatgagttgcttcttcagcaacgatctgcaacaaaggtaactttccctcttgtgtggacaaacacctgttgtagccatcctctgtaccgtgaatctgagcttattgatgagaatgcccttggagtaagaaacgcagctcagaggaagcttttggatgagcttggtattgttgccgaagatgtaccagttgataagttcacccccttgggtcgcattctttacaaggcaccttctgatggcaaatggggagagcatgaactggactatctgcttttcattgtccgggatgttaatgtgaaccccaatcctgatgaagtggctgatatcaaatatgtgaaccgtgatcagttgaaggagctgttgaggaaagctgatgcaggtgaggaaggtctgaagctatcaccttggttcagactagttgtggacaatttcttattcaaatggtgggaccatcttgagcaaggaactcttggggaggccactgacatgaagaccattcacaagttgacataa

SEQ ID NO: 68123 - protein, 295 aa, Glycine max
MAQSSSIVVTLRQHLFKRNLTSLTLPHSPSLPSFSFSLRTTPHTPLSLSASFSSHTSMAHTSLPSADAGMDAVQRRLMFEDECILVDENDRVVGHDSKYNCHLMEKIEAENLLHRAFSVFLFNSKYELLLQQRSATKVTFPLVWTNTCCSHPLYRESELIDENALGVRNAAQRKLLDELGIVAEDVPVDKFTPLGRILYKAPSDGKWGEHELDYLLFIVRDVNVNPNPDEVADIKYVNRDQLKELLRKADAGEEGLKLSPWFRLVVDNFLFKWWDHLEQGTLGEATDMKTIHKLT

SEQ ID NO: 68124 - DNA, 891 bp, Zea mays
  CDS (1)..(891)
atggcgtcatcggcggcgcgatccctcgcgctcctcgcgtccacctcggcatcgcacggcgccgggcagcgggcgtgggctcgcttggctgtctcttcctattcggcgaggtcggccctccccaagctccgcgggcgccgctcgttcgccgcctccgcagggggcgccgtgatggggaacccaggccccggcgccgttgacgccgacgccgggatggacgccgtccagcggcggctcatgtttgaggacgagtgcattttagtggatgaacaagacaatgtcatcggccacgagtccaagtataactgccatctcatggagaagatagaagctggaaatgccctgcacagagctttcagtgttttccttttcaactccaaatatgaattgctactacagcaaaggtctgcaacaaaagtgacatttccacttgtctggacaaacacctgctgtagccatcctctctaccgcgagtcagagttgattgaggaaaattgtgcaggggtgagaaatgcagcccagcgcaaactatttgatgaactgggaatagttgctgacgaattacctgttgaccagttcatcctccttgggaggatgctttacatggctccttcagatggaaaatggggcgaacacgagttggattacctcctgttcatggttcgtgacgtgaagctcaacccgaatcctgaagaggtggccgacgtcaagtacgtgaaccgcgatcagctgaaggagctgctcaggaaagctgatgctggggaagatggcgttaagatgtccccttggttcaggctggtggtggacaacttcctcatgggctggtgggatcatgtcgagcaagggactctgcagggggcagcggacatgaaaaccatccataaattgtaa

SEQ ID NO: 68125 - protein, 296 aa, Zea mays
MASSAARSLALLASTSASHGAGQRAWARLAVSSYSARSALPKLRGRRSFAASAGGAVMGNPGPGAVDADAGMDAVQRRLMFEDECILVDEQDNVIGHESKYNCHLMEKIEAGNALHRAFSVFLFNSKYELLLQQRSATKVTFPLVWTNTCCSHPLYRESELIEENCAGVRNAAQRKLFDELGIVADELPVDQFILLGRMLYMAPSDGKWGEHELDYLLFMVRDVKLNPNPEEVADVKYVNRDQLKELLRKADAGEDGVKMSPWFRLVVDNFLMGWWDHVEQGTLQGAADMKTIHKL

SEQ ID NO: 68126 - DNA, 24 bp, Artificial sequence
  primer
atgactgccgacaacaatagtatg

SEQ ID NO: 68127 - DNA, 26 bp, Artificial sequence
  primer
ttatagcattctatgaatttgcctgt

SEQ ID NO: 68128 - protein, 225 aa, Artificial sequence
  consensus sequence
  Variant (3)..(3): Xaa in position 3 is any amino acid
  Variant (6)..(7): Xaa in position 6 to 7 is any amino acid
  Variant (9)..(10): Xaa in position 9 to 10 is any amino acid
  Variant (11)..(11): Xaa in position 11 is any or no amino acid
  Variant (13)..(15): Xaa in position 13 to 15 is any amino acid
  Variant (17)..(18): Xaa in position 17 to 18 is any amino acid
  Variant (21)..(24): Xaa in position 21 to 24 is any amino acid
  Variant (25)..(32): Xaa in position 25 to 32 is any or no amino acid
  Variant (43)..(47): Xaa in position 43 to 47 is any amino acid
  Variant (48)..(50): Xaa in position 48 to 50 is any or no amino acid
  Variant (55)..(55): Xaa in position 55 is any amino acid
  Variant (57)..(59): Xaa in position 57 to 59 is any amino acid
  Variant (61)..(61): Xaa in position 61 is any amino acid
  Variant (65)..(66): Xaa in position 65 to 66 is any amino acid
  Variant (77)..(84): Xaa in position 77 to 84 is any amino acid
  Variant (85)..(102): Xaa in position 85 to 102 is any or no amino acid
  Variant (104)..(106): Xaa in position 104 to 106 is any amino acid
  Variant (109)..(109): Xaa in position 109 is any amino acid
  Variant (111)..(111): Xaa in position 111 is any amino acid
  Variant (113)..(114): Xaa in position 113 to 114 is any amino acid
  Variant (119)..(121): Xaa in position 119 to 121 is any amino acid
  Variant (122)..(128): Xaa in position 122 to 128 is any or no amino acid
  Variant (130)..(131): Xaa in position 130 to 131 is any amino acid
  Variant (133)..(133): Xaa in position 133 is any amino acid
  Variant (135)..(136): Xaa in position 135 to 136 is any amino acid
  Variant (138)..(143): Xaa in position 138 to 143 is any amino acid
  Variant (144)..(151): Xaa in position 144 to 151 is any or no amino acid
  Variant (157)..(157): Xaa in position 157 is any amino acid
  Variant (160)..(160): Xaa in position 160 is any amino acid
  Variant (163)..(171): Xaa in position 163 to 171 is any amino acid
  Variant (172)..(175): Xaa in position 172 to 175 is any or no amino acid
  Variant (177)..(177): Xaa in position 177 is any amino acid
  Variant (178)..(178): Xaa in position 178 is any or no amino acid
  Variant (181)..(190): Xaa in position 181 to 190 is any amino acid
  Variant (192)..(202): Xaa in position 192 to 202 is any amino acid
  Variant (203)..(208): Xaa in position 203 to 208 is any or no amino acid
  Variant (212)..(218): Xaa in position 212 to 218 is any amino acid
  Variant (219)..(220): Xaa in position 219 to 220 is any or no amino acid
  Variant (222)..(223): Xaa in position 222 to 223 is any amino acid
CIXVDXXDXXXGXXXKXXCHXXXXXXXXXXXXLHRAFSVFLFXXXXXXXXLLLQXRXXXKXTFPXXWTNTCCSHPLXXXXXXXXXXXXXXXXXXXXXXXXXXGXXXAAXRXLXXELGIXXXXXXXXXXFXXLXRXXYXXXXXXXXXXXXXXWGEHEXDYXLFXXXXXXXXXXXXXNXXEVXXXXXXXXXXLXXXXXXXXXXXXXXXXXPWFXXXXXXXXXLXXWW

SEQ ID NO: 68129 - protein, 25 aa, Artificial sequence
  protein pattern
  Variant (3)..(3): Xaa in position 3 is Ile or Leu
  Variant (5)..(5): Xaa in position 5 is any amino acid
  Variant (7)..(7): Xaa in position 7 is Ala or Ser
  Variant (8)..(8): Xaa in position 8 is any amino acid
  Variant (9)..(9): Xaa in position 9 is Ala, Glu, Asn, Ser or Thr
  Variant (11)..(11): Xaa in position 11 is Ile or Val
  Variant (13)..(13): Xaa in position 13 is Phe or Tyr
  Variant (14)..(14): Xaa in position 14 is Ala or Pro
  Variant (15)..(16): Xaa in position 15 to 16 is any amino acid
  Variant (17)..(17): Xaa in position 17 is Trp or Tyr
  Variant (20)..(20): Xaa in position 20 is Ala, Ser or Thr
LLXQXRXXXKXTXXXXXTNXCCSHP

SEQ ID NO: 68130 - protein, 11 aa, Artificial sequence
  protein pattern
  Variant (6)..(6): Xaa in position 6 is Ile, Leu, Met or Val
  Variant (9)..(9): Xaa in position 9 is Ile, Leu or Val
  Variant (11)..(11): Xaa in position 11 is Phe or Ile
WGEHEXDYXLX

SEQ ID NO: 68131 - protein, 21 aa, Artificial sequence
  protein pattern
  Variant (2)..(2): Xaa in position 2 is any amino acid
  Variant (3)..(3): Xaa in position 3 is any or no amino acid
  Variant (5)..(5): Xaa in position 5 is any or no amino acid
  Variant (7)..(8): Xaa in position 7 to 8 is any amino acid
  Variant (10)..(12): Xaa in position 10 to 12 is any amino acid
  Variant (13)..(13): Xaa in position 13 is Asp or Gly
  Variant (14)..(15): Xaa in position 14 to 15 is any amino acid
  Variant (16)..(16): Xaa in position 16 is Ala, Asn, Ser or Thr
  Variant (18)..(19): Xaa in position 18 to 19 is any amino acid
CXXVXDXXDXXXXXXXKXXCH

SEQ ID NO: 68132 - DNA, 573 bp, Zea mays
  CDS (1)..(573)
atggccgcccaccaggactcggcggcagcggggggcaggcctcctcgtcgtcctcgcgtcctcctggcagcctccggcagcgtggccgccatcaagttcgaggtcctctgccgcagcgtcgccgagtgggcggatgtccaggcggtggcgaccgcgtccgcgctggaattcattgatgtggcctccttccccggcggcgtccctctctacaccgacgaccaggagtggtctagctggaagcgggttggcgacaaggtcctgcacatcgaggtgcgccggtgggccgacgtcctggtcatcgcgccgctctcggccaacaccctcgcaaaggtcgccggcgggctgtgcgacaacctcctcacctgcgtcgtgcgcgcctgggactacagcaagcccgtttacgtcgcgccggccatgaacaccttcatgtgggtcaaccccttcaccgcgcgccacctcgccgtcctgcgcgacctcggcatgtccgtcgtcccgccggtcaatggcgcgatggcggagccgtcggagatttgcaagaccctcatgctctttttcggtccgcaacatctttag

SEQ ID NO: 68133 - protein, 190 aa, Zea mays
MAAHQDSAAAGGRPPRRPRVLLAASGSVAAIKFEVLCRSVAEWADVQAVATASALEFIDVASFPGGVPLYTDDQEWSSWKRVGDKVLHIEVRRWADVLVIAPLSANTLAKVAGGLCDNLLTCVVRAWDYSKPVYVAPAMNTFMWVNPFTARHLAVLRDLGMSVVPPVNGAMAEPSEICKTLMLFFGPQHL

SEQ ID NO: 68134 - DNA, 663 bp, Zea mays
  CDS (1)..(663)
atggctacatcagagccagtacaagagagtttggtggtgcactactcacaacctagtaggccccgggtcctccttgctgcttcaggaagtgtagccgctataaaatttgagagcctttgccgtagcttctctgagtgggcggatgtccgagctgtggccaccacgccatccttgcacttcgttgatagatcatctctaccaagtggcatcgttctttacactgatgacgatgaatggtctacctggaagaagataggagatgaagtcttacacatcgagctgcggaaatgggcagacgttatggtgatcgctccattgtcagcaaataccctggctaagatcgccggtgggttatgcgacaacctcttgacctgcatcgtgagagcgtgggactacagcaaaccgctctttgttgccccagccatgaacacgttaatgtggaacaacccattcacggagcggcatcttcacacaatcaaccaactgggcatagccttgatccccccagttaccaaaaggctggcctgtggcgattacgggaacggcgcaatggccgaaacctcgcagatccatacttccgtgaggctcgcgtgcaagacgcaaccgcacgatgcgagcagttcactcgcgggtcctgtcagtaataaccggccatctagctga

SEQ ID NO: 68135 - protein, 220 aa, Zea mays
MATSEPVQESLVVHYSQPSRPRVLLAASGSVAAIKFESLCRSFSEWADVRAVATTPSLHFVDRSSLPSGIVLYTDDDEWSTWKKIGDEVLHIELRKWADVMVIAPLSANTLAKIAGGLCDNLLTCIVRAWDYSKPLFVAPAMNTLMWNNPFTERHLHTINQLGIALIPPVTKRLACGDYGNGAMAETSQIHTSVRLACKTQPHDASSSLAGPVSNNRPSS

SEQ ID NO: 68136 - DNA, 663 bp, Zea mays
  CDS (1)..(663)
atggctacatcagagccagtacaagagagtttggtggtgcactactcacaacctagtaggccccgggtcctccttgctgcttcaggaagtgtagccgctataaaatttgagagcctttgccgtagcttctctgagtgggcggatgtccgagctgtggccaccacgtcatccttgcacttcgttgatagatcatctctaccaagtggcatcgttctttacactgatgacgatgaatggtctacctggaagaagataggagatgaagtcttacacatcgagctgcggaaatgggcagacgttatggtgatcgctccattgtcagcaaataccctggctaagatcgccggtgggttatgcgacaacctcttgacctgcatcgtgagagcgtgggactacagcaaaccgctctttgttgccccagccatgaacacgttaatgtggaacaacccattcacggagcggcatcttcacacaatcaaccaactgggcatagccttgatccccccagttaccaaaaggctggcctgtggcgattacgggaacggcgcaatggccgaaacctcgcagatccatactgccgtgaggctcgcgtgcaagacgcaaccgcacgatgcgagcagttcactcgcgggtcctgtcagtaataaccggccatctagctga

SEQ ID NO: 68137 - protein, 220 aa, Zea mays
MATSEPVQESLVVHYSQPSRPRVLLAASGSVAAIKFESLCRSFSEWADVRAVATTSSLHFVDRSSLPSGIVLYTDDDEWSTWKKIGDEVLHIELRKWADVMVIAPLSANTLAKIAGGLCDNLLTCIVRAWDYSKPLFVAPAMNTLMWNNPFTERHLHTINQLGIALIPPVTKRLACGDYGNGAMAETSQIHTAVRLACKTQPHDASSSLAGPVSNNRPSS

SEQ ID NO: 68138 - DNA, 1157 bp, Zea mays
  CDS (294)..(956)
ggacccccgggttggccggaccggtactcattgccatctctacgttctccagcaccgccgttgaacctcctccctattcccgttctctagcaccgccgttgaacctcctcccctctccctcttgcttccctctctcatcctctctgccgcttccccgctctccccaaactactctgtgccccgtcagatcgacctggactttggcgacagctacttctcgacgggcggcacgggcgtgctgctacttctgcttcctctcccacgcttgctgttgagcggttcaagcagagctgatggctacatcagagccagtacaagagagtttggtggtgcactactcacaacctagtaggccccgggtcctccttgctgcttcaggaagtgtagccgctataaaatttgagagcctttgccgtagcctctctgagtgggcggatgtccgagctgtggccaccacgtcatccttgcacttcgttgatagatcatctctaccaagtggcatcgttctttacactgatgacgatgaatggtctacctggaagaagataggagatgaagtcttacacatcgagctgcggaaatgggcagacgttatggtgattgctccattgtcagcaaataccctggctaagatcgccggtgggttatgcgacaacctcttgacctgcatcgtgagagcgtgggactacagcaaaccgctctttgttgccccagccatgaacacgttaatgtggaacaacccattcacggagcggcatcttcacacaatcaaccaactgggcatagccttgatccccccagttaccaaaaggctggcctgtggcgattacgggaatggcgcaatggccgaaacctcacagatccatacttccgtgaggctcgcgtgcaagacgcaaccgcacgatgcgagcagttcactcgcaggtcctgtcagtaataaccggccatctagctgatgcagcggttggccacttgattgtcaagcttaggaatttgttttatctggagtgttgtaccagatttttttcaactagagtttgtgtgtattgaattagggggaaaggttgttgtcacatgataacaataacttccaatgatgactctattcagtttgtaattgtctgtgggagtacaattatgcagctgtattgtctgct

SEQ ID NO: 68139 - protein, 220 aa, Zea mays
MATSEPVQESLVVHYSQPSRPRVLLAASGSVAAIKFESLCRSLSEWADVRAVATTSSLHFVDRSSLPSGIVLYTDDDEWSTWKKIGDEVLHIELRKWADVMVIAPLSANTLAKIAGGLCDNLLTCIVRAWDYSKPLFVAPAMNTLMWNNPFTERHLHTINQLGIALIPPVTKRLACGDYGNGAMAETSQIHTSVRLACKTQPHDASSSLAGPVSNNRPSS

SEQ ID NO: 68140 - DNA, 848 bp, Zea mays subsp. mays
  CDS (121)..(708)
attttgacatttttctcgagcagatcaatcttcttcggttagggttccctcgccgaatccctagatctgtaacggtttccaaaagagccaatggagaacgggaaacgagacagagaagacatggaagtgcaagccgcaccacggaagccacgcgtcctcctcgccgcgagcggaagcgtcgccgccatcaaattcggaaacctctgccattgtttcgccgaatgggccgaagtgagagccgtcgtctcgaaatcgtctctccacttcctcgacaggctctccctcccgcgggaagtcactctgtacaccgacgaagacgagtggtcaacctggaacaagatcggcgatccagtgcttcacatcgagctccgacgctgggctgacgtcatggtcatagctcctttgtctgctaacacattagccaagattgctggtgggctgtgtgataatcttctgacttgtatcgtacgagcttgggattatagcaaaccggttttcgttgcgcctgcgatgaatactttgatgtggaacaatcctttcacggagaggcatctttgttcccttgatgagcttgggatcacgctcattcctcccatcaagaagagattggcgtgtggtgactatggtaatggtgcaatggctgagccttctttgatttattccactgttagactcttctgggagtcgcaggttcgtcagcaaagctgaaaccatggtttccactttgcattggttggttctgttttaatgcttgtctttgtacatcttatgtctctagaggaccattttcactggcttcactcgtgttactgtaggaatatttaagtttattgtctcgctgtttggtg

SEQ ID NO: 68141 - protein, 195 aa, Zea mays subsp. mays
MEVQAAPRKPRVLLAASGSVAAIKFGNLCHCFAEWAEVRAVVSKSSLHFLDRLSLPREVTLYTDEDEWSTWNKIGDPVLHIELRRWADVMVIAPLSANTLAKIAGGLCDNLLTCIVRAWDYSKPVFVAPAMNTLMWNNPFTERHLCSLDELGITLIPPIKKRLACGDYGNGAMAEPSLIYSTVRLFWESQVRQQS

SEQ ID NO: 68142 - DNA, 970 bp, Arabidopsis thaliana
  CDS (132)..(731)
aaaacattttgatattctcttcgaccagatcaatttttcggttagggttcttcgccgaaccattggctactttgctagatctctgaaggtgtaaaagagctatggagaatgggaaaagagacagacaagacatggaagtgaataccacaccgaggaagcctcgtgtactactcgctgcaagtggaagcgtcgctgctatcaaattcggcaatctctgccattgcttcaccgaatgggcagaagtcagagccgtcgttacgaaatcatctctacatttcctcgataaactctctctcccacaagaagtgactctgtatactgatgaagatgaatggtctagctggaacaagatcggtgatcctgtccttcacatcgagcttagacgttgggctgatgttttagtcattgctcctttgtctgctaacaccttaggcaagattgctggtgggctttgtgataatcttctgacttgcattatacgagcttgggactataccaaaccactgtttgttgctccagctatgaatactttgatgtggaacaatcctttcactgaaaggcatcttttgtctcttgatgaactgggaatcacacttattcctcctatcaagaagagacttgcctgtggagactacggtaatggagctatggctgagccctctcttatctattccactgtcagactcttctgggagtctcaggctcatcagcaaaccggtggaactagttaaaaccatgatttccacaacatgcattttgtggaaaatcatctgttttcactatcttagataatagtagattttatcagtctgtttgcttttcttgtacatctcaaaatagctgtctggattgatgtatctggaggaccatttgcactactagctccactctgtttctgtagaaatgtctatgtttcttttcctcgctcttaaatgttgtcttcaattctgctaatagctcactgaacttt

SEQ ID NO: 68143 - protein, 199 aa, Arabidopsis thaliana
MEVNTTPRKPRVLLAASGSVAAIKFGNLCHCFTEWAEVRAVVTKSSLHFLDKLSLPQEVTLYTDEDEWSSWNKIGDPVLHIELRRWADVLVIAPLSANTLGKIAGGLCDNLLTCIIRAWDYTKPLFVAPAMNTLMWNNPFTERHLLSLDELGITLIPPIKKRLACGDYGNGAMAEPSLIYSTVRLFWESQAHQQTGGTS

SEQ ID NO: 68144 - DNA, 1104 bp, Glycine max
  CDS (154)..(816)
gcttccctctctcatcctctctgccgcttccccgctctccccaaactactctgtgccccgtcagatcgacctggactttggcgacagctacttctcgacgggcggcacgggcgtgctgctacttctgcttcctctcccacgcttgctgagctgatggctacatcagagccagtacaagagagtttggtggtgcactactcacaacctagtaggccccgggtcctccttgctgcttcaggaagtgtagccgctataaaatttgaaagcctttgccgtagcttctctgagtgggcggatgtccgagctgtggccaccacgtcatccttgcacttcgttgatagatcatctctaccaagtggcatcgttctttacactgatgacgatgaatggtctacctggaagaagataggagatgaagtcttacacatcgagctgcggaaatgggcagacgttatggtgattgctccattgtcagcaaataccctggctaagatcgccggtgggttatgcgacaacctcttgacctgcatcgtgagagcgtgggactacagcaaaccgctctttgttgccccagccatgaacacgttaatgtggaacaacccattcacggagcggcatcttcacacaatcaaccaactgggcatagccttgatccccccagttaccaaaaggctggcctgtggcgattacgggaacggcgcaatggccgaaacctcgcagatccatacttccgtgaggctcgcgtgcaagacgcaaccgcacgatgcgagcagttcactcgcgggtcctgtcagtaataaccggccatctagctgatgcagcggttggccacttgattgtcaagcttaggaatttgttttatctgcagtgtgcatctggagtgttgtaccagattttttttcaactagagtttgtgtgtattgaattagggggaaaggttgttgtcacatgataacaataacttccaatgatgactctattcagtttgtaattgtctgtgggagtacaattatgcagctgtattgtctgctacaatattgtttgtttgtgtgtgtgggagtggggggtgctgttgccacagagatagattcctccctgcccagt

SEQ ID NO: 68145 - protein, 220 aa, Glycine max
MATSEPVQESLVVHYSQPSRPRVLLAASGSVAAIKFESLCRSFSEWADVRAVATTSSLHFVDRSSLPSGIVLYTDDDEWSTWKKIGDEVLHIELRKWADVMVIAPLSANTLAKIAGGLCDNLLTCIVRAWDYSKPLFVAPAMNTLMWNNPFTERHLHTINQLGIALIPPVTKRLACGDYGNGAMAETSQIHTSVRLACKTQPHDASSSLAGPVSNNRPSS

SEQ ID NO: 68146 - DNA, 654 bp, Populus balsamifera subsp. trichocarpa
  CDS (1)..(654)
atggaatactcggaacctgtgacagcagagatggagacagcacaggttaatgctgtcgccgcggccgccggtcctaggaaacctaggattctactagcggcaagtgggagtgtagctgctattaaatttgggaatctttgtcattgtttttctgaatgggctgaagtgaaagcggttgctactagggcttctttgcatttcattgatagagctgcattgcctaaggatgttgtgctctacactgacgaggatgaatggtcgagttggaataagataggagatactgtgcttcatattgagttaagacggtgggctgatatcatggttattgctcctttatctgctaatacgcttggcaagattgctggggggttgtgtgacaatctgctgacctgcattgtccgagcatgggattacagcaagccactttttgttgcgccggctatgaacactttcatgtggagcaaccctttcacagaacggcatctcatgtcaattgatgagcttggaatttccttgatcccacctgtttcaaagaggctggcatgtggagattatgggaatggtgcaatggctgaaccttctctaatctactcaactgtaagactattcttggagtcacggagtcaagccggtgatagaagagttggttaa

SEQ ID NO: 68147 - protein, 217 aa, Populus balsamifera subsp. trichocarpa
MEYSEPVTAEMETAQVNAVAAAAGPRKPRILLAASGSVAAIKFGNLCHCFSEWAEVKAVATRASLHFIDRAALPKDVVLYTDEDEWSSWNKIGDTVLHIELRRWADIMVIAPLSANTLGKIAGGLCDNLLTCIVRAWDYSKPLFVAPAMNTFMWSNPFTERHLMSIDELGISLIPPVSKRLACGDYGNGAMAEPSLIYSTVRLFLESRSQAGDRRVG

SEQ ID NO: 68148 - DNA, 1077 bp, Triticum aestivum
  CDS (232)..(879)
agtcgaagccccgacgctccacagcggccagcgcctccagtcgctcccagttcccctccgcccgcggcgcgccgctcccggcagcctcggtcgctgccgccgcctccgcctccgcctaccgccggccgacgacgccctccgacccctcccgccgccgccgccgtcttcaaccgcttatttgcccacgctcctaccaaatcgcctctcagttgagcaatccaagtgaagcagatggctacatcagaaccggtacaggaaagctgggagctggaacccagtaggcctcgggtcctccttgctgcttcagggagtgtagctgctataaaattcgagagcctctgtcgtgtcttctccgagtgggcggaagtccgagctgtggcgaccaagtcatcattgcactttattgagagatcatctctgcctagcgacgtcattctttacactgatgatgatgagtggtctacctggacgaagataggagacgaggttctgcacatagagctgcggaagtgggcagacatcatggtgatcgcccccttatcagcaaacactctggccaagatcgctggtgggttatgcgacaacctcctgacatgcatagtgcgggcgtgggactacaagaagccgatcttcgccgctccagccatgaacaccttcatgtggaacaacccgttcacggcgcgccacatcgagacgatcaaccaactcgggatttccttggtcccacccaccacgaagaggctggcctgcggcgactacgggaacggcgcgatggctgagccttcacagatccatacgaccgtgaggctcgcgtgcaagtcacatacgttcggcacgggcaattcacccgcgatcccttccagcagccaccctgtctagccgatgcagtggtcgatatgttcacttcaggtgttcaagagcttagtgtttcgcgttttctgtgccggcccatgtctgggtgtaaggagtggagagtatcatcaggtgtttgtttgtcggtgatgtctgtgttaaccaacgtgtcgtacctatggaacatggatcagtatatttgttactgtaaaaaaaaaaaaaaaa

SEQ ID NO: 68149 - protein, 215 aa, Triticum aestivum
MATSEPVQESWELEPSRPRVLLAASGSVAAIKFESLCRVFSEWAEVRAVATKSSLHFIERSSLPSDVILYTDDDEWSTWTKIGDEVLHIELRKWADIMVIAPLSANTLAKIAGGLCDNLLTCIVRAWDYKKPIFAAPAMNTFMWNNPFTARHIETINQLGISLVPPTTKRLACGDYGNGAMAEPSQIHTTVRLACKSHTFGTGNSPAIPSSSHPV

SEQ ID NO: 68150 - DNA, 1218 bp, Xanthobacter autotrophicus Py2; identical to SEQ ID NO: 49748
  CDS (1)..(1218): transl_table=11

SEQ ID NO: 68151 - protein, 405 aa, Xanthobacter autotrophicus Py2; identical to SEQ ID NO: 49749

SEQ ID NO: 68152 - DNA, 1167 bp, Aquifex aeolicus VF5; identical to SEQ ID NO: 49354
  CDS (1)..(1167): transl_table=11

SEQ ID NO: 68153 - protein, 388 aa, Aquifex aeolicus VF5; identical to SEQ ID NO: 49355

SEQ ID NO: 68154 - DNA, 537 bp, Lactococcus lactis subsp. lactis Il1403
  CDS (1)..(537): transl_table=11
atgactaaaattacacttgcggtaacaggttcaattgcagcttacaaagcagcagatttaacttctttactgacaaaagagggacatgatgtgacagttttaatgacaaaaagcgctactcagttcatcactcctttaactctacaagttttgtccaaaaataaggttcacttggatattatggacgaagaacgtcctgaattggttaatcatattgatttagctaaaaatactgagcttttccttgttgcacctgcaactgctgatacaattagccgtttggcgcaaggccgagctgatgatattgtcacttctgtagcccttgctcttgaaccttctgtaccaaaatattttgcccctgcaatgaatactaaaatgtatcaacatcctttgacgcaaaaaaacattgagattcttaagaaaatagattataatatgattcaaccgaaaaaatctttgctcgcttgtggagattttggtgagggagcactcgccgacttacctgatattctatcggatttaaaaaattctttataa

SEQ ID NO: 68155 - protein, 178 aa, Lactococcus lactis subsp. lactis Il1403
MTKITLAVTGSIAAYKAADLTSLLTKEGHDVTVLMTKSATQFITPLTLQVLSKNKVHLDIMDEERPELVNHIDLAKNTELFLVAPATADTISRLAQGRADDIVTSVALALEPSVPKYFAPAMNTKMYQHPLTQKNIEILKKIDYNMIQPKKSLLACGDFGEGALADLPDILSDLKNSL

SEQ ID NO: 68156 - DNA, 546 bp, Streptococcus pyogenes M1 GAS
  CDS (1)..(546): transl_table=11
atgactaaacatattaccttagctgtttctggtagtatatctgcctataaagcagcagatcttacgagtcaattaactaaaattggctatgatgttcacatcataatgactcaggctgctacacaatttattacaccattaaccctgcaagtgttatcaaaaaatgctattcatttagatgttatggatgagcatgacccaaaagttatcaaccatatcgaattagcaaaacgcacagatttatttattgttgcacctgcctctgctaatactattgctcatctagcatatggattcgctgataatcttgtaacaagtgttgctcttgccctaccagctaccacaccaaaattaatagccccagccatgaataccaaaatgtatcaaaaccctattactcaagaaaatattaaacgcttatcgacaatagggtttacagaaattcctccaaaatctagcttattagcctgtggagataaaggacctggtgctttggctgatattgatgttatcttagctactattgatacgatttggaaactttaa

SEQ ID NO: 68157 - protein, 181 aa, Streptococcus pyogenes M1 GAS
MTKHITLAVSGSISAYKAADLTSQLTKIGYDVHIIMTQAATQFITPLTLQVLSKNAIHLDVMDEHDPKVINHIELAKRTDLFIVAPASANTIAHLAYGFADNLVTSVALALPATTPKLIAPAMNTKMYQNPITQENIKRLSTIGFTEIPPKSSLLACGDKGPGALADIDVILATIDTIWKL

SEQ ID NO: 68158 - DNA, 552 bp, Streptococcus pneumoniae TIGR4
  CDS (1)..(552): transl_table=11
atggcaaacattctcttggctgtaacgggttcaatcgcctcttataagtcggcagatttagtcagttctctaaaaaaacaaggccatcaagtcactgtcttaatgactcaggctgctacagagtttatccaacctttgacactacaggtactctcacagaatcctgtccacttggatgtcatgaaggaaccctatcctgatcaggtcaatcatatcgaacttggaaaaaaagcagatttatttatcgtggtacctgcaactgctaacactattgcaaaactagctcacggatttgcggacaacatggtaaccagtacagctctagccctaccaagtcatattcccaaactaatagctcctgctatgaatacaaaaatgtatgaccatccagtaactcagaataatctgaaaacattagaaacctacggctatcagctgattgctcctaaggaatccctactagcttgtggagaccacggacgaggagctttagctgacctcacaattattttagaaagaataaaggaaactatcgatgaaaaaacgctctaa

SEQ ID NO: 68159 - protein, 183 aa, Streptococcus pneumoniae TIGR4
MANILLAVTGSIASYKSADLVSSLKKQGHQVTVLMTQAATEFIQPLTLQVLSQNPVHLDVMKEPYPDQVNHIELGKKADLFIVVPATANTIAKLAHGFADNMVTSTALALPSHIPKLIAPAMNTKMYDHPVTQNNLKTLETYGYQLIAPKESLLACGDHGRGALADLTIILERIKETIDEKTL

SEQ ID NO: 68160 - DNA, 1206 bp, Sinorhizobium meliloti 1021; identical to SEQ ID NO: 49388
  CDS (1)..(1206): transl_table=11

SEQ ID NO: 68161 - protein, 401 aa, Sinorhizobium meliloti 1021; identical to SEQ ID NO: 49389

SEQ ID NO: 68162 - DNA, 1206 bp, Ralstonia solanacearum GMI1000; identical to SEQ ID NO: 49402
  CDS (1)..(1206): transl_table=11

SEQ ID NO: 68163 - protein, 401 aa, Ralstonia solanacearum GMI1000; identical to SEQ ID NO: 49403

SEQ ID NO: 68164 - DNA, 1206 bp, Agrobacterium tumefaciens str. C58; identical to SEQ ID NO: 49404
  CDS (1)..(1206): transl_table=11

SEQ ID NO: 68165 - protein, 401 aa, Agrobacterium tumefaciens str. C58; identical to SEQ ID NO: 49405

SEQ ID NO: 68166 - DNA, 1263 bp, Corynebacterium glutamicum ATCC 13032; identical to SEQ ID NO: 49414
  CDS (1)..(1263): transl_table=11

SEQ ID NO: 68167 - protein, 420 aa, Corynebacterium glutamicum ATCC 13032; identical to SEQ ID NO: 49415

SEQ ID NO: 68168 - DNA, 546 bp, Streptococcus pyogenes MGAS8232
  CDS (1)..(546): transl_table=11
atgactaaacatattaccttagctgtttctggtagtatatctgcctataaagcagcagatcttacgagtcaattaactaaaattggctatgatgttcacatcataatgactcaggctgctacacaatttattacaccattaaccctgcaagtgttatcaaaaaatgctattcatttagatgttatggatgagcatgacccaaaagttgtcaaccatatcgaattagcaaaacgcacagatttatttattgttgcacctgcctctgctaatactattgctcatctagcatatggattcgctgataatattgtaacaagtgttgctcttgccctaccagctaccacaccaaaattaatagccccagccatgaataccaaaatgtatcaaaaccctattactcaagaaaatattaaacgcttatcgacaatagggtttacagaaattcctccaaaatctagcttattagcctgtggagataaaggacctggtgctttggctgatattgatgttatcttagctactattgatacgatttggaaactttaa

SEQ ID NO: 68169 - protein, 181 aa, Streptococcus pyogenes MGAS8232
MTKHITLAVSGSISAYKAADLTSQLTKIGYDVHIIMTQAATQFITPLTLQVLSKNAIHLDVMDEHDPKVVNHIELAKRTDLFIVAPASANTIAHLAYGFADNIVTSVALALPATTPKLIAPAMNTKMYQNPITQENIKRLSTIGFTEIPPKSSLLACGDKGPGALADIDVILATIDTIWKL

SEQ ID NO: 68170 - DNA, 1260 bp, Xanthomonas campestris pv. campestris str. ATCC 33913; identical to SEQ ID NO: 49424
  CDS (1)..(1260): transl_table=11

SEQ ID NO: 68171 - protein, 419 aa, Xanthomonas campestris pv. campestris str. ATCC 33913; identical to SEQ ID NO: 49425

SEQ ID NO: 68172 - DNA, 1221 bp, Chlorobium tepidum TLS; identical to SEQ ID NO: 49428
  CDS (1)..(1221): transl_table=11

SEQ ID NO: 68173 - protein, 406 aa, Chlorobium tepidum TLS; identical to SEQ ID NO: 49429

SEQ ID NO: 68174 - DNA, 1221 bp, Brucella suis 1330; identical to SEQ ID NO: 49436
  CDS (1)..(1221): transl_table=11

SEQ ID NO: 68175 - protein, 406 aa, Brucella suis 1330; identical to SEQ ID NO: 49437

SEQ ID NO: 68176 - DNA, 543 bp, Leptospira interrogans serovar Lai str. 56601
  CDS (1)..(543): transl_table=11
atgtctaatcttaaaaaagaaatactcgttgctgtttcgggaagtattgccgcatacaagacgtgtgaacttgtaagaaatcttactaaggaaggttatccagtaagcgtaattatgacggcgaacgcgactaagtttgtgggtccgattacgtttgaagctttaaccggtaaaaaagtgcgtgtggatgaatatgaacaaggaatggctcatatagacgcaaaaaattccgcgtccgtcattgcgattgttcccgccacagcaaacataatcggtaaaatggcgaacggaattgcggatgatcttgtcacttctacttatcttgcggcgaattgtcctgtggttatcgcgcctgctatgaatccttttatgtatgctcatccttcagttcaaagaaacctaaaacgattgatcgaagacggtgtgattcttgcagatccttctgagggggtagttgtctgtggggacgaaggatatggaaagttagccgaaatttctataatacaaaaaatgatcttagatttataccagagaaatttttag

SEQ ID NO: 68177 - protein, 180 aa, Leptospira interrogans serovar Lai str. 56601
MSNLKKEILVAVSGSIAAYKTCELVRNLTKEGYPVSVIMTANATKFVGPITFEALTGKKVRVDEYEQGMAHIDAKNSASVIAIVPATANIIGKMANGIADDLVTSTYLAANCPVVIAPAMNPFMYAHPSVQRNLKRLIEDGVILADPSEGVVVCGDEGYGKLAEISIIQKMILDLYQRNF

SEQ ID NO: 68178 - DNA, 1227 bp, Shewanella oneidensis MR-1; identical to SEQ ID NO: 49440
  CDS (1)..(1227): transl_table=11

SEQ ID NO: 68179 - protein, 408 aa, Shewanella oneidensis MR-1; identical to SEQ ID NO: 49441

SEQ ID NO: 68180 - DNA, 576 bp, Drosophila melanogaster
  CDS (1)..(576)
atgaaacccgaacgtaatgtgatgatagcggccaccggaagtgtggccaccattaagttagcccagttaatccgagagctctccgacgagcgcctaccctttaagttccacctgaaagtacttattaccgaagcagccaaacacttctttgaactggagcagattcccgaaaatgtacccatttaccacaatcgcgacgagtggatcacctggaacaagcgaggagatcctgtactccacatagatctaggcaagtgggcggatttgttggtaatagccccactcagcgcaaactctctgtccaaaatggccaccgggatttgcgataatatcgtcatgtgtgtggtgcgggcctgggaccttgagaagccgctgctctttgcacctgcgatgaatacccgtatgtacgaccatccaataactcgggagcagatcgacaagctgaccagttggggctacaaggagataccctgcatatccaagactctgatgtgcggtgatactggcaacggcgccatggcggaggtacccacaattgtggaagcggtgttatccgcctttcagccgattaaatag

SEQ ID NO: 68181 - protein, 191 aa, Drosophila melanogaster
MKPERNVMIAATGSVATIKLAQLIRELSDERLPFKFHLKVLITEAAKHFFELEQIPENVPIYHNRDEWITWNKRGDPVLHIDLGKWADLLVIAPLSANSLSKMATGICDNIVMCVVRAWDLEKPLLFAPAMNTRMYDHPITREQIDKLTSWGYKEIPCISKTLMCGDTGNGAMAEVPTIVEAVLSAFQPIK

SEQ ID NO: 68182 - DNA, 1284 bp, Streptomyces coelicolor A3(2); identical to SEQ ID NO: 49442
  CDS (1)..(1284): transl_table=11

SEQ ID NO: 68183 - protein, 427 aa, Streptomyces coelicolor A3(2); identical to SEQ ID NO: 49443

SEQ ID NO: 68184 - DNA, 543 bp, Streptococcus agalactiae NEM316
  CDS (1)..(543): transl_table=11
atgattaaacgtattacactagccgtcaccggttcaatttcggcctataaagcagcagaccttacaagtcaattaactaaaattggctatgatgttcatatcataatgacacaagctgccacagaatttattacaccgttaactctgcaagtattatcaaaaaatcctattcatttagatgttatggatgagcataacccaaaaatcatcaaccatatcgaattagcaaaacgcacagatttatttatcgttgcacctgcctctgctaatactattgctcatctagcatatggcttcgctgataacatcgtaacaagcgttgctcttgctatgcctgatgaaactccaaaacttatcgcaccagcaatgaatacaaagatgtatcataatacaatcacccaacgtaacattgatattttgaaaaaaataggttatcaggaaattgaacctcgtattagtttgcttgcctgtggtgataccggtcaaggagccctagctgatatctctactatacttaaatgtatacaagaagttgcaaattag

SEQ ID NO: 68185 - protein, 180 aa, Streptococcus agalactiae NEM316
MIKRITLAVTGSISAYKAADLTSQLTKIGYDVHIIMTQAATEFITPLTLQVLSKNPIHLDVMDEHNPKIINHIELAKRTDLFIVAPASANTIAHLAYGFADNIVTSVALAMPDETPKLIAPAMNTKMYHNTITQRNIDILKKIGYQEIEPRISLLACGDTGQGALADISTILKCIQEVAN

SEQ ID NO: 68186 - DNA, 1371 bp, Corynebacterium efficiens YS-314; identical to SEQ ID NO: 49444
  CDS (1)..(1371): transl_table=11

SEQ ID NO: 68187 - protein, 456 aa, Corynebacterium efficiens YS-314; identical to SEQ ID NO: 49445

SEQ ID NO: 68188 - DNA, 1212 bp, Pseudomonas putida KT2440; identical to SEQ ID NO: 49446
  CDS (1)..(1212): transl_table=11

SEQ ID NO: 68189 - protein, 403 aa, Pseudomonas putida KT2440; identical to SEQ ID NO: 49447

SEQ ID NO: 68190 - DNA, 564 bp, Streptococcus pyogenes SSI-1
  CDS (1)..(564): transl_table=11
atgaaaggatggccaaacatgactaaacatattaccttagctgtttctggtagtatatctgcctataaagcagcagatcttacgagtcaattaactaaaattggctatgatgttcacatcataatgactcaggctgctacacaatttattacaccattaaccctgcaagtgttatcaaaaaatgctattcatttagatgttatggatgagcatgacccaaaagttatcaaccatatcgaattagcaaaacgcacagatttatttattgttgcacctgcctctgctaatactattgctcatctagcatatggattcgctgataatattgtaacaagtgttgctcttgccctaccagctaccacaccaaaattaatagccccagccatgaataccaaaatgtatcaaaaccctattacccaagaaaatattaaacgcttatcgacaatagggtttacagaaattcctccaaaatctagcttattagcctgtggagataaaggacctggtgctttggctgatattgatgttatcttagctactattgatacgatttggaaactttaa

SEQ ID NO: 68191 - protein, 187 aa, Streptococcus pyogenes SSI-1
MKGWPNMTKHITLAVSGSISAYKAADLTSQLTKIGYDVHIIMTQAATQFITPLTLQVLSKNAIHLDVMDEHDPKVINHIELAKRTDLFIVAPASANTIAHLAYGFADNIVTSVALALPATTPKLIAPAMNTKMYQNPITQENIKRLSTIGFTEIPPKSSLLACGDKGPGALADIDVILATIDTIWKL

SEQ ID NO: 68192 - DNA, 555 bp, Enterococcus faecalis V583
  CDS (1)..(555): transl_table=11
atgaaaactattttattaggcgtctctggcagcatttctgcatataaagcagcagatattacaagtcaactagctaagcttggctacaatgtggaaattttaatgactaaaagtagcacagcgttcatcactccgctgaccttacaatcactttctaagaatccagtgcatacggatgtcatgatggaaattgatcccagtaaaattaatcacattgagttagctaaaaaagcggatttatttttagtagcacctgcttcggccaatacaattgggaaattagcccatgggattgccgacgacttattatcaacagttgctttggcactttatcctgaaacaccaaaaattattgcgcccgcgatgaatacgtatatgtaccaaaaccccattgtccaacgaaatattggcattttaaaagaagtcggctatcaagaaataatcccacgtgaagctctattagcttgtggcgattatggtcgtggcgcacttgccactgttgaagatattcttcaaacagtgatgaaaattttagcatctgataacaaggagtaa

SEQ ID NO: 68193 - protein, 184 aa, Enterococcus faecalis V583
MKTILLGVSGSISAYKAADITSQLAKLGYNVEILMTKSSTAFITPLTLQSLSKNPVHTDVMMEIDPSKINHIELAKKADLFLVAPASANTIGKLAHGIADDLLSTVALALYPETPKIIAPAMNTYMYQNPIVQRNIGILKEVGYQEIIPREALLACGDYGRGALATVEDILQTVMKILASDNKE

SEQ ID NO: 68194 - DNA, 1176 bp, Coxiella burnetii RSA 493; identical to SEQ ID NO: 49466
  CDS (1)..(1176): transl_table=11

SEQ ID NO: 68195 - protein, 391 aa, Coxiella burnetii RSA 493; identical to SEQ ID NO: 49467

SEQ ID NO: 68196 - DNA, 1230 bp, Nitrosomonas europaea ATCC 19718; identical to SEQ ID NO: 49474
  CDS (1)..(1230): transl_table=11

SEQ ID NO: 68197 - protein, 409 aa, Nitrosomonas europaea ATCC 19718; identical to SEQ ID NO: 49475

SEQ ID NO: 68198 - DNA, 564 bp, Rhodopirellula baltica SH 1
  CDS (1)..(564): transl_table=11
atggaacccaagacgcggcggattctgttggcgattggtggtggaatcgccgcgtacaaagcggccgacctgtgcagcaaattggcacaggctggccatcaagttcaggtggtcacatcccgagcggccaccgaattcatcggtgatgcgaccttggcggcgctttcgggccgtccggtcgttcatgaagtctttgatgcgagatttccgctgggcagccacatcgagctgactcgcgaaattgacgcgatggttgtggcacccgcgaccgcgaatttgctggctcagttcgctcagggaatggcgtcggatctgatcagcacgttgtatctgcagaacaccagtccggtgttgctggcacccgcgatgagcgatccgatgtggaaccacgtggcggttcagcgaaatgtgcaaacgcttcaggaggatggttgccatctggtcggacccgaggacggttggctcagttgccgcgtcaaaggtaccggtcgtatgagtgaaccagtcaccattttgaagacgttggaagcattgttcaccgatcgcgcagcgcaaatcgactga

SEQ ID NO: 68199 - protein, 187 aa, Rhodopirellula baltica SH 1
MEPKTRRILLAIGGGIAAYKAADLCSKLAQAGHQVQVVTSRAATEFIGDATLAALSGRPVVHEVFDARFPLGSHIELTREIDAMVVAPATANLLAQFAQGMASDLISTLYLQNTSPVLLAPAMSDPMWNHVAVQRNVQTLQEDGCHLVGPEDGWLSCRVKGTGRMSEPVTILKTLEALFTDRAAQID

SEQ ID NO: 68200 - DNA, 1209 bp, Bordetella parapertussis 12822; identical to SEQ ID NO: 49486
  CDS (1)..(1209): transl_table=11

SEQ ID NO: 68201 - protein, 402 aa, Bordetella parapertussis 12822; identical to SEQ ID NO: 49487

SEQ ID NO: 68202 - DNA, 1182 bp, Chromobacterium violaceum ATCC 12472; identical to SEQ ID NO: 49496
  CDS (1)..(1182): transl_table=11

SEQ ID NO: 68203 - protein, 393 aa, Chromobacterium violaceum ATCC 12472; identical to SEQ ID NO: 49497

SEQ ID NO: 68204 - DNA, 1245 bp, Vibrio vulnificus YJ016; identical to SEQ ID NO: 49506
  CDS (1)..(1245): transl_table=11

SEQ ID NO: 68205 - protein, 414 aa, Vibrio vulnificus YJ016; identical to SEQ ID NO: 49507

SEQ ID NO: 68206 - DNA, 618 bp, Strongylocentrotus purpuratus
  CDS (1)..(618)
atgacaagcacttccggagagccttccgtgacggaaggggacgagtcttcaagttgtagcagtccaaagaaacatgtcttgcttggctgcactgggagcgtagctgctattaagattcctcttctagtccaggaactcttgaagacaaaccaagtggaggtacgtgtggtggcaacggagcacgccatcaaattctttgacatggcaacgttaccatcagatgttaaactttacagggatcaagatgaatgggaggcctggaagaagatctcagatccggtcctgcatattgagctgagacgatgggctgatgtgatggtcattgctcctttagatgctaacacattaggcaagatagccagtggtatctgcgataatcttttgacatgtgtcgtcagggcgtgggacatgaagcgccctctgttgttctgtccatcgatgaacacccacatgtgggagcaccccatcaccgagcgccaggtttcagagctgacctccttgggttattctgagatcccttgcgtggagaaactcttggcttgtggagacaaaggttttggagctatggcggaggtcaggacaatagtagacagagtgaaggatatctgcaacggatga

SEQ ID NO: 68207 - protein, 205 aa, Strongylocentrotus purpuratus
MTSTSGEPSVTEGDESSSCSSPKKHVLLGCTGSVAAIKIPLLVQELLKTNQVEVRVVATEHAIKFFDMATLPSDVKLYRDQDEWEAWKKISDPVLHIELRRWADVMVIAPLDANTLGKIASGICDNLLTCVVRAWDMKRPLLFCPSMNTHMWEHPITERQVSELTSLGYSEIPCVEKLLACGDKGFGAMAEVRTIVDRVKDICNG

SEQ ID NO: 68208 - DNA, 591 bp, Nasonia vitripennis
  CDS (1)..(591)
atggcatcctcatcgaagaagaaagtgctggtgggctgcacgggaagcgtggcgacgataaagctgccccagctggtgcagaagctctggcagcgcaacattgaggtgagagtcgtggtgaccgaacgagcaaaacacttcctgaaggaggctgaattaccggctggctgtcaggtgctcagcgatacggtcgagtgggccgcatggcaggatcgaggtgatcctgttctgcatatcgacctggccaagtgggccgatgtcttcttgctcgcgcctctcgatgccaacactctcggcaaactcgccggcggcatctgtgacaatatactgacgtgtgtggcacgtgcctgggatccccataaaccgctactcttctgcccagctatgaacaccaagatgtgggaacaccccgttactgctccgcaggtggcgttgctgaaatcctggggttacaaggaagtgccgtgcatctccaagaacctcatgtgcggggacacgggcatgggcggtatggccgaggtagataccatcgtacaggcgacactgcgttcactcaatttttgggactcttactcggatttacgccgttag

SEQ ID NO: 68209 - protein, 196 aa, Nasonia vitripennis
MASSSKKKVLVGCTGSVATIKLPQLVQKLWQRNIEVRVVVTERAKHFLKEAELPAGCQVLSDTVEWAAWQDRGDPVLHIDLAKWADVFLLAPLDANTLGKLAGGICDNILTCVARAWDPHKPLLFCPAMNTKMWEHPVTAPQVALLKSWGYKEVPCISKNLMCGDTGMGGMAEVDTIVQATLRSLNFWDSYSDLRR

SEQ ID NO: 68210 - DNA, 975 bp, Anopheles gambiae str. PEST
  CDS (363)..(938)
aaaagggtagcttcccgctggaccacggcggccagtgccgaaagctgatgctgttctatatgcgctgcctgcgagagaacgccgacgataattctgcctgccgggaggaatcgaaagcctacctgcagtgccgcatggatcacgatctgatggcacgggaagacttctccaagctaggctacagcagtgagaaaagcagtgaaaacaaaccggaacaatcttaacatccctaaacaccaaaaaccagaaatagagtttaagccccccgggtctcgtgtagtgcattttgtcattgaacgttgttagaagaagctctgtgaagaataccctcgataatagtaaaccaatagcaccgaatcgaaatgaaggtgaagaaaaacatcctcgtcggctgtaccggaagtgtggccacgatcaagcttcccctgctggtggaaaaactgctccagctgaccgagttcgaggtggaagtacacgtgatcgtaaccgagcatgcccggcatttcttctcgccgcaggatctgccggccgcggtcacactccacacggacgcggaagagtggacgagctggcagaagcggggcgacccggtcctgcacatcgagctgggcaaatgggccgacctgctcgtgattgcaccgctcgatgctaacagcctcgccaagatggccaacgggctgtgcgataatttgctgctctgtacgacacgcgcctgggatccgacgaaaccgttgctcttctgtcccgcgatgaacacgcgcatgtgggaacatccgattacggcgacacagatcggtacgctcaagtcctggggccaccgggaggtgccgtgcattgcgaaaacgctcatgtgcggcgatacggggctgggtgctatggccgaagtggatacgatcgttagcacgatcagggacacgctgtcgatggagcagagttgagatttaatggaataaatggttatgtttctttttttct

SEQ ID NO: 68211 - protein, 191 aa, Anopheles gambiae str. PEST
MKVKKNILVGCTGSVATIKLPLLVEKLLQLTEFEVEVHVIVTEHARHFFSPQDLPAAVTLHTDAEEWTSWQKRGDPVLHIELGKWADLLVIAPLDANSLAKMANGLCDNLLLCTTRAWDPTKPLLFCPAMNTRMWEHPITATQIGTLKSWGHREVPCIAKTLMCGDTGLGAMAEVDTIVSTIRDTLSMEQS

SEQ ID NO: 68212 - DNA, 762 bp, Magnaporthe grisea 70-15
  CDS (1)..(762)
atggtccgcacgcagcagccacagcagcagcaggatgccactgcagtctcggccttatctgcatcaatatcagatggcaaaaagcacctgctgctatccgcgtcgggttccgtcgccaccataaagcttcccaacatcctcaaggctctcggggaggcccacgatccctcgcggctctcaatccgcgtggtcctcacacattctgccgagcactttctggccggtcaggcagaggaacagcctacactggaagccatcaggtccattccgtgcgtcgacgccgtgtatggagacgccgacgagtggggtccgcggccgtggaagaggggggaggggattctgcacatagaattacgaaaatgggccgacatgttggtcatcgccccgctgagcgcaaacaccctggccaagatcgcaaatggcatctgcaacaatctcctgaccagcgtcgtgcgcgcctgggacacggacggcgtcgtggaaggacgcaggaaacgcatcaccgtatgccccgccatgaacacggccatgtggcggcatcccatcacggccaagcagatccgcacgctggagaaggattggggggttgcgagtgcgcaaggtgagagcgatggcggttggttcgaggtcttgccgccacaggagatgaaactggcttgtggcgatgttggagtaggtgggatggtggactggaaccaaattgtaaaggctatagagttgacgctagatttgagccaagaccggctaggacagccgacttga

SEQ ID NO: 68213 - protein, 253 aa, Magnaporthe grisea 70-15
MVRTQQPQQQQDATAVSALSASISDGKKHLLLSASGSVATIKLPNILKALGEAHDPSRLSIRVVLTHSAEHFLAGQAEEQPTLEAIRSIPCVDAVYGDADEWGPRPWKRGEGILHIELRKWADMLVIAPLSANTLAKIANGICNNLLTSVVRAWDTDGVVEGRRKRITVCPAMNTAMWRHPITAKQIRTLEKDWGVASAQGESDGGWFEVLPPQEMKLACGDVGVGGMVDWNQIVKAIELTLDLSQDRLGQPT

SEQ ID NO: 68214 - DNA, 597 bp, Apis mellifera
  CDS (1)..(597)
atggcatgcacctttaaaaagaagattttgattggttgtactggtagtgttgcaacaattaaattaccacaattagtagataaattatggcgtaataattttgaagtgagaatagtagttactgaaaaagctaagcatttcttgaaagaggcagaactgcctccaggaattcaagttttatctgatacagtggaatgggctgcttggcaagacaggggtgatcctgtattgcatattgatttagtgaaatgggccgatttatttttaattgctccattagatgctaatactcttggcaaaatagctagtggtatatgtgataatatattaacttgtgttgcacgtgcctgggatccattaaagcctttggtcttttgtcctgccatgaatacaaaaatgtgggaacatcctgttactgcaacacagatagctctattgaagtcttggggatacaaagaagttgcatgcatttctaaaactcttatgtgtggtgatgtaggaataggtggaatggcagaagtagataccattgttcaaactacattaaggttgcttaatccttgggacccatattctccaccggatatgcgcctttaa

SEQ ID NO: 68215 - protein, 198 aa, Apis mellifera
MACTFKKKILIGCTGSVATIKLPQLVDKLWRNNFEVRIVVTEKAKHFLKEAELPPGIQVLSDTVEWAAWQDRGDPVLHIDLVKWADLFLIAPLDANTLGKIASGICDNILTCVARAWDPLKPLVFCPAMNTKMWEHPVTATQIALLKSWGYKEVACISKTLMCGDVGIGGMAEVDTIVQTTLRLLNPWDPYSPPDMRL

SEQ ID NO: 68216 - DNA, 1635 bp, Candida glabrata CBS 138
  CDS (1)..(1635)
atggggtccgatgatgatagggatatgcgaaaggatgtgcagatggagcaagtgcctgtgtcgatactgaccaacaagttacatatatctggtactgggcctgtgcccgtgcgtgacctgcggtcttcagagaagaaagttggtggcggaatactgaatacaagcgcgaaggagaacagctcggtgccgatggacaacgagtttctcagtcagaacaagagtgtggatgggaacgggctggtgtctatgtcgtctggtgacgggagagtgatcggttctcggaatatatctttctcttcggggataatacagtttcccaacggtaacgatgacggcgcatcgatcatttcggatgctaacgggatcacagtggagcggaaagcttcgattacttcaccaaaatctactatatcattcacagttgatgaaaatgaaaagacatcccatcataggtattccatctctagcaagcccgggaagtccacgacatccatagacagtttagctattgagggtaagaacaacagtatagatgcaaaggattcggtaaaaggtaatacaaaggatgaagttgaggccgtgcccgaacagaaaaactctatagtgaatatgcctggtgacttcatattctttgagtctaggaagcatgaacataattctaacgagacagatggcaaagaaaagagcttgaaaagtaagaaaagtggcatttcaggtgctagcggttcaaaagaggttattggatccacttctggccctcaaattcccttttctgagtatttcctaagacaagatgataagaaatttcatatccttataggtgctactggatctgttgcaactataaaggtgcccttgattatagataagctgctcaaattatacacaccagataaaatttcgatacaactaattgtaaccaagccagctgaacatttcttgaatggtttaaagatttctacccatgtcaagatctggagagaagaggatgtgtggtcggattgcaaaaagatgggagatatgatactgcatcatgaacttaggaaatgggctgatatatttctgatagtcccattgtcagctaacagtctagcaaaaattgcaaacggtatcagcaataacttactaacagcagtactgagagattggtctcctaatacaccaatatacgcagcacctgcaatgaatactttcatgtatatcaatcccatgaccaaaaaacatctcaatatactagcatctgatatgccatatatcacagtcttgaagcctgtcgagaaagtcctaatttgcggcgatattggtatgggtggtatgagagaatggtccgatatagttgaaattgtaaggaagaagattaatgaaatcaaaaaagctagggatgaggatactacaacaccagaaaaagatgaagatgaagacgaggaggaggatgaagatgaagatgaagatgaagatgaggatgaggatgaggatgatagctttagaaagaatgagactgattcagaggatgatgatgacgatgacgaagaagaagaagatgatgatgatgacgacgaagatgatgaagatgggcataatgttgacaaagatagaatgatattaaaagaagaatctgaatccaaacctatatga

SEQ ID NO: 68217 - protein, 544 aa, Candida glabrata CBS 138
MGSDDDRDMRKDVQMEQVPVSILTNKLHISGTGPVPVRDLRSSEKKVGGGILNTSAKENSSVPMDNEFLSQNKSVDGNGLVSMSSGDGRVIGSRNISFSSGIIQFPNGNDDGASIISDANGITVERKASITSPKSTISFTVDENEKTSHHRYSISSKPGKSTTSIDSLAIEGKNNSIDAKDSVKGNTKDEVEAVPEQKNSIVNMPGDFIFFESRKHEHNSNETDGKEKSLKSKKSGISGASGSKEVIGSTSGPQIPFSEYFLRQDDKKFHILIGATGSVATIKVPLIIDKLLKLYTPDKISIQLIVTKPAEHFLNGLKISTHVKIWREEDVWSDCKKMGDMILHHELRKWADIFLIVPLSANSLAKIANGISNNLLTAVLRDWSPNTPIYAAPAMNTFMYINPMTKKHLNILASDMPYITVLKPVEKVLICGDIGMGGMREWSDIVEIVRKKINEIKKARDEDTTTPEKDEDEDEEEDEDEDEDEDEDEDEDDSFRKNETDSEDDDDDDEEEEDDDDDDEDDEDGHNVDKDRMILKEESESKPI

SEQ ID NO: 68218 - DNA, 1632 bp, Kluyveromyces lactis NRRL Y-1140
  CDS (1)..(1632)
atgcctgaaggagtgacgggggactctgtgaagccagtatccatcttgactaaccggtcaaactccaataccagcactgtttccgatgctggtgaaggaagaaatgtaagtttaggcaagatagaagagatttctggacgctgtggaccagctagacacccaaattatgaacctgtgaacggtcacgattatgtgaatccccagaagcttattcaaaagttgcagttggtgactaagtcttctgagaaagaaggcgaaagggattcagacagagatgtacttggtgagagaagagaacaaggaggatcacatggaccgttaaggacacccttgactgcaacatcagtatcattcacggttcccgagcatcaggataaagtcattgcgcataggctttctatttccacaagaccctcatcgaccaaattgggcactccaaccacagtagcctcttctagcgaagctcctcccaccatcacaccagtgaattctatcagttccacaactcgtgaaccggacacgggtcatgttaccaacacgtcaacggcggctactaatactgccaatacttctggagctggatcatctcgtcagaactctgtgcacatacctggtgatttcatctatttcgaagctaaaccaaataacgggacgcgcaacggtggtgatggcgcagtgtcccctaaaatgacaggtgtcctggaccgtgaactatcaccctctgccacgtctcttgattataatgaccccatcgctgccgtcgccgccaagaaggctactaccaagaaacgaatcagtgaagaggaaccacacgttccttttaccgaattgtttcaaaaagaggatgatgaaaaagtacatattctaataggtgcaacggggtctgtcgccaccattaaggtaccgatgatcatcgataaattgttcaagatatatggggaagacaaagtgtcgatccagctagtacttacgaaacacgcggaacatttcttgaaaggtgccaagatcaacaaagaggtcaagatatggagagatgaagacgaatggtatgggttcaaaagaatgggagatcccgtattgcacacggaacttagaaaatgggctgatatcttcgtaatagctccgctaagtgcgaataccttggctaaactagccaacggtatatgtgataacttattgacgtgtttgctacgatcctggaaatcgaacgtaccggtgatgctcgcgccagcgatgaacacatttatgtatattcatcctgtgacgaaaaagcatttgaaaatgttacaagaagattatccatatatagaggtgttaaaaccggtagagaaggttttagtatgtggtgacatcggaatgggaggtatgagagaatggaatgagattgtcgaaatcattacgaagagacttcatctaatactgggagaaaccaaggaagatgaggaccgtgatgaagagggacgtgatgaggacgaagatgaggatgaagatgaggatgaggatgaagatgaggatgaagatgaagatgaagatgaagatgaagatgaggatgaggatgatgacgacgacgatgatctttacgaggaagaaactagatctcaggaagatcaaacatccaagaaaagtaaatga

SEQ ID NO: 68219 - protein, 543 aa, Kluyveromyces lactis NRRL Y-1140
MPEGVTGDSVKPVSILTNRSNSNTSTVSDAGEGRNVSLGKIEEISGRCGPARHPNYEPVNGHDYVNPQKLIQKLQLVTKSSEKEGERDSDRDVLGERREQGGSHGPLRTPLTATSVSFTVPEHQDKVIAHRLSISTRPSSTKLGTPTTVASSSEAPPTITPVNSISSTTREPDTGHVTNTSTAATNTANTSGAGSSRQNSVHIPGDFIYFEAKPNNGTRNGGDGAVSPKMTGVLDRELSPSATSLDYNDPIAAVAAKKATTKKRISEEEPHVPFTELFQKEDDEKVHILIGATGSVATIKVPMIIDKLFKIYGEDKVSIQLVLTKHAEHFLKGAKINKEVKIWRDEDEWYGFKRMGDPVLHTELRKWADIFVIAPLSANTLAKLANGICDNLLTCLLRSWKSNVPVMLAPAMNTFMYIHPVTKKHLKMLQEDYPYIEVLKPVEKVLVCGDIGMGGMREWNEIVEIITKRLHLILGETKEDEDRDEEGRDEDEDEDEDEDEDEDEDEDEDEDEDEDEDEDDDDDDDLYEEETRSQEDQTSKKSK

SEQ ID NO: 68220 - DNA, 1680 bp, Debaryomyces hansenii CBS767
  CDS (1)..(1680)
atggtttcagaaaatggtgctccaaatcgtaaggacgcagaattgtcaaaaaacgaaattaaaaaggaacaaaataccaatagcgaatcaaagtcatcctcgaccccccaagatccaccgccgtttgtcagagcaatatcgaatttgagatgtccatcgccaccacctatattaaataacagcaataataataacgcaacgaagaaggctgcatcttcatcgccaattctgggaaattcaatgtcgatgtctactccaaatattacccagcaaagggaaacgattccggcgggaggtgcagttttgaaagagaaggaaaaagtagctaatcagagtgcaacttcaataatacccccgcagggccatgaaccgtctttcaatgttcccctggtgcgggagccaggatcgagtgtcaacttcaatcattatataagcccaatttcatcaccagcaggatcccatgttacggggtccaacaattcgttaactagtttggactatgtatcgaaccctccatcgcaaagcgctcatcataaggttccatcggttcacgctcatttttatgtcgatgaaactgtaaaaccgggaaaagcaataaatagatcaagaagcagctctgctagtgattaccctcctgcttcattaccagctaacggcacaaggaaatcctccaaaaaggagaaaggaaatgatctgaatttatttgcacctccaagtatagacagtgtgcttggacctaacgagcaaaatagcaatatagatccaagacttcctcaagatgatggcaaattgcatgtattattaggtgtatgtggtgctttgtctacgattaaaattaaactaataataaacaagttggtcgagatatatacgccggataaaatatcgatccagataatattaactaaatcgagtgagaattttattcctcaagagatgttgcatcatttagaaaataataaaaggatccgcgtttggagagattctgatgaatggaatacctggaaaacaagactggatcctgttttgcatatcgaattacgtcgttgggccgatatcttaatcgtctcacctttaactgctaacactttatctaagatttcattaggattatgtgataacttattaaccaatgttatacgagcatggaatacctcatttcctattttgctagctccttctatggttagtgcgtcatataatgctgttacaactaagaggcagttacgattaatttcagaagaaatgccatggatagaattcttgaaacctgtagagaaagttgtgggaagttatggtgaaataggaatgggtggtatgatggattggaatgagattgtcaatcgaatcgtattaaagttgggtggttatccagatgaagaagatgaagaagataatgaagctgaagatgaagaaaagaaagatgataacgaagaagcaattatggatgacgatgatgacgatgacgatgacgatgatgatgatgatgatgatgatgatgatgatgatgatgatgatgatgatgatgatgatgacgacgatgatgacgatgatgatgatgacgacgatgatgatgacaacgatggtgatgataacactgagaataagaattctgtatctcaaactgcagaaaacttacaatctttaattattgaagaggaagaatctaataacacttaa

SEQ ID NO: 68221 - protein, 559 aa, Debaryomyces hansenii CBS767
MVSENGAPNRKDAELSKNEIKKEQNTNSESKSSSTPQDPPPFVRAISNLRCPSPPPILNNSNNNNATKKAASSSPILGNSMSMSTPNITQQRETIPAGGAVLKEKEKVANQSATSIIPPQGHEPSFNVPLVREPGSSVNFNHYISPISSPAGSHVTGSNNSLTSLDYVSNPPSQSAHHKVPSVHAHFYVDETVKPGKAINRSRSSSASDYPPASLPANGTRKSSKKEKGNDLNLFAPPSIDSVLGPNEQNSNIDPRLPQDDGKLHVLLGVCGALSTIKIKLIINKLVEIYTPDKISIQIILTKSSENFIPQEMLHHLENNKRIRVWRDSDEWNTWKTRLDPVLHIELRRWADILIVSPLTANTLSKISLGLCDNLLTNVIRAWNTSFPILLAPSMVSASYNAVTTKRQLRLISEEMPWIEFLKPVEKVVGSYGEIGMGGMMDWNEIVNRIVLKLGGYPDEEDEEDNEAEDEEKKDDNEEAIMDDDDDDDDDDDDDDDDDDDDDDDDDDDDDDDDDDDDDDDDDDDDNDGDDNTENKNSVSQTAENLQSLIIEEEESNNT

SEQ ID NO: 68222 - DNA, 1824 bp, Debaryomyces hansenii CBS767
  CDS (1)..(1824)
atgaatcagtcttcttcagataagtatacactggaaggtatgccatcagaaccacctcgaccacggcaatctctgcaactacaggttgatggtgagaatgtgaaaccatcgcaatctgttacttttggtgatttggataaccaagaaaaattacgtaggttcactatctcatcacagccatcgtcagtcaatctagcacactctaaaaatccagagtctttgccttcatctagaaaaacatcattacaaggaaatcctaatataactaattctagtagaaatagttctacaacaagtgaaatattccaattctttgcaaataatcagacatatgccgtaaagcctcaacaacaagtgtccacaagcacgacacaaggttatatcacaccaagcaatcaatcttcaggagtcaactcacctgtgttggagacaccaccgcatctaaagagagggtatacattcgatgagtctagtcataaacctacaagacttagttcaccttcacctcctccattatcgcaagctaactttgcgtcgctgcaagaattccaacaagcaccgcatccaatcaatataaccaataataacagcctgcctcgcggatcttgtaatataaaaaaatcgaccaaaacagtagttgcatcgccaagtggacctccagttccatttcaacagtatttgacgaagtcggatgatgagaagatccatatattgctaggatgtacaggctcggtagcaactatcaaagttccgatgatagtagataaattattcaatatttacggcaagtcgaaaatatctattcagttagtagtgaccaaatcggctacgcattttttaaagggattgaagatccatagtgatgttaagatttggagggatgaagatgaatgggcgaattataatgaacataacatcgcaaccacaactatttcaactaataatgtatcctcgtctagaaaacctaagaatccatttgataatttgatcttgcataacgaattaagaaaatgggcagatatctttctaattgcacctctttcagccaacacattggccaagattacgaatggtatagctgataatttgttgacatcgattattagatcttggagtcctattaatacgacaatggcttctaccaatgttaataaaaattcggtaaatgtcaaaaagccgatactagtggcacctgccatgaatacacatatgtatatccacccaattactgcaaaacaactattattattgtcatcgccagagtacggttttggtattgaagtattgaaaccagttgaaaaggtattagtttgtggagatatcggtatgggtggtatgagggaatggctggatattgtagatattttaagacgaaggattaattctatcaattatgtcagtgatggtaagagaatcattgccaagaaggatgaagatgaaagagatgctgatgaagatgacgatgaagaagaagaaggtaatgatgatgatgatgacgatgatgatgatgatgacgatgatgacgatgatgacgatgatgacgatgatgacgatgatgacgatgatgacgatgatgacgatgatgagaacgaagaggttgatgatggagatgatgataataatggtagtgtcaatggtcagtctactacgttaaaacgtacctccgatacagataaggtctccaaagagaatgatgacatgatcttcgaaatacaggataatgatgcaaaagaagctcaacgagatgcgactgagaaatcatcaagcaacaactattatattagaaccgataaaattcctgtcgaaacacaaaatattgtatag

SEQ ID NO: 68223 - protein, 607 aa, Debaryomyces hansenii CBS767
MNQSSSDKYTLEGMPSEPPRPRQSLQLQVDGENVKPSQSVTFGDLDNQEKLRRFTISSQPSSVNLAHSKNPESLPSSRKTSLQGNPNITNSSRNSSTTSEIFQFFANNQTYAVKPQQQVSTSTTQGYITPSNQSSGVNSPVLETPPHLKRGYTFDESSHKPTRLSSPSPPPLSQANFASLQEFQQAPHPINITNNNSLPRGSCNIKKSTKTVVASPSGPPVPFQQYLTKSDDEKIHILLGCTGSVATIKVPMIVDKLFNIYGKSKISIQLVVTKSATHFLKGLKIHSDVKIWRDEDEWANYNEHNIATTTISTNNVSSSRKPKNPFDNLILHNELRKWADIFLIAPLSANTLAKITNGIADNLLTSIIRSWSPINTTMASTNVNKNSVNVKKPILVAPAMNTHMYIHPITAKQLLLLSSPEYGFGIEVLKPVEKVLVCGDIGMGGMREWLDIVDILRRRINSINYVSDGKRIIAKKDEDERDADEDDDEEEEGNDDDDDDDDDDDDDDDDDDDDDDDDDDDDDDDDDDENEEVDDGDDDNNGSVNGQSTTLKRTSDTDKVSKENDDMIFEIQDNDAKEAQRDATEKSSSNNYYIRTDKIPVETQNIV

SEQ ID NO: 68224 - DNA, 1467 bp, Yarrowia lipolytica CLIB122
  CDS (1)..(1467)
atggcgaaaccgaccttcaaaatcgaaacgccccacccgtccaagtttctcgacgacaagggactcgacttccgcaaggagcacccgtcgcagcagcagggagacaagcctcagggcatcatgcagaaaagcaacctggcggcgtcgctggactcgctggacgaccccaaggaccagctcaagcgtgagctgagccgcgactcggccaacgagattcacattgcgctgcccgaaccccggtcgcggcagcccagcatcatcgacacctcggtcaagcacgccaaacaacccagcgtgcacgcccatttcaagctcgacgacattgaccagcacgccaacacccgcagccggtcggggtctgccagcggccgcaaccagaccgtctcgccaacccagcaaacccccaaacaaatctccattgtcgaaagcaccctcagtaacccggctggaggccaccctccccccacagagattcccatcgcaaggcgccagtccacggctgtgggcgaagacacgacccagcagggagacccacggttgccccaggacgacggcaagatccacattctgctgggcggtacggggtcggtgtcaacctccaagctgcgtctcatagtcaacaagctggaggagatttacggacgcaatcgagtggcgatccagattgtgctcacctcggcggctgaacactttgtcagccgcggcgagttccatacagacgtgattctgtggcgagacaaggacgagtggtcgacctggaagtcccggtcggaccccgtactgcacattgagctcagacggtgggccgacattctcgtcatctgtcctctgtccgcaaacaccctgtccaaaatcgccattggcctttgcgacaacctgcttaccaatgtcgtgcgagcatggaacacacagtaccccattctggtggctccttccatgacgtcgtatgcctataactcacccgtgaccaagcgccatctcaaggttatcaaggaggaaatgccctggatcgaggtacttcgaccagtcgaaaaggtggtgggctcgtacggagagattggcatgggaggcatgatggactggaacgagattgttgacaagattgtgctcaagctcggtggctacccggaggaagaggatgacgacaacggagacgatgacgataatggagacgacgaaaacggcgacgatatcgatctcgacaacgttgacaatgacgacgatgacaacgacgacgatgatgatgataacgatgacgacgacgatgacgacgataacggagatgatgacgatgacctgagagccaaacgagaacgccgtcagacccgaaaggccctcaacaagctggactacgactacgacgaggacgagatggataaagtcatcaacaagttgtctcttgcagatcaggatgagctgatgaagcgaaagtttagtttacgcgagagttccagtttcaccgggtag

SEQ ID NO: 68225 - protein, 488 aa, Yarrowia lipolytica CLIB122
MAKPTFKIETPHPSKFLDDKGLDFRKEHPSQQQGDKPQGIMQKSNLAASLDSLDDPKDQLKRELSRDSANEIHIALPEPRSRQPSIIDTSVKHAKQPSVHAHFKLDDIDQHANTRSRSGSASGRNQTVSPTQQTPKQISIVESTLSNPAGGHPPPTEIPIARRQSTAVGEDTTQQGDPRLPQDDGKIHILLGGTGSVSTSKLRLIVNKLEEIYGRNRVAIQIVLTSAAEHFVSRGEFHTDVILWRDKDEWSTWKSRSDPVLHIELRRWADILVICPLSANTLSKIAIGLCDNLLTNVVRAWNTQYPILVAPSMTSYAYNSPVTKRHLKVIKEEMPWIEVLRPVEKVVGSYGEIGMGGMMDWNEIVDKIVLKLGGYPEEEDDDNGDDDDNGDDENGDDIDLDNVDNDDDDNDDDDDDNDDDDDDDDNGDDDDDLRAKRERRQTRKALNKLDYDYDEDEMDKVINKLSLADQDELMKRKFSLRESSSFTG

SEQ ID NO: 68226 - DNA, 1248 bp, Yarrowia lipolytica CLIB122
  CDS (1)..(1248)
atgcatacttttttttctcagacatccaacctctaccaagaacaccttcatttcagcctaaagcgtcttcaagctcccgtcacatcctctattaccaccgtaacatcgacaaccccgaatcaaaatacaccttcaacgccaccagccaccacccaattcacaaacactgtcacagcagtcagtaacacaaccatggcaagtacacctcgagataactcggcaagcccgcaatcgtcccccaaacctgtcctggtgtcgcgcaaaagcatcgtgtcttttacagaacccgtgcatcccaatgacagacacagaaacagcgtggtgtctctgcatcatatagatcactccaaggtgctggaaaccaaccgaagagtgagtcccacgagctcgaatggagcttctgggtgtaccactcctaccattgtcaagggacggctcgaaacgcaatctctggacgagattctgggatctctgggtgacacacacgctgtcgcgagtcccaacttcaacctgcactcagtcacgagcaaccccaatctacctactgccagtcccacgctgggacccaagaccgtttcttcggctcctgtgataaaacctgctgtttccacgcctgcaactgcttctcccactctcactgactcgattttccctccgaagaccgactcatccaagatccatattctaatcgcagcgtcggggtctgtagcaactatcaagatgccactcatagtccagaagctcaagactgtatacggagacaaggtggaggtacaggcgattctgacaactgcagcacagcactttttcagcgcagagcaacaaaatgaaatgatcgatctcggggtgcgcatctggaaggacaaggacgaatggacatgctggaagaagtcgtcggaaaagattctcaacgcagagctcaaaaagtgggcagacgtgctgctcatcgcccctctgtcggccaacactctgtgcaaaatcgccaacggcatctgtgacaatctcctgacgtctataattcgagcatggaacccagcagcacctatcattgttgcccctgccatgaacaccatgatgtacaaccacccactgactcagaagcacctgaatgtgatcaacgcagagatgccctggatccaggttctgttgccagttgaaaagaagctggtgtgtggagatacaggcattggtgccatgttggagtggagccaggtggttgactgtttggtcggtcgtctcagcgagtga

SEQ ID NO: 68227 - protein, 415 aa, Yarrowia lipolytica CLIB122
MHTFFSQTSNLYQEHLHFSLKRLQAPVTSSITTVTSTTPNQNTPSTPPATTQFTNTVTAVSNTTMASTPRDNSASPQSSPKPVLVSRKSIVSFTEPVHPNDRHRNSVVSLHHIDHSKVLETNRRVSPTSSNGASGCTTPTIVKGRLETQSLDEILGSLGDTHAVASPNFNLHSVTSNPNLPTASPTLGPKTVSSAPVIKPAVSTPATASPTLTDSIFPPKTDSSKIHILIAASGSVATIKMPLIVQKLKTVYGDKVEVQAILTTAAQHFFSAEQQNEMIDLGVRIWKDKDEWTCWKKSSEKILNAELKKWADVLLIAPLSANTLCKIANGICDNLLTSIIRAWNPAAPIIVAPAMNTMMYNHPLTQKHLNVINAEMPWIQVLLPVEKKLVCGDTGIGAMLEWSQVVDCLVGRLSE

SEQ ID NO: 68228 - DNA, 669 bp, Aspergillus nidulans FGSC A4
  CDS (1)..(669)
atggatgttgcgactagtgggtcggtcgccacgataaagcttcccaacatagcagaagctctcggtcgccatccaaatgtatcaattcgcatcatcgtaaccaaatcagcggagaagttcctcatcggtcaaagccctgagcagccgcccctcgagagattgcgtcaactacccggggtcgacggaatataccgagatgaagatgaatggaaaaaaccatgggttcgtggggagccaatcttgcatatcgagttgagaaaatgggcccatttgttgcttattgcccccctttctgcaaacacaatggccaagatgattgttggcattgcagataacctccttctctcggttatcagagcatgggatacggctggtttggtagatttcaccataaaaacccagaagcctcttgtcttcgtcgcccctgcgatgaacactgcgatgtggggtcatccagtcacaaaaaaacagctcactatattacgagacgaatggggatggagtaattcgaataaagacggctgggtctaccttcttcatcccatagagaaatctctcgcttgtggagatacagggaacggcgcgatgatggattggagagacatagttgaggcagtggaggattacacgggcttaaaaacgaaaagcgcagatatcagagaggactga

SEQ ID NO: 68229 - protein, 222 aa, Aspergillus nidulans FGSC A4
MDVATSGSVATIKLPNIAEALGRHPNVSIRIIVTKSAEKFLIGQSPEQPPLERLRQLPGVDGIYRDEDEWKKPWVRGEPILHIELRKWAHLLLIAPLSANTMAKMIVGIADNLLLSVIRAWDTAGLVDFTIKTQKPLVFVAPAMNTAMWGHPVTKKQLTILRDEWGWSNSNKDGWVYLLHPIEKSLACGDTGNGAMMDWRDIVEAVEDYTGLKTKSADIRED

SEQ ID NO: 68230 - DNA, 1617 bp, Candida albicans SC5314
  CDS (1)..(1617): transl_table=12
atgccttctgatactcccaaagaagctaaattacaaatacaatctaaaaaagatgaagagccacctcgatccatcttgactaagggaccatcatcgccaccaccaactcttaatcaggattcaaatattgtacatccacaaccaaaacattctccaaataccacatcttcacaagttcagccgcagacacaatcatcatcaacaccttccaatcaaccagcaactatcaagttatcaccacaattatcaatctcactggaaaatcgtgagactgtgatggcgggtggtgcattgttgaaagaaaaacaggaaccttcagataaatctaaacctattatcaccacaaccaacaccaacactaccaacaccacagccgctagtcctttgttagacaaagacaagaatgattcgtttgctaatattaactatactttgaacccaccaaaagaaagtcagcaccacaaagctccatctgttcatgctcatttttatgtagaggaaacgttacggcccgtcagaaaccgttcaagaagtgggtctgcttcaaataatgcaaccagtttgtcaccagcagctagtcctcagcatgtcgataatccagtgtttcacaaagacgcaatcaagagtcaagaaagcataagagctacatctgtttcttctgtgggaagcacccaaagtactccacactcagccgctgccagtgccaacgccccttcaagtggcactacaggaacagtagcaacagcaacagcagcagcgccgccaccaacaacaacaacagctactggtactggtgaacaaaatgctaacactgatccacgtttacctcaagatgacggcaaattccatgttttattaggagtttgtggtgcattatcggtggcgaaagttaaattaatagttaacaaattgtttgaaatttacactccagaaaagatttctatacaagtgatcttaactaaggcgagtgaaaattttattttaccagaaacattgagcattttagagaatattaaaaaagtaagaatttggacagatatcgatgaatggactacttggaaaataagactggatcccgtgttacatattgaattgaggcgttgggcagatattttggttgtttgtccaatgactgccaacaccttgtcgaagatcactttaggtatatgtgataatttattgactaatgttattcgagcatggaatactacatttcctatattattagccccagctatggatagtcattcctatagttcaagcacgacaaagaggcaattaagattgattgctgacgatatgccttggattgaagtgttgaaacccctggaaaaagtgtttggcagttttggtgatattggtatgggtggaatgatggattggaatgaaattgtgaataaaatagtaatgaaattaggcgggtatcccgaagtaccagatgaagaagatgaggacgaatcaaaggataacattgatgactcaggaatagttgacgatgatgacgacgacgacgacgatgatgatgatgatgacgacgatgatgaggaggatgacgacgatgaagaagaagagaatgaaggtagtgataatgttaaagagaatgtcaagaataaatga

SEQ ID NO: 68231 - protein, 538 aa, Candida albicans SC5314
MPSDTPKEAKLQIQSKKDEEPPRSILTKGPSSPPPTLNQDSNIVHPQPKHSPNTTSSQVQPQTQSSSTPSNQPATIKLSPQLSISSENRETVMAGGALLKEKQEPSDKSKPIITTTNTNTTNTTAASPLLDKDKNDSFANINYTLNPPKESQHHKAPSVHAHFYVEETLRPVRNRSRSGSASNNATSLSPAASPQHVDNPVFHKDAIKSQESIRATSVSSVGSTQSTPHSAAASANAPSSGTTGTVATATAAAPPPTTTTATGTGEQNANTDPRLPQDDGKFHVLLGVCGALSVAKVKLIVNKLFEIYTPEKISIQVILTKASENFILPETLSILENIKKVRIWTDIDEWTTWKIRSDPVLHIELRRWADILVVCPMTANTLSKITLGICDNLLTNVIRAWNTTFPILLAPAMDSHSYSSSTTKRQLRLIADDMPWIEVLKPSEKVFGSFGDIGMGGMMDWNEIVNKIVMKLGGYPEVPDEEDEDESKDNIDDSGIVDDDDDDDDDDDDDDDDDEEDDDDEEEENEGSDNVKENVKNK

SEQ ID NO: 68232 - DNA, 2196 bp, Candida albicans SC5314
  CDS (1)..(2196): transl_table=12
atgtcccaagattcttcagatcagcgaccaccacaatctgagtcattacaaacaatatcctcagacaataccactactactactaaacatacagaaaagcgtatttctgaaactaaattggaaaatggtaaccattgtttgtcggatatagcacggggtcataacccatcaagcatcaaaggaaatgggtctacaaagaatctggttgccagcggtattaaggtaaataccaatagtgctagtggtattgcaccaccaacgaaaattctaaccaattcttcaaaagaagttacatcgccagttttacaaaattcaaatactccaatactcggatcagcaaatactagtgggaccaatatacctgtaagaaatcaaagtgtatcgttttctgatatagacaatcaagaacgttcccgtcgatttacaatatcagcaaaaccatcaactgttaatgtaccacaagaagttcaactaccacaatcgtcacgacacccttcctcggctgcaccatcgaggcaatcatcagtaaagactaaaagagttacatctccagttaacagtggtgaagggaatgtgtataatgatgtgttgacttttatgaccaatcatagtcatggcaaattaaacaccgcattaccatcaaatgttcatgtcggcgcaatcagaagtgataactcttcacctataacacctgaaggagctattgatccagggtttaattttgattataacaaaaattcattaaatagaattgctagtcctagtccacctccatttagtcgttcaaacgggagttcttcaacttcatcgccaaaaagaagcaagacaccaaatacacaggaacccgtaccaccacaggaacctataactacaacagagaaattgatatcagaaccttcttcacaatcagcaataaaaccattacctagtagtcaaattgttcaaccaattaagattactggaactggaagtgccaattcctcacgtcgtggatctttaaagaaatccaataaaacaattgtatcatcccccattggtccaccagttccatttcaacaatttttatcaaagcaagatgatgggaaatttcatattttattggcttgtactggttcggtagctacaattaaagttccattgattattgataagttatttcaaattttcactacatcgaagatttcaattcaattagttttaaccaaatcatctagtcattttcttcgtggttgtaaaattcatgaggatgttaaaatatggcgtgatgaagatgaatgggccaatttttctgatgcctataattctgcttctacaacagtttgtagtactatgggtaatgatggtttgaatgttgtcaataaaaagcccaagaatccttttgagaaattgattcttcataatgaattgagaaaatgggcggatattatgttgattgctccattatctgctaatacattggcaaaaattgctaatggtattgctgataatttattaacttcaattgtaagatcatggtgtccatcgactttccaacaagttaaaaaaccaattattgttgctccagcaatgaatacatttatgtatactcatccaatcaccgctaaacaattaaatataatactgtcacctgattttggtattgaagtattaaaaccagttgaaaaaattttggtttgtggtgatattggtatgggaggtatgagagaatgggctgaaattgttgatgttttaagaagaagagttcatagtattaaggctgaacagaaaaaattgttagatgaagaacaaagattaaacgaagaagaagaggaggaggaggaggatgatgataacgatgaagaaggtgatgacgacgatgacgatgacgatgatgatgatgatgacgatgatgatgatgatgacgatgatgacgatgatgatgatgatgacgatgatgacgatgtagaagaagataatgaagaagaggatgttgatgatacaaacaagagaaaacttgtcagaaacaataccagcaatagtgaggaattacctaaaaaagatgatgatgaaatgatatttgaaatcactgatcaagaacaaagtgaacaggatgatgaaggtgaaattgttacaaatgaatcacgtacaatttctccagttccttcacatcgtcaacaaaagattaagatccctaaagaaactcaaaatcttatttga

SEQ ID NO: 68233 - protein, 731 aa, Candida albicans SC5314
MSQDSSDQRPPQSESLQTISSDNTTTTTKHTEKRISETKLENGNHCLSDIARGHNPSSIKGNGSTKNSVASGIKVNTNSASGIAPPTKILTNSSKEVTSPVLQNSNTPILGSANTSGTNIPVRNQSVSFSDIDNQERSRRFTISAKPSTVNVPQEVQLPQSSRHPSSAAPSRQSSVKTKRVTSPVNSGEGNVYNDVLTFMTNHSHGKLNTALPSNVHVGAIRSDNSSPITPEGAIDPGFNFDYNKNSLNRIASPSPPPFSRSNGSSSTSSPKRSKTPNTQEPVPPQEPITTTEKLISEPSSQSAIKPLPSSQIVQPIKITGTGSANSSRRGSLKKSNKTIVSSPIGPPVPFQQFLSKQDDGKFHILLACTGSVATIKVPLIIDKLFQIFTTSKISIQLVLTKSSSHFLRGCKIHEDVKIWRDEDEWANFSDAYNSASTTVCSTMGNDGLNVVNKKPKNPFEKLILHNELRKWADIMLIAPLSANTLAKIANGIADNLLTSIVRSWCPSTFQQVKKPIIVAPAMNTFMYTHPITAKQLNIISSPDFGIEVLKPVEKILVCGDIGMGGMREWAEIVDVLRRRVHSIKAEQKKLLDEEQRLNEEEEEEEEDDDNDEEGDDDDDDDDDDDDDDDDDDDDDDDDDDDDDDDDVEEDNEEEDVDDTNKRKLVRNNTSNSEELPKKDDDEMIFEITDQEQSEQDDEGEIVTNESRTISPVPSHRQQKIKIPKETQNLI

SEQ ID NO: 68234 - DNA, 1107 bp, Cryptococcus neoformans var. neoformans B-3501A
  CDS (1)..(1107)
atgtcatcaaccagccagaccacaaatgcacgtctgtcccgtctccctcgtaaaccacctcgcccattcatctctgcccaccaccgtcctcctactcgaaatcatacctcgaccgacaacatattccgtgtcctcctcatctccagtgggagcgtcgccagtattaaaatacccaatattgtggaagaactcgttaaagtgggcaacattgatatccaaatcatagccaccaaagcttcaacacatttctactcacaagaagacgtagacaaatctgtacaatcagcattaaatttgtcggacgaggaaatgcaagacgacgtaggagtgagaatatggacagacgaagacgagtggtcggactggaagaaagtcggagacccgatcctacacattgaattacgacgctgggcggacatcgtcgtggtagccccatgttcagccgacttactcgccaagatttcgtgtggattatgtgatacccttgcctcatcttttctccgcgccctatcatcatccacacccgtagtcatctgcccagcaatgaacactcacatgtatcaacaccgcttgaccgccaaacaccttgctgtcgtgcaagatgaattaggataccttgtttctggaccacaaggggcaggaaggcttgcttgtggtgatgatggcccaggcaaaatgacagactggcacgatatcgtctctcttatccaaggattcgccacaatgcaccaaacccaagtctccctcgcctcattaacctttccttctttatctatgccttacccttctgcatctgcgtctccaagtgatacttttatagatactccttcccctccccctgcatctgcagacacgtccacctacaacttcccacatcgcttcccctgcggagcaagctcagatcttccacaacagagggaaaaggaaaagggaattggggaacatcctacaatggttgtgcccttaccagacccgcatccattatcgacagaagcagcgctcaacggtgaaaagatgccagcatcggtatatgccaaaaatgtggattgggaaaagttggccaatgatggtgggttgtggcatcgaaaatggtggcttggtgtctga

SEQ ID NO: 68235 - protein, 368 aa, Cryptococcus neoformans var. neoformans B-3501A
MSSTSQTTNARLSRLPRKPPRPFISAHHRPPTRNHTSTDNIFRVLLISSGSVASIKIPNIVEELVKVGNIDIQIIATKASTHFYSQEDVDKSVQSALNLSDEEMQDDVGVRIWTDEDEWSDWKKVGDPILHIELRRWADIVVVAPCSADLLAKISCGLCDTLASSFLRALSSSTPVVICPAMNTHMYQHRLTAKHLAVVQDELGYLVSGPQGAGRLACGDDGPGKMTDWHDIVSLIQGFATMHQTQVSLASLTFPSLSMPYPSASASPSDTFIDTPSPPPASADTSTYNFPHRFPCGASSDLPQQREKEKGIGEHPTMVVPLPDPHPLSTEAALNGEKMPASVYAKNVDWEKLANDGGLWHRKWWLGV

SEQ ID NO: 68236 - DNA, 567 bp, Tribolium castaneum
  CDS (1)..(567)
atggtcaatattctaataggttgcaccggcagcgtggccacaataaagctgccacttctggttaatagtttgttaggcttgcagcatctccaaattaaaattcgcattgtagtcactgaacgcgctaaacacttcttcgatcagaaggacatccatcctgatgcggaagtgttcagcgattctgacgagtgggctgggtggactaaaagaggggatccagtgttgcacattgaattgagcaaatgggccgatgtttttgttattgctcctttggacgcaaacacgttggctaaaattgcaaacggattgtgtgataatcttttaacttgtactgctagggcttgggaactgtctaagccattaattttttgtcccgctatgaataccaaaatgtttcaacacccgctcactgcaactcagattagtacgttgatttcgtggggttataaagaagtgcctgttattgaaaagactctaatgtgtggggacactggtgctggcgctatggctgaagttgtcaccattgttgaagtcatccaaagttttgcccccatcaaacattactag

SEQ ID NO: 68237 - protein, 188 aa, Tribolium castaneum
MVNILIGCTGSVATIKLPLLVNSLLGLQHLQIKIRIVVTERAKHFFDQKDIHPDAEVFSDSDEWAGWTKRGDPVLHIELSKWADVFVIAPLDANTLAKIANGLCDNLLTCTARAWELSKPLIFCPAMNTKMFQHPLTATQISTLISWGYKEVPVIEKTLMCGDTGAGAMAEVVTIVEVIQSFAPIKHY

SEQ ID NO: 68238 - DNA, 1191 bp, Herminiimonas arsenicoxydans; identical to SEQ ID NO: 49530
  CDS (1)..(1191): transl_table=11

SEQ ID NO: 68239 - protein, 396 aa, Herminiimonas arsenicoxydans; identical to SEQ ID NO: 49531

SEQ ID NO: 68240 - DNA, 1212 bp, Burkholderia vietnamiensis G4
  CDS (1)..(1212): transl_table=11
ttggcacacgcagaactcgcaggaaaacacctcgtcctcggcctcacgggcggcatcgcctgctacaagatcgccgagctcacacggctgctgacgaaggccggcgcgaccgtccaggtcgtgatgaccgaagccgccgcgcagttcatcacgcccgtcacgatgcaggcgctgtccggccggcccgtctacacgagccagtgggacgcccgcgtcgacaacaacatggcgcacatcgacctgtcgcgcgaagccgatgcgatcgtgatcgcgccggcctccaccgacttcctcgcgaagctcgcgcacgggttcgccgatgacctgctgtcgacgctgtgcgtcgcgcgcgactgcccgctgctcgtcgtgccggcgatgaaccggcaaatgtggcagaacccggccacccagcgcaatgcggcgcagctgcgggccgacggcgtgtcggtgctcggccccgattcgggcgcgcaggcgtgcggcgaagtcggcgacggccgcatgctcgagcccgaggccatctacgaagcgatcgtcgcgcactttgcgccgaagctgctcgcgcaccgccgcgtgctgatcacggccggcccgacgttcgagccgctcgatccggtgcgcggcctcacgaaccgctcgagcggcaagatgggcttcgcgctcgcgcgcgccgcgcagcaggccggcgcggacgtgcatctggtggccgggccggtcgcgctcgacacgccgtggggcgtgtaccggcaggacgtgcagaccgcgcagcagatgtacgacgcggtcatgcacgcggtatcggacgcggacatcttcatcgcggtggccgcggtcgccgactggcgcgtcgagcagccggccgagcacaagatgaagaagaccgccgatcgcaagatgccggcgctcacgttcgtcgagaaccccgacatcctcgcgtcggtcgccgcgctgcccgatccgccgtactgcgtcggcttcgcggccgaaagcggcgacctcgacgtgcacggcgacgaaaagcgcaagcgcaagaacgtgccgctgctgatcggcaacctcggcccgctgacgttcggccgcgacgacaacgaagtggtgctgttcgaggcggccggcctcacgccgctgccgcgcgcgccgaaggacgaactcgcccacgtgctcgtcgccgaaatcgcgcggcgcctgcccgacaaccggctgatctga

SEQ ID NO: 68241 - protein, 403 aa, Burkholderia vietnamiensis G4
MAHAELAGKHLVLGLTGGIACYKIAELTRLLTKAGATVQVVMTEAAAQFITPVTMQALSGRPVYTSQWDARVDNNMAHIDLSREADAIVIAPASTDFLAKLAHGFADDLLSTLCVARDCPLLVVPAMNRQMWQNPATQRNAAQLRADGVSVLGPDSGAQACGEVGDGRMLEPEAIYEAIVAHFAPKLLAHRRVLITAGPTFEPLDPVRGLTNRSSGKMGFALARAAQQAGADVHLVAGPVALDTPWGVYRQDVQTAQQMYDAVMHAVSDADIFIAVAAVADWRVEQPAEHKMKKTADRKMPALTFVENPDILASVAALPDPPYCVGFAAESGDLDVHGDEKRKRKNVPLLIGNLGPLTFGRDDNEVVLFEAAGLTPLPRAPKDELAHVLVAEIARRLPDNRLI

SEQ ID NO: 68242 - DNA, 546 bp, Streptococcus pyogenes str. Manfredo
  CDS (1)..(546): transl_table=11
atgactaaacatattaccttagctgtttctggtagtatatctgcctataaagcagcagatcttacgagtcaattaactaaaattggctatgatgttcacatcataatgactcaggctgctacacaatttattacaccattaaccctgcaagtgttatcaaaaaatgctattcatctagatgttatggatgagcatgacccaaaagttatcaaccatatcgaattagcaaaacgcacagatttatttattgttgcacctgcctctgctaatactattgctcatctagcatatggattcgctgataatattgtaacaagtgttgctcttgccctaccagctaccacaccaaaattaatagccccagccatgaataccaaaatgtatcaaaaccctattacccaagaaaatattaaacgcttatcgacaatagggtttacagaaattcctccaaaatctagcttattagcctgtggagataaaggacctggtgctttggctgatattgatgttatcttagctactattgatacgatttggaaactttaa

SEQ ID NO: 68243 - protein, 181 aa, Streptococcus pyogenes str. Manfredo
MTKHITLAVSGSISAYKAADLTSQLTKIGYDVHIIMTQAATQFITPLTLQVLSKNAIHLDVMDEHDPKVINHIELAKRTDLFIVAPASANTIAHLAYGFADNIVTSVALALPATTPKLIAPAMNTKMYQNPITQENIKRLSTIGFTEIPPKSSLLACGDKGPGALADIDVILATIDTIWKL

SEQ ID NO: 68244 - DNA, 1197 bp, Dichelobacter nodosus VCS1703A; identical to SEQ ID NO: 49534
  CDS (1)..(1197): transl_table=11

SEQ ID NO: 68245 - protein, 398 aa, Dichelobacter nodosus VCS1703A; identical to SEQ ID NO: 49535

SEQ ID NO: 68246 - DNA, 543 bp, Leptospira interrogans serovar Copenhageni str. Fiocruz L1-130
  CDS (1)..(543): transl_table=11
atgtctaatcttaaaaaagaaatactcgttgctgtttcgggaagtattgccgcatacaagacgtgtgaacttgtaagaaatcttactaaggaaggttatccagtaagcgtaattatgacggcgaacgcgactaagtttgtgggcccgattacgtttgaagctttaaccggtaaaaaagtgcgtgtggatgaatatgaacaaggaatggctcatatagacgcaaaaaattccgcgtccgtcattgcgattgttcccgccacagcaaacataatcggtaaaatggcgaacggaattgcggatgatcttgtcacttctacttatcttgcggcgaattgtcctgtggttatcgcgcctgctatgaatccttttatgtatgctcatccttcagttcaaagaaacctaaaacgattgatcgaagacggtgtgacgcttgcggatccttctgagggggtagttgtctgtggggacgaaggatatggaaagttagccgaaatttctataatacaaaaaatgatcttagatttataccagagaaatttttag

SEQ ID NO: 68247 - protein, 180 aa, Leptospira interrogans serovar Copenhageni str. Fiocruz L1-130
MSNLKKEILVAVSGSIAAYKTCELVRNLTKEGYPVSVIMTANATKFVGPITFEALTGKKVRVDEYEQGMAHIDAKNSASVIAIVPATANIIGKMANGIADDLVTSTYLAANCPVVIAPAMNPFMYAHPSVQRNLKRLIEDGVTLADPSEGVVVCGDEGYGKLAEISIIQKMILDLYQRNF

SEQ ID NO: 68248 - DNA, 1191 bp, Thermus thermophilus HB27; identical to SEQ ID NO: 49538
  CDS (1)..(1191): transl_table=11

SEQ ID NO: 68249 - protein, 396 aa, Thermus thermophilus HB27; identical to SEQ ID NO: 49539

SEQ ID NO: 68250 - DNA, 1215 bp, Desulfovibrio vulgaris subsp. vulgaris str. Hildenborough; identical to SEQ ID NO: 49540
  CDS (1)..(1215): transl_table=11

SEQ ID NO: 68251 - protein, 404 aa, Desulfovibrio vulgaris subsp. vulgaris str. Hildenborough; identical to SEQ ID NO: 49541

SEQ ID NO: 68252 - DNA, 1281 bp, Acinetobacter sp. ADP1; identical to SEQ ID NO: 49550
  CDS (1)..(1281): transl_table=11

SEQ ID NO: 68253 - protein, 426 aa, Acinetobacter sp. ADP1; identical to SEQ ID NO: 49551

SEQ ID NO: 68254 - DNA, 1233 bp, Propionibacterium acnes KPA171202; identical to SEQ ID NO: 49554
  CDS (1)..(1233): transl_table=11

SEQ ID NO: 68255 - protein, 410 aa, Propionibacterium acnes KPA171202; identical to SEQ ID NO: 49555

SEQ ID NO: 68256 - DNA, 546 bp, Streptococcus pyogenes MGAS10394
  CDS (1)..(546): transl_table=11
atgactaaacatattaccttagctgtttctggtagtatatctgcctataaagcagcagatcttacgagtcaattaactaaaatgggctatgatgttcacatcataatgactcaggctgctacacaatttattacaccattaaccctgcaagtgttatcaaaaaatgctattcatttagatgttatggatgagcatgacccaaaagttatcaaccatatcgaattagcaaaacgcacagatttatttattgttgcacctgcctctgctaatactattgctcatctagcatatggattcgctgataatattgtaacaagtgttgctcttgccctaccagctaccacaccaaaattaatagccccagccatgaataccaaaatgtatcaaaaccctattacccaagaaaatattaaacgcttatcgacaatagggtttacagaaattcctccaaaatctagcttattagcctgtggagataaaggacttggtgctttggctgatattgatgttatcttagctactattgatacgatttggaaactttaa

SEQ ID NO: 68257 - protein, 181 aa, Streptococcus pyogenes MGAS10394
MTKHITLAVSGSISAYKAADLTSQLTKMGYDVHIIMTQAATQFITPLTLQVLSKNAIHLDVMDEHDPKVINHIELAKRTDLFIVAPASANTIAHLAYGFADNIVTSVALALPATTPKLIAPAMNTKMYQNPITQENIKRLSTIGFTEIPPKSSLLACGDKGLGALADIDVILATIDTIWKL

SEQ ID NO: 68258 - DNA, 1245 bp, Mannheimia succiniciproducens MBEL55E; identical to SEQ ID NO: 49560
  CDS (1)..(1245): transl_table=11

SEQ ID NO: 68259 - protein, 414 aa, Mannheimia succiniciproducens MBEL55E; identical to SEQ ID NO: 49561

SEQ ID NO: 68260 - DNA, 1389 bp, Legionella pneumophila subsp. pneumophila str. Philadelphia 1; identical to SEQ ID NO: 49564
  CDS (1)..(1389): transl_table=11

SEQ ID NO: 68261 - protein, 462 aa, Legionella pneumophila subsp. pneumophila str. Philadelphia 1; identical to SEQ ID NO: 49565

SEQ ID NO: 68262 - DNA, 558 bp, Anaplasma marginale str. St. Maries
  CDS (1)..(558): transl_table=11
atgaacatactgctcataatatccggcagcgttgctgcgtacaagtcgctagacgttgcaagggagctgaaaaggaggaaccataacttgttgtgtgttctgagtaagtgcggagaaaaattcgtcactcctttatccgtcacatcgttagccgggcaccatacctacacggagagcgatttcttctctctgcaggcgagtatgaagcatatttcgctatcacgcaactccgaccttatacttgtcgcgccggcaagtgctaacataatggcaaaggccgcgcatggcatttgtgatgacctgccatcaacaattctaacatgcgcgagggtgccaatcgtcatggcgcctgccatgaacaccgcaatgtgggaagcgaaaccaacattgcgtaatctggaaatcctaaagcgcgataatgtgcagatcatagagccggagaccggcatattggcgtgcggggaagagggctacgggaaaatggcaagcgtggaaaccataatctcatacgtggagaacatgcaaaatagcgccggcaagccactcacggaggattga

SEQ ID NO: 68263 - protein, 185 aa, Anaplasma marginale str. St. Maries
MNILLIISGSVAAYKSLDVARELKRRNHNLLCVLSKCGEKFVTPLSVTSLAGHHTYTESDFFSLQASMKHISLSRNSDLILVAPASANIMAKAAHGICDDLPSTILTCARVPIVMAPAMNTAMWEAKPTLRNLEILKRDNVQIIEPETGILACGEEGYGKMASVETIISYVENMQNSAGKPLTED

SEQ ID NO: 68264 - DNA, 1209 bp, Azoarcus sp. EbN1; identical to SEQ ID NO: 49568
  CDS (1)..(1209): transl_table=11

SEQ ID NO: 68265 - protein, 402 aa, Azoarcus sp. EbN1; identical to SEQ ID NO: 49569

SEQ ID NO: 68266 - DNA, 546 bp, Ehrlichia ruminantium str. Welgevonden
  CDS (1)..(546): transl_table=11
atgaaaatactactcgttatttcaggaagcatagcagcatataaatctctagatctaattagaaaattacaggaaaataagcacacagttattggagtaatcagtaaatcaggagaaaaatttataactccattatcagtagcatcattatctcaaaattatgcatatacgaatgcagatttctttaacattcacaatagtatgcaccacatctcactcacaagaaattcagatatagtactagtagcaccagcaacattagacattatcgcaaaaacagcttgtggaattgctgatgaattagctacaactatattaattgcttccaatattcctatagttatggtacctgctatgaatcccactatgtggaattcaaaatcaaatcaacgtaatatcaaccttctaaaagaagataatattacaataatagaaccaacagaagggtttgcagcatgcaatgaatatggatatggaaaaatggcagaaattcaaaatatagtttcatttatagaaaattttaaaaaaattaacactaaaaattag

SEQ ID NO: 68267 - protein, 181 aa, Ehrlichia ruminantium str. Welgevonden
MKILLVISGSIAAYKSLDLIRKLQENKHTVIGVISKSGEKFITPLSVASLSQNYAYTNADFFNIHNSMHHISLTRNSDIVLVAPATLDIIAKTACGIADELATTILIASNIPIVMVPAMNPTMWNSKSNQRNINLLKEDNITIIEPTEGFAACNEYGYGKMAEIQNIVSFIENFKKINTKN

SEQ ID NO: 68268 - DNA, 552 bp, Ehrlichia ruminantium str. Welgevonden
  CDS (1)..(552): transl_table=11
ttgattatgaaaatactactcgttatttcaggaagcatagcagcatataaatctctagatctaattagaaaattacaggaaaataagcacacagttattggagtaatcagtaaatcaggagaaaaatttataactccattatcagtagcatcattatctcaaaattatgcatatacgaatgcagatttctttaacattcacaatagtatgcaccacatctcactcacaagaaattcagatatagtactagtagcaccagcaacattagacattatcgcaaaaacagcttgtggaattgctgatgaattagctacaactatattaattgcttccaatattcctatagttatggtacctgctatgaatcccactatgtggaattcaaaatcaaatcaacgtaatatcaaccttctaaaagaagataatattacaataatagaaccaacagaagggtttgcagcatgcaatgaatatggatatggaaaaatggcagaaattcaaaatatagtttcatttatagaaaattttaaaaaaattaacactaaaaattag

SEQ ID NO: 68269 - protein, 183 aa, Ehrlichia ruminantium str. Welgevonden
MIMKILLVISGSIAAYKSLDLIRKLQENKHTVIGVISKSGEKFITPLSVASLSQNYAYTNADFFNIHNSMHHISLTRNSDIVLVAPATLDIIAKTACGIADELATTILIASNIPIVMVPAMNPTMWNSKSNQRNINLLKEDNITIIEPTEGFAACNEYGYGKMAEIQNIVSFIENFKKINTKN

SEQ ID NO: 68270 - DNA, 1191 bp, Dechloromonas aromatica RCB; identical to SEQ ID NO: 49592
  CDS (1)..(1191): transl_table=11

SEQ ID NO: 68271 - protein, 396 aa, Dechloromonas aromatica RCB; identical to SEQ ID NO: 49593

SEQ ID NO: 68272 - DNA, 1203 bp, Ralstonia eutropha JMP134; identical to SEQ ID NO: 49598
  CDS (1)..(1203): transl_table=11

SEQ ID NO: 68273 - protein, 400 aa, Ralstonia eutropha JMP134; identical to SEQ ID NO: 49599

SEQ ID NO: 68274 - DNA, 534 bp, Ehrlichia canis str. Jake
  CDS (1)..(534): transl_table=11
atgaaaattctactagtcatttcaggaagtatagcagcgtacaaatccttagatttgatacgaaaattacaagaaaataaccacacagtcactggtataattagcaaatctggagaaaaatttgttactcaattatcagtagcatcattatctggaaattatgcatatacagatgcagatttttttaatatccataatagtatgcatcatatatcattaacaagaaattcagatattttattagtagcacctgcaacattggacataatagcaaagacagcacatggtattgctgacgaattagctacaacagttctaatcgcatcaaacattcctattatcatggctccagctatgaatcctgtaatgtggtattcaaaagcaaaccaacgcaatatcaaatgtttaagaaacgataacgtagtcatcattgaacccaaagaaggattagcagtttgtaacgaatatggattaggcaaaatggcagaaactcaagatattgtttcatttatagacaattttcaaaaaacttaa

SEQ ID NO: 68275 - protein, 177 aa, Ehrlichia canis str. Jake
MKILLVISGSIAAYKSLDLIRKLQENNHTVTGIISKSGEKFVTQLSVASLSGNYAYTDADFFNIHNSMHHISLTRNSDILLVAPATLDIIAKTAHGIADELATTVLIASNIPIIMAPAMNPVMWYSKANQRNIKCLRNDNVVIIEPKEGLAVCNEYGLGKMAETQDIVSFIDNFQKT

SEQ ID NO: 68276 - DNA, 1176 bp, Thiobacillus denitrificans ATCC 25259; identical to SEQ ID NO: 49604
  CDS (1)..(1176): transl_table=11

SEQ ID NO: 68277 - protein, 391 aa, Thiobacillus denitrificans ATCC 25259; identical to SEQ ID NO: 49605

SEQ ID NO: 68278 - DNA, 1191 bp, Rhodobacter sphaeroides 2.4.1; identical to SEQ ID NO: 49610
  CDS (1)..(1191): transl_table=11

SEQ ID NO: 68279 - protein, 396 aa, Rhodobacter sphaeroides 2.4.1; identical to SEQ ID NO: 49611

SEQ ID NO: 68280 - DNA, 1227 bp, Synechococcus elongatus PCC 7942; identical to SEQ ID NO: 49624
  CDS (1)..(1227): transl_table=11

SEQ ID NO: 68281 - protein, 408 aa, Synechococcus elongatus PCC 7942; identical to SEQ ID NO: 49625

SEQ ID NO: 68282 - DNA, 1311 bp, Frankia sp. CcI3; identical to SEQ ID NO: 49634
  CDS (1)..(1311): transl_table=11

SEQ ID NO: 68283 - protein, 436 aa, Frankia sp. CcI3; identical to SEQ ID NO: 49635

SEQ ID NO: 68284 - DNA, 534 bp, Anaplasma phagocytophilum HZ
  CDS (1)..(534): transl_table=11
atggatatactactactaataacaggcagcgttgctgcttataaagcacttgaggttatcagagagttaagaagaagaaaatacaatttacgttgcgttttaagtaaggcgggagaacaattcatcacaccgctgtctgtctcagcgctttctgatgctaatacttacactgagagtgactccttttctccgcaggagtgtatgaagcatatttctttgtccaggggtacagacctaatattggttgttcccgcaagcgctgatatcatgggaaaggcggctcatggtatatgtgatgatctgcctactacgattcttatggcggctaatgtgcctgtgataatggctccggctatgaacactgtaatgtggcaatctccagctatgcagcgtaatttaaatactttaaagcaggacaaagtctttattattgaaccggaaacagggatacttgcttgcggtgaggaaggcccgggaaaaatggcaaaagttgaagatatagtggcatttgtggaaaaatttcagaaatgttag

SEQ ID NO: 68285 - protein, 177 aa, Anaplasma phagocytophilum HZ
MDILLLITGSVAAYKALEVIRELRRRKYNLRCVLSKAGEQFITPLSVSALSDANTYTESDSFSPQECMKHISLSRGTDLILVVPASADIMGKAAHGICDDLPTTILMAANVPVIMAPAMNTVMWQSPAMQRNLNTLKQDKVFIIEPETGILACGEEGPGKMAKVEDIVAFVEKFQKC

SEQ ID NO: 68286 - DNA, 1272 bp, Saccharophagus degradans 2-40
  CDS (1)..(1272): transl_table=11
atgaataccctaaccaataaacgcgttttgcttggcgtaaccggcggaatagcggcctacaaaagtgcagacttagtgcgccgcttgcaggatgccggtgccgatgtgcgtgtggtgatgacccgcgcggcacaagagtttattaccccgcttaccatgcaggcactttctggtaagcctgtgcacaccgagctattagatacgcaggccgaggcggccatggggcatattgagctggcgcgctgggccgatgttattttggttgcccctgccagcgcagattttattgccaaacttagtcacggtgagggcagcgatttactgtctaccctgtgcttggcttccaaggggcttattgccgtggcgccagccatgaatcaagccatgtgggcaagccctgccacgcaagataacctagcgcttattgccaagcgagcagtgcatattattggcccggctgccggtagccaagcctgtggcgatgtaggtatgggcagaatgcttgagccactcgccatatgcgaagcggtcgcgggcctgtttcaggctggtagtatgacgggtcgcaaagtggtgattactgcaggccccacgcgcgaggccatagaccctgtgcgatatatctccaaccacagctcaggcaaaatgggctatgccctagcgcaagccatggcagaggcaggggctcacactatacttgtgagcggccccacccagttgccggtgccagagcgcgttacgcgaataaatgtagaaagcgcgctagaaatggccgcgcaagtagaggcgagtgtagaaggggccgatgtgtttattggtgctgctgccgttgccgattaccgccctgcgaatgtggcgcaacaaaagttaaaaaagaccgaagggatgagcaacaccatagaattggtggaaaaccccgatattattcgcgcggtggcggagcgggcagataggcccataaccgtaggttttgctgcagagacaaaagatgtacagcaatatgccgcctctaagttgcacgctaaaaagctcgatatgattattgccaacgatgtgtcgcaagtgggtattggctttaacagtgacaataacgctgtatgggtattgcgccgcaaagcgccattaaatgcgcatgatgcggctagcgggggcagcgaagcgagtgcagccctgttagaagaatcaatagatcaaatgagtaaggcgcaattatcgcgcgtgttagttacaaaaatagcagacttttttaaacaggcagaagccgttaaataa

SEQ ID NO: 68287 - protein, 423 aa, Saccharophagus degradans 2-40
MNTLTNKRVLLGVTGGIAAYKSADLVRRLQDAGADVRVVMTRAAQEFITPLTMQALSGKPVHTELLDTQAEAAMGHIELARWADVILVAPASADFIAKLSHGEGSDLLSTLCLASKGLIAVAPAMNQAMWASPATQDNLALIAKRAVHIIGPAAGSQACGDVGMGRMLEPLAICEAVAGLFQAGSMTGRKVVITAGPTREAIDPVRYISNHSSGKMGYALAQAMAEAGAHTILVSGPTQLPVPERVTRINVESALEMAAQVEASVEGADVFIGAAAVADYRPANVAQQKLKKTEGMSNTIELVENPDIIRAVAERADRPITVGFAAETKDVQQYAASKLHAKKLDMIIANDVSQVGIGFNSDNNAVWVLRRKAPLNAHDAASGGSEASAALLEESIDQMSKAQLSRVLVTKIADFFKQAEAVK

SEQ ID NO: 68288 - DNA, 1236 bp, Methylobacillus flagellatus KT; identical to SEQ ID NO: 49642
  CDS (1)..(1236): transl_table=11

SEQ ID NO: 68289 - protein, 411 aa, Methylobacillus flagellatus KT; identical to SEQ ID NO: 49643

SEQ ID NO: 68290 - DNA, 1200 bp, Ralstonia metallidurans CH34; identical to SEQ ID NO: 49648
  CDS (1)..(1200): transl_table=11

SEQ ID NO: 68291 - protein, 399 aa, Ralstonia metallidurans CH34; identical to SEQ ID NO: 49649

SEQ ID NO: 68292 - DNA, 1212 bp, Silicibacter sp. TM1040; identical to SEQ ID NO: 49652
  CDS (1)..(1212): transl_table=11

SEQ ID NO: 68293 - protein, 403 aa, Silicibacter sp. TM1040; identical to SEQ ID NO: 49653

SEQ ID NO: 68294 - DNA, 570 bp, Rubrobacter xylanophilus DSM 9941
  CDS (1)..(570): transl_table=11
gtgggagagacgggcgcaggcagggtgctggtggcggtgaccggcgggatcgccgcctacaagatccccggcgtcgtccggcggctgcgggaggccggcttcgaggttgaggtcgccgccaccccggccgccctgcggttcatcccgcaggagacgctcgcggtcgccgccggacgacgggtccacaccgacgagacgtggtgggaggagtccggcaggatcgagcacataaccctggcccgctgggcggagctggtcctggtggcccccgccaccgccgacgccatcgcccgggccgccatcgggctcggcgacgacctggtctccgccaccatcctcgcgggggcgaagaaggtgctctgggcgccggccatgaacccggagatgtggcagagccccgcgaccgcgcgcaacgtcgcgacgctcaagggctgggggcaccgcttcgtcggccccgaggagggcgccatggcctcggcggaggaggagcccggaaccgggcgcctcgccggagaggaggcgatcctcgcggcggtgcgcgaggcgctcgccgaggacccctcgccctag

SEQ ID NO: 68295 - protein, 189 aa, Rubrobacter xylanophilus DSM 9941
MGETGAGRVLVAVTGGIAAYKIPGVVRRLREAGFEVEVAATPAALRFIPQETLAVAAGRRVHTDETWWEESGRIEHITLARWAELVLVAPATADAIARAAIGLGDDLVSATILAGAKKVLWAPAMNPEMWQSPATARNVATLKGWGHRFVGPEEGAMASAEEEPGTGRLAGEEAILAAVREALAEDPSP

SEQ ID NO: 68296 - DNA, 1236 bp, Mesorhizobium sp. BNC1; identical to SEQ ID NO: 49656
  CDS (1)..(1236): transl_table=11

SEQ ID NO: 68297 - protein, 411 aa, Mesorhizobium sp. BNC1; identical to SEQ ID NO: 49657

SEQ ID NO: 68298 - DNA, 1212 bp, Trichodesmium erythraeum IMS101; identical to SEQ ID NO: 49666
  CDS (1)..(1212): transl_table=11

SEQ ID NO: 68299 - protein, 403 aa, Trichodesmium erythraeum IMS101; identical to SEQ ID NO: 49667

SEQ ID NO: 68300 - DNA, 1206 bp, Rhizobium leguminosarum bv. viciae 3841; identical to SEQ ID NO: 49678
  CDS (1)..(1206): transl_table=11

SEQ ID NO: 68301 - protein, 401 aa, Rhizobium leguminosarum bv. viciae 3841; identical to SEQ ID NO: 49679

SEQ ID NO: 68302 - DNA, 1221 bp, Magnetococcus sp. MC-1; identical to SEQ ID NO: 49688
  CDS (1)..(1221): transl_table=11

SEQ ID NO: 68303 - protein, 406 aa, Magnetococcus sp. MC-1; identical to SEQ ID NO: 49689

SEQ ID NO: 68304 - DNA, 1311 bp, Nocardioides sp. JS614; identical to SEQ ID NO: 49696
  CDS (1)..(1311): transl_table=11

SEQ ID NO: 68305 - protein, 436 aa, Nocardioides sp. JS614; identical to SEQ ID NO: 49697

SEQ ID NO: 68306 - DNA, 1185 bp, Neisseria meningitidis FAM18; identical to SEQ ID NO: 49702
  CDS (1)..(1185): transl_table=11

SEQ ID NO: 68307 - protein, 394 aa, Neisseria meningitidis FAM18; identical to SEQ ID NO: 49703

SEQ ID NO: 68308 - DNA, 1221 bp, Acidovorax sp. JS42; identical to SEQ ID NO: 49704
  CDS (1)..(1221): transl_table=11

SEQ ID NO: 68309 - protein, 406 aa, Acidovorax sp. JS42; identical to SEQ ID NO: 49705

SEQ ID NO: 68310 - DNA, 1281 bp, Magnetospirillum magnetotacticum MS-1; identical to SEQ ID NO: 49706
  CDS (1)..(1281): transl_table=11

SEQ ID NO: 68311 - protein, 426 aa, Magnetospirillum magnetotacticum MS-1; identical to SEQ ID NO: 49707

SEQ ID NO: 68312 - DNA, 1206 bp, Nostoc punctiforme PCC 73102; identical to SEQ ID NO: 49708
  CDS (1)..(1206): transl_table=11

SEQ ID NO: 68313 - protein, 401 aa, Nostoc punctiforme PCC 73102; identical to SEQ ID NO: 49709

SEQ ID NO: 68314 - DNA, 1203 bp, Haemophilus influenzae R2846; identical to SEQ ID NO: 49714
  CDS (1)..(1203): transl_table=11

SEQ ID NO: 68315 - protein, 400 aa, Haemophilus influenzae R2846; identical to SEQ ID NO: 49715

SEQ ID NO: 68316 - DNA, 1212 bp, Crocosphaera watsonii WH 8501; identical to SEQ ID NO: 49720
  CDS (1)..(1212): transl_table=11

SEQ ID NO: 68317 - protein, 403 aa, Crocosphaera watsonii WH 8501; identical to SEQ ID NO: 49721

SEQ ID NO: 68318 - DNA, 1200 bp, Oceanicola batsensis HTCC2597; identical to SEQ ID NO: 49734
  CDS (1)..(1200): transl_table=11

SEQ ID NO: 68319 - protein, 399 aa, Oceanicola batsensis HTCC2597; identical to SEQ ID NO: 49735

SEQ ID NO: 68320 - DNA, 1278 bp, Pseudomonas putida GB-1; identical to SEQ ID NO: 49766
  CDS (1)..(1278): transl_table=11

SEQ ID NO: 68321 - protein, 425 aa, Pseudomonas putida GB-1; identical to SEQ ID NO: 49767

SEQ ID NO: 68322 - DNA, 702 bp, Aspergillus oryzae
  CDS (1)..(702)
atggcaacagaaaagtcaccagcagcagagattgccgcgtcactcaacgatggcaaggtacatttacttctggctgcaacggggtctgttgccacaataaagctgccgctcatcattgcggcgttcgcagaccatccgaatatctcaattcgggtgattctcaccaaagctgccgctgagttccttcatgctcaatctgaggaacaaccttcggtagaatcactctcttcgcttcctaacgtcgactcggtcctccatgacgaggatgaatggacccagccctggactcgaggatcagacatactacacatcaccctccgtagatgggctcatttactagttatcgctccactgagcgcgaattcactggcgaaagtggtccacgggatgtctgacaatctacttacgagcgttgtacgcgcatgggacacgaccgggttgattgatgggagaaagaaacggatacttgtcgcgcccgcgatgaatacagcgatgtggatgcatcctgtgacagcgcaacagatccgcgtactgcaagaagattggggtattaaagaagtcgatgggaatgagcaaggctggtttgaagtcctccggcccattgagaaatcgctggcgtgtggtgatgtggggtccggcgggatgatggaatggagggagatcgtgaagatcgttaagcagagattgggtctttctgcttga

SEQ ID NO: 68323 - protein, 233 aa, Aspergillus oryzae
MATEKSPAAEIAASLNDGKVHLLLAATGSVATIKLPLIIAAFADHPNISIRVILTKAAAEFLHAQSEEQPSVESLSSLPNVDSVLHDEDEWTQPWTRGSDILHITLRRWAHLLVIAPLSANSLAKVVHGMSDNLLTSVVRAWDTTGLIDGRKKRILVAPAMNTAMWMHPVTAQQIRVLQEDWGIKEVDGNEQGWFEVLRPIEKSLACGDVGSGGMMEWREIVKIVKQRLGLSA

SEQ ID NO: 68324 - DNA, 774 bp, Neurospora crassa
  CDS (1)..(774)
atgcttcaagcaattgacaacattcatgatcgccagttcttggccgcagaactcgcttcatcagccaccctcgctgcggaacttgcgcaaccggagatcaagaacatcctcctggctgcttccggctccgtagccaccatcaagatccctgaaatcgtcaaggctttggccaggcacggcgacaagattcgcattcgcattattctcacacactttgccaaacactttctcggcggccaaagtaaagaacagcccgtctactcctctctgttggactacccccatgtggaggctatttacgatgatgccgatgaatggggccctgagccatggcagcgtggagcgagtattctccacattgagctacgaagatgggcagatattcttgttgttgcgcccctcagcgccaacacgcttgccaaaatcgtcaacggaatgagcgataatcttctgacgtccgtgataagagcatgggatacagattcgagtatcgacaacaagaagaaggtcattatggttgcaccggcaatgaactctgccatgtggaggcatcccatcaccgcgaagcagattcgagtgctgcaagaagaatggggagtcagggatcctgagccaagtgagggcgacactgcgggtgttgctgtggctaacggttggttccaggttatcatgccgattgcaaagactcttgcatgtggtgatacaggagatggagctatggcatccgtcgacaccatcgcagaagccattgagagccgactcggccttgagtga

SEQ ID NO: 68325 - protein, 257 aa, Neurospora crassa
MLQAIDNIHDRQFLAAELASSATLAAELAQPEIKNILLAASGSVATIKIPEIVKALARHGDKIRIRIILTHFAKHFLGGQSKEQPVYSSLLDYPHVEAIYDDADEWGPEPWQRGASILHIELRRWADILVVAPLSANTLAKIVNGMSDNLLTSVIRAWDTDSSIDNKKKVIMVAPAMNSAMWRHPITAKQIRVLQEEWGVRDPEPSEGDTAGVAVANGWFQVIMPIAKTLACGDTGDGAMASVDTIAEAIESRLGLE

SEQ ID NO: 68326 - DNA, 1209 bp, Synechocystis sp
  CDS (1)..(1209): transl_table=11
atggtaaaggggaaacgcatcctaatcggggtgggtggcggcattgcggcctataaaatctgtgaggtggtgtcccaactattccagcaaggggcggaggtgcgggtaatcctcactgccgaagccgaaaaatttgttactcccttgacctttaccaccctggctcgccatcccgcttacggcgacgcagatttttggcagcccatacatcaccgtcccctccatattgacctgggggaatgggcggatattttcctgattgctcccctcacggcccacactttggcgaaactaggccatggttttgccgatgatctactcagcaatacggtgttagcctccagttgtccgatccttttagcccccgccatgaatacggatatgtgggagcaggaagcggtgcaaaggaatttacaacaattgctgggcgatcgccgttatcatctgttagcccccaatgggggactgttggcctgtgaccggcggggagtggggcgtttggcggaaccggcgcaaattatgcatcgactgcaagcactgctgttcaccggaggtcaggaagatttacggggtaaaaggattcttatcaccgctgggggcacccaggaatatctcgatgcagtgcggtttattggtaatccgtccaccggaaaaatgggtttagctctggcccagtcggccggcgatcggggggcaagggtgactctcatccatggccccataggggatttgcccatacccatgggagtaatcagtatggcggtggtcaacgccgagcaaatggagcaagccttggcccaacaagctcccttggcggattggattgtgatggccgccgctgtggccgatgttaaaccggctcaaacatggacaggcaaaatagctaaacaggatttacccgacagtttgccgttggctccggtaccggatttaattgcccaggtgagcaaacaaaaacggccccatcaattgctagtaggttttgctgcccaagcgggagatattgttaccccagccaaagaaaagttgcagaggaaaaatctagatgtaattgttgccaatcccattgatcagccccaatcaggctttggcaccgacagtaatcaagcggtaattattgaccgccacggttcccaaacggcgatcgccccttgttcaaagctggccatggcccaccgcatttggcaatatctgttggaacggatttga

SEQ ID NO: 68327 - protein, 402 aa, Synechocystis sp; identical to SEQ ID NO: 49343

SEQ ID NO: 68328 - DNA, 540 bp, Streptococcus mutans
  CDS (1)..(540): transl_table=11
atgactaaaaaaattctacttgctgtttctggtagcattgccgcttataaggctgccgacctaagccatcaattaaccaaattaggctatcatgttaatgtcttaatgactaatgccgccaaacagtttattccccctttaaccttgcaagtgctttctaaaaatccagtttattcgaatgttatgaaagaggatgatcctcaagttattaatcatattgcattggcaaaacaagctgatctatttttactagcacctgcctctgccaatacgcttgcccaccttgctcatggttttgcagataatatagtgaccagtgtagctctggctttacctttagaagttcctaaattttttgcccctgctatgaatactaaaatgtatgagaatcctatcacgcaaagcaatattgccttgctaaaaaaattcggatataaggaaatccagcccaagtcaagtgtactagcttgcggtgatgtcggaagcggtgctttagcagatttagataccatcattcaaaaaatagaagaacaattatag

SEQ ID NO: 68329 - protein, 179 aa, Streptococcus mutans
MTKKILLAVSGSIAAYKAADLSHQLTKLGYHVNVLMTNAAKQFIPPLTLQVLSKNPVYSNVMKEDDPQVINHIALAKQADLFLLAPASANTLAHLAHGFADNIVTSVALALPLEVPKFFAPAMNTKMYENPITQSNIALLKKFGYKEIQPKSSVLACGDVGSGALADLDTIIQKIEEQL

SEQ ID NO: 68330 - DNA, 630 bp, Arabidopsis thaliana
  CDS (1)..(630)
atggagaatgggaaaagagacagacaagacatggaagtgaataccacaccgaggaagcctcgtgtactactcgctgcaagtggaagcgtcgctgctatcaaattcggcaatctctgccattgcttcaccgaatgggcagaagtcagagccgtcgttacgaaatcatctctacatttcctcgataaactctctctcccacaagaagtgactctgtatactgatgaagatgaatggtctagctggaacaagatcggtgatcctgtccttcacatcgagcttagacgttgggctgatgttttagtcattgctcctttgtctgctaacaccttaggcaagattgctggtgggctttgtgataatcttctgacttgcattatacgagcttgggactataccaaaccactgtttgttgctccagctatgaatactttgatgtggaacaatcctttcactgaaaggcatcttttgtctcttgatgaactgggaatcacacttattcctcctatcaagaagagacttgcctgtggagactacggtaatggagctatggctgagccctctcttatctattccactgtcagactcttctgggagtctcaggctcatcagcaaaccggtggaactagttaa

SEQ ID NO: 68331 - protein, 209 aa, Arabidopsis thaliana
MENGKRDRQDMEVNTTPRKPRVLLAASGSVAAIKFGNLCHCFTEWAEVRAVVTKSSLHFLDKLSLPQEVTLYTDEDEWSSWNKIGDPVLHIELRRWADVLVIAPLSANTLGKIAGGLCDNLLTCIIRAWDYTKPLFVAPAMNTLMWNNPFTERHLLSLDELGITLIPPIKKRLACGDYGNGAMAEPSLIYSTVRLFWESQAHQQTGGTS

SEQ ID NO: 68332 - DNA, 606 bp, Arabidopsis thaliana
  CDS (1)..(606)
atgaatatggaagtggatacagtaacaaggaagcctcgtatcttactagctgcaagtggaagtgtggcttcaattaagttcagtaatctctgccattgtttctcagaatgggctgaagtcaaagccgtcgcttcaaaatcatctctcaatttcgttgataaaccttctctacctcagaatgtgactctctatacagatgaagatgaatggtctagctggaacaagattggtgatcccgttcttcatatcgagctcagacgctgggctgatgttatgatcattgctcctttgtctgctaacacattagccaagattgctggtgggttatgtgataatctattgacatgtatagtaagagcatgggattatagcaaaccgttgtttgttgcaccggcgatgaacactttgatgtggaacaatcctttcacagaacggcaccttgtcttgcttgatgaacttggaatcaccctaattcctcccatcaagaagaaactggcctgtggagactacggtaatggcgcaatggctgagccttctctgatttattccactgttagactgttctgggagtcacaagctcgtaaacaaagagatggaaccagttga

SEQ ID NO: 68333 - protein, 201 aa, Arabidopsis thaliana
MNMEVDTVTRKPRILLAASGSVASIKFSNLCHCFSEWAEVKAVASKSSLNFVDKPSLPQNVTLYTDEDEWSSWNKIGDPVLHIELRRWADVMIIAPLSANTLAKIAGGLCDNLLTCIVRAWDYSKPLFVAPAMNTLMWNNPFTERHLVLLDELGITLIPPIKKKLACGDYGNGAMAEPSLIYSTVRLFWESQARKQRDGTS

SEQ ID NO: 68334 - DNA, 1596 bp, Candida tropicalis
  CDS (1)..(1596): transl_table=12
atgccttctgataaggatattaaatctcctgctcaaccaaaaaaggaagaagaaattccaaaatcaatcttgactagaatttcatcgccaccacctattttaaatcaaccagatgcaaatataattcatcatcctcaaccgcaagtccctcaatcatcactgaatattccagggattaagttatctcctcaaatttccacttctctggaaaatagagaaattgttatggctggtggggcttatttaaaagaaagaatggaatcaccagattcattaaaccacaaaccaactctattacaacctgataaaagtgaatctattccaagtattgattatactttaaatcctcctaaagaaagtcaacatcataaatctccttctgtacatgcacatttctatgtcgaagaaactttaagacctgttagaaatagatcaagaagtggttcaaattcaaataataatttaactccaattacaagtccacaacatagtgaaccttcttcaattcttaataaagatgcaattaaaagtcaagaaagcttaagagcaacaacaaattcaatttcttcagcagctgctagcaatcaaagcacgccaagatccattattagcggtggtggtggtggtggtggtggtgcgaatactgccacatcttcaaattcaacaacatcaaataccgctctagccgcacagggtaccaccaccaccaccaccacaacaaatagcaatagtaacactacaactactaaaggtgaacagaatagtaatattgatcctcgtttacctcaagatgatgggaaattccacgttttaattggtgtttgtggtgcattatcagttggtaaagttaaattgattgttaataaattacttgaaatttatacatctgataaaatttccattcaagttatattaacaaaatcaagtgaaaatttccttttaccagaaactttaaatgttttagaaaatgttaaaaaagttcgtgtttggacagatattgatgaatggacaacttggaaaacaagactggatcctgttttacatattgaattaagaagatgggctgatatcttattagtttgtccattaactgcaaatactttggctaaaatttctttaggtatatgtgataatttattaactaatgttatcagagcttggaatagttcttatccaattttattagcaccagcaatggatagtcattcttatagttcaagtacaaccaagagacaattgagattaattgctgatgatatgccatggattgaagttttaaaacctctggaaaaagtttttggaagttatggtgatattggtatgggtggtatgactgattggaatgaaatcgtcaatagaatcgtcatgaaattgggtggttatccagaagatgaagatgaagacgaagctgatgactcaaaggataatattgatgaatccgcaattatagatgacgacgatgacgatgatgacgatgatgatgatgacgacgacgacgacgacgatgatgatgatgacgatgatgacgatgaagaagatccaccacaacaacaatcaaccaccgataactccaaagatgaaactactaacctttga

SEQ ID NO: 68335 - protein, 531 aa, Candida tropicalis
MPSDKDIKSPAQPKKEEEIPKSILTRISSPPPILNQPDANIIHHPQPQVPQSSLNIPGIKLSPQISTSLENREIVMAGGAYLKERMESPDSLNHKPTLLQPDKSESIPSIDYTLNPPKESQHHKSPSVHAHFYVEETLRPVRNRSRSGSNSNNNLTPITSPQHSEPSSILNKDAIKSQESLRATTNSISSAAASNQSTPRSIISGGGGGGGGANTATSSNSTTSNTALAAQGTTTTTTTTNSNSNTTTTKGEQNSNIDPRLPQDDGKFHVLIGVCGALSVGKVKLIVNKLLEIYTSDKISIQVILTKSSENFLLPETLNVLENVKKVRVWTDIDEWTTWKTRLDPVLHIELRRWADILLVCPLTANTLAKISLGICDNLLTNVIRAWNSSYPILLAPAMDSHSYSSSTTKRQLRLIADDMPWIEVLKPLEKVFGSYGDIGMGGMTDWNEIVNRIVMKLGGYPEDEDEDEADDSKDNIDESAIIDDDDDDDDDDDDDDDDDDDDDDDDDDDEEDPPQQQSTTDNSKDETTNL

SEQ ID NO: 68336 - DNA, 1716 bp, Saccharomyces cerevisiae
  CDS (1)..(1716)
atgacggatgaaaaagtgaactcagatcagaatatgaacggtaagcagggagttaacttaatttcatccttgcctacaacacaagtgccggtttcaattttgaccaacaaggagagaagaaaaagtattcacgatgaatcaaatttcgaaagatctgatagtcatgaagatcaatcaaaatccaactctaataggaggaatatttacaaaaacgattatagcacaaatttgagggatttctcttttgccaatctgaagcaaaatagtgaaaggaacaaagatggccatgaaatacagatcaacaccagtatgccagctaatacaaatggccagcaaaaaaggttttcaccttcattaccttctgctgtttcatttacggtgcccgaggtggaaaggttgccgtatcatagatattcgatatccaataaacctggaaagcagcagcagcagcaggaacaactgcagcaaaatcaacaacaagaagagcagcaaaaggcacaactgcaggagcaaaatcaacgagcaaaacagcaagaagaggtgaagcaaattcaggagcaagtgcaaaaaaagcaaactgaaagacagcaactgatagacgaaaaggagaggatagcgaatgcaatatttaaggagaacactactaatgatggtactgatatcaggaaacattcggtatcgagtggtacgagcaatagcgaagatgaagtagattcaccttcgatggaaaaaaattctatcgttcatatgccaggtgattttatctacttcaatcccaagtcaaacgcttctaaacctatcactgcaaaggcggcgccattatcggctaataactccacacataaaaacaaggaagttatcactgcacccacagggcctcgtgtacccttcacagagttctttcagaaggaagacgacaagaaattccacattctcattggtgcgacgggctcagttgccacaataaaagtacctctaattattgataaacttttcaagatatatgggcctgagaaaatctctattcagttgattgtcacaaaacccgctgagcattttttgaaagggctcaaaatgtcaacacacgttaaaatttggagggaggaagacgcttgggtattcgacgctgtgaataagaatgatactagcttgagtctgaacttgatattgcaccatgaattaagaaaatgggctgatattttcctgattgcgcctttgtcagctaacacacttgctaaactggccaatggtatatgtaacaatttgctaacttctgtgatgagagattggtcaccactgaccccagtgttgattgcgcctgcaatgaatacattcatgtatatcaatcctatgacaaagaaacacctgacgagtttagtgcaagactatccgttcatccaagttttgaaaccggtggaaaaggtattaatatgcggagatattggtatgggtggtatgagagaatggacagatattgtagagatcgttaggaggagaatcaatgaaatacggaaagctagggacgaggaaactggtgataaagagcaagaacaagaagaacaagagggtgctgacaatgaggacgacgatgatgaggatgacgaagaggatgaggaggacgaggaggaggaagaagctctaaatgaaacagcatccgatgagagcaatgacgaggaagacgaagaggatgaggaagacgtgaaaaccgaagtttaa

SEQ ID NO: 68337 - protein, 571 aa, Saccharomyces cerevisiae
MTDEKVNSDQNMNGKQGVNLISSLPTTQVPVSILTNKERRKSIHDESNFERSDSHEDQSKSNSNRRNIYKNDYSTNLRDFSFANLKQNSERNKDGHEIQINTSMPANTNGQQKRFSPSLPSAVSFTVPEVERLPYHRYSISNKPGKQQQQQEQLQQNQQQEEQQKAQLQEQNQRAKQQEEVKQIQEQVQKKQTERQQLIDEKERIANAIFKENTTNDGTDIRKHSVSSGTSNSEDEVDSPSMEKNSIVHMPGDFIYFNPKSNASKPITAKAAPLSANNSTHKNKEVITAPTGPRVPFTEFFQKEDDKKFHILIGATGSVATIKVPLIIDKLFKIYGPEKISIQLIVTKPAEHFLKGLKMSTHVKIWREEDAWVFDAVNKNDTSLSLNLILHHELRKWADIFLIAPLSANTLAKLANGICNNLLTSVMRDWSPLTPVLIAPAMNTFMYINPMTKKHLTSLVQDYPFIQVLKPVEKVLICGDIGMGGMREWTDIVEIVRRRINEIRKARDEETGDKEQEQEEQEGADNEDDDDEDDEEDEEDEEEEEALNETASDESNDEEDEEDEEDVKTEV

SEQ ID NO: 68338 - DNA, 663 bp, Oryza sativa
  CDS (1)..(663)
atgactacatcagagtcagtacaagaaaccttgggattggatttccctcatcctagcaaacctcgggtcctccttgctgcctctggaagcgtcgctgctataaaatttgagagcctttgccgtagcttctcggaatgggcagaagtcagagccgtcgccaccaaggcttcattacattttattgatagaacgtctctgcctagcaatattattctttacactgatgatgatgaatggtctacctggaagaagataggggatgaagttttgcacattgaactgcgaaaatgggcagatatcatggtgattgcgccattatcagctaataccctagctaagattgctggtggtttatgtgacaacctcttgacatgcatagtgagagcatgggactacagcaaaccactctttgttgccccagctatgaacaccttcatgtggaacaacccgttcaccagtcgtcatcttgagacaatcaacctgctaggtatatctttggtccctcccattaccaaaaggctggcctgtggtgattatggtaatggtgcaatggctgagccttctgtgatcgattccaccgtcaggcttgcttgcaagagacagccacttaatacaaatagttcacctgtggttcctgccggcagaaacctcccatctagctga

SEQ ID NO: 68339 - protein, 220 aa, Oryza sativa
MTTSESVQETLGLDFPHPSKPRVLLAASGSVAAIKFESLCRSFSEWAEVRAVATKASLHFIDRTSLPSNIILYTDDDEWSTWKKIGDEVLHIELRKWADIMVIAPLSANTLAKIAGGLCDNLLTCIVRAWDYSKPLFVAPAMNTFMWNNPFTSRHLETINLLGISLVPPITKRLACGDYGNGAMAEPSVIDSTVRLACKRQPLNTNSSPVVPAGRNLPSS

SEQ ID NO: 68340 - DNA, 645 bp, Glycine max
  CDS (1)..(645)
atggctggttcagaacctgtaagtgcagagggagagagtatggctgtggatgctgccccaaggaagccccggattctacttgctgctagtgggagtgttgctgctgtcaaatttgcaaatctttgtcattgtttctctgaatgggcagatgtaagagcagtttcctcaagtggatctttgcatttcattgatagagcatcaatgcccaaggatgtaattctatacacggatgaggatgaatggtctagttggaagaaattaggtgatagtgtgcttcacattgagcttcgcaaatgggcagatatcatggtcatcgctccattatcggcaaacacccttggcaagattgctggagggttgtgtgacaatctacttacatgtatcgttcgagcctgggactacagcaagccattctttgttgcaccagccatgaacactttgatgtggaacaatcctttcactgagcggcatttcatctccattgatgagcttggcatttctctcatcccgcctgttacaaagaggttagcttgtggggattatggcaatggtgccatggctgaaccctctaccatttactcaactgtaaggctcttctatgagtcaaaggctcagcaaggtagagctgtggtaaccttaaggtga

SEQ ID NO: 68341 - protein, 214 aa, Glycine max
MAGSEPVSAEGESMAVDAAPRKPRILLAASGSVAAVKFANLCHCFSEWADVRAVSSSGSLHFIDRASMPKDVILYTDEDEWSSWKKLGDSVLHIELRKWADIMVIAPLSANTLGKIAGGLCDNLLTCIVRAWDYSKPFFVAPAMNTLMWNNPFTERHFISIDELGISLIPPVTKRLACGDYGNGAMAEPSTIYSTVRLFYESKAQQGRAVVTLR

SEQ ID NO: 68342 - DNA, 648 bp, Triticum aestivum
  CDS (1)..(648)
atgactacatcagaacctgtacaggaaagctgggagctggaacccagcaggcctcgggtcctccttgctgtttcagggagtgtagctgctataaaattcgagagcctctgccgtatcttctccgagtgggcagaagtccgagctgtggccaccaagtcatcattgcactttgttgatagatcatctctgcctagcgacgtcattctttacaccgatgatgatgagtggtctacctggacaaagataggagacgaggttctacacatagagctgcgaaagtgggcagacatcatggtgatcgcccccttatcagcaaacaccctggccaagatcgccagcgggttatgcgacaacctcctgacgtgcattgtccgagcatgggactacaagaagccgatcttcgccgcgccagccatgaacaccttcatgtggaacaacccgttcacggcgcgccacatcgagacgatcaaccaactcggcatttccctggtcccgcccacaacgaagaggctggcctgcggcgactacggaaacggcgcgatggctgagccctcgcagatccacacgaccgtgaggctcgcgtgcaagtcgcagacgttcggcatgggcatttcgcctgtgaacccttccagcagccgccctgtctag

SEQ ID NO: 68343 - protein, 215 aa, Triticum aestivum
MTTSEPVQESWELEPSRPRVLLAVSGSVAAIKFESLCRIFSEWAEVRAVATKSSLHFVDRSSLPSDVILYTDDDEWSTWTKIGDEVLHIELRKWADIMVIAPLSANTLAKIASGLCDNLLTCIVRAWDYKKPIFAAPAMNTFMWNNPFTARHIETINQLGISLVPPTTKRLACGDYGNGAMAEPSQIHTTVRLACKSQTFGMGISPVNPSSSRPV

SEQ ID NO: 68344 - DNA, 573 bp, Zea mays
  CDS (1)..(573)
atggccgcccaccaggactcggcggcagcggggggcaggcctcctcgtcgtcctcgcgtcctcctggcagcctccggcagcgtggccgccatcaagttcgaggtcctctgccgcagcgtcgccgagtgggcggatgtccaggcggtggcgaccgcgtccgcgctggaattcatcgatgtggcctccttccccggcggcgtccctctctacaccgacgaccaggagtggtctagctggaagcgggtcggcgacaaggtcctgcacatcgagctgcgccggtgggccgacgtcctggtcatcgcgccgctatcggccaacaccctcgcaaaggtcgccggcgggctgtgcgacaacctcctcacctgcgtcgtgcgcgcctgggactacagcaagcccgtttacgtcgcgccggccatgaacaccttcatgtgggacaaccccttcaccgcgcgccacctcgccgtcctgcgcgacctcggcatgtccgtcgtcccgccggtcaatggcgcgatggcggagccgtcggagatctgcaagaccctcatgctcttcttcggtccgcaacatctttag

SEQ ID NO: 68345 - protein, 190 aa, Zea mays
MAAHQDSAAAGGRPPRRPRVLLAASGSVAAIKFEVLCRSVAEWADVQAVATASALEFIDVASFPGGVPLYTDDQEWSSWKRVGDKVLHIELRRWADVLVIAPLSANTLAKVAGGLCDNLLTCVVRAWDYSKPVYVAPAMNTFMWDNPFTARHLAVLRDLGMSVVPPVNGAMAEPSEICKTLMLFFGPQHL

SEQ ID NO: 68346 - DNA, 600 bp, Helianthus annuus
  CDS (1)..(600)
atgcaagtggagagtgctactagaaaaccgagaattctgcttgccgcaagtggaagtgtggctgcgataaagttcgggatcctgtgcggctgtttttcagattgggcggatgtaaaagttgttgcaacgcaggcggctttacattttattgatagaacaacactcccaaaagatgtggttctatatacagatgagcatgaatggtcaacttggtcaaagatcggagatacggtgcttcacattgagcttcgtcaatgggctgatattatggtaatcgcaccattgtcggcaaatacactcggcaagatagcaggtggactatgtgacaacttgctgacaagcataattcgagcgtgggattatgaaaaaccgatattcgtagcgccagctatgaacacgtatatgtggacgaatcctttcactgaacggcatcttatgacggttgatgaacttggaattattcttatacccccagtgtcgaaaaggcttgcttgtggagactacggaaccggtgcaatggccgagccttcactcatcttcaatactgtaagactcttcatggaatcccgacaaaatgcaagtggtggtagaacacaatga

SEQ ID NO: 68347 - protein, 199 aa, Helianthus annuus
MQVESATRKPRILLAASGSVAAIKFGILCGCFSDWADVKVVATQAALHFIDRTTLPKDVVLYTDEHEWSTWSKIGDTVLHIELRQWADIMVIAPLSANTLGKIAGGLCDNLLTSIIRAWDYEKPIFVAPAMNTYMWTNPFTERHLMTVDELGIILIPPVSKRLACGDYGTGAMAEPSLIFNTVRLFMESRQNASGGRTQ

SEQ ID NO: 68348 - DNA, 618 bp, Brassica napus
  CDS (1)..(618)
atggagaacggcaaacgagacagagaagacatggaagtgcaaaccgcaccacggaagccacgcgtcctcctcgccgcgagcggaagcgtcgccgccatcaaattcggcaacctctgccactgcttcgcagaatgggccgaagtgagagccgtcgtctcgaaatcgtctctccacttcctcgacaggctctccctcccgcgggaagtcactctgtacaccgacgaagacgagtggtcaagctggaacaagatcggcgatccagtacttcacatcgagctcagacgctgggctgacgtcatggtcatagctcctttgtctgctaacacattagccaagattgctggtgggctgtgtgataatcttctgacttgtatcgtacgagcttgggattatagcaaaccggtcttcgttgcgcctgcgatgaatactttgatgtggaacaatcctttcacggagaggcatctttgttcgcttgatgagcttgggatcacgctcattcctcccatcaagaagagattggcgtgtggtgactatggtaatggtgcaatggctgagccttctttgatttattccactgttagactcttctgggagtcgcaggttcgtcagcaaagctga

SEQ ID NO: 68349 - protein, 205 aa, Brassica napus
MENGKRDREDMEVQTAPRKPRVLLAASGSVAAIKFGNLCHCFAEWAEVRAVVSKSSLHFLDRLSLPREVTLYTDEDEWSSWNKIGDPVLHIELRRWADVMVIAPLSANTLAKIAGGLCDNLLTCIVRAWDYSKPVFVAPAMNTLMWNNPFTERHLCSLDELGITLIPPIKKRLACGDYGNGAMAEPSLIYSTVRLFWESQVRQQS

SEQ ID NO: 68350 - DNA, 630 bp, Brassica napus
  CDS (1)..(630)
atggagaacgggaaaagagacagagaagacatggaagtgcaaccctcccctagaaagccccgcgtactcctcgcagcaaccggaagcgtcgccgccatcaaattcggcaacctctgccactgcttcacagagtgggcggaagtgagagccgtcgtctcgaaatcgtctctccacttcctcgacaagctctctctcccacaggaagtgactctctacaccgacgaagacgagtggtcgagctggaacaagatcggcgatcccgtgcttcacatcgagctcagacgctgggctgacgtcatggtcatcgctcctttgtctgctaacactttagccaagatagctggtgggatgtgtgataatcttctgacttgtatcataagagcttgggattatagcaaaccgcttttcgttgcgccggctatgaatactttgatgtggaacaatccttttacggagaggcatcttttgtcgcttgatgagcttggaatcactcttattcctccgatcaagaagaggttggcttgtggtgactatggtaatggcgcgatggctgagccgtctcttatctattccactgttagactcttctgggagtctcaggctcatcagcaaagtggtggaactagttaa

SEQ ID NO: 68351 - protein, 209 aa, Brassica napus
MENGKRDREDMEVQPSPRKPRVLLAATGSVAAIKFGNLCHCFTEWAEVRAVVSKSSLHFLDKLSLPQEVTLYTDEDEWSSWNKIGDPVLHIELRRWADVMVIAPLSANTLAKIAGGMCDNLLTCIIRAWDYSKPLFVAPAMNTLMWNNPFTERHLLSLDELGITLIPPIKKRLACGDYGNGAMAEPSLIYSTVRLFWESQAHQQSGGTS

SEQ ID NO: 68352 - DNA, 630 bp, Brassica napus
  CDS (1)..(630)
atggagaacgggaaaagagacagagacgacatggaagtgcaaccctcccctagaaagccccgcgtactcctcgcagcaaccggaagcgtcgccgccatcaaattcggcaacctctgccactgcttcacagagtgggcggaagtgagagccgtcgtctcgaaatcgtctctccacttcctcgacaagctctctctcccacaggaagtgactctctacaccgacgaagacgagtggtcgagctggaacaagatcggcgatcccgtgcttcacatcgagctcagacgctgggctgacgtcatggtcatcgctcctttgtctgctaacactttagccaagatagctggtgggatgtgtgataatcttctgacttgtatcataagagcttgggattatagcaaaccgcttttcgttgcgccggctatgaatactttgatgtggaacaatccttttacggagaggcatcttttgtcgcttgatgagcttgggatcactcttattcctccgatcaagaagaggttggcttgtggtgactatggtaatggcgcgatggctgagccgtctcttatctattccactgttagactcttctgggagtctcagggtcatcagcaaagtggtggaactagttaa

SEQ ID NO: 68353 - protein, 209 aa, Brassica napus
MENGKRDRDDMEVQPSPRKPRVLLAATGSVAAIKFGNLCHCFTEWAEVRAVVSKSSLHFLDKLSLPQEVTLYTDEDEWSSWNKIGDPVLHIELRRWADVMVIAPLSANTLAKIAGGMCDNLLTCIIRAWDYSKPLFVAPAMNTLMWNNPFTERHLLSLDELGITLIPPIKKRLACGDYGNGAMAEPSLIYSTVRLFWESQGHQQSGGTS

SEQ ID NO: 68354 - DNA, 636 bp, Glycine max
  CDS (1)..(636)
atggctggttcagaacctgtaagggcagagggagagagtatggctgtggatgctgccccaaggaagccccggattctacttgctgctagtgggagtgttgctgctgtcaaatttgcaaatctttgtcactgtttctctgaatgggcagatgtaagagcagtttccacaagtgcatctttgcatttcattgatagagcagcaatgcccaaggatgtaattctatacacggatgacaatgaatggtctagttggaagaaattaggtgatagcgtgcttcacattgagcttcgcaaatgggctgatatcatggtcatcgctccattatcagcaaacacccttggcaagattgctggagggttgtgtgacaatctactgacatgcatcgttcgagcctgggactacagcaagccattctttgttgcaccagccatgaacacttttatgtggaacaatcctttcacagagcggcatttcatctccattgatgagcttggcatttctctcatcccgcctgttacaaagaggttagcttgtggggattatggcaatggtgccatggctgaaccctctaccatttactcaactgtaaggctcttctatgagtcaaaggctcagcaaggtaatggtgatatctga

SEQ ID NO: 68355 - protein, 211 aa, Glycine max
MAGSEPVRAEGESMAVDAAPRKPRILLAASGSVAAVKFANLCHCFSEWADVRAVSTSASLHFIDRAAMPKDVILYTDDNEWSSWKKLGDSVLHIELRKWADIMVIAPLSANTLGKIAGGLCDNLLTCIVRAWDYSKPFFVAPAMNTFMWNNPFTERHFISIDELGISLIPPVTKRLACGDYGNGAMAEPSTIYSTVRLFYESKAQQGNGDI

SEQ ID NO: 68356 - DNA, 663 bp, Zea mays
  CDS (1)..(663)
atggctacatcagagccagtacaagagagtttggtggtgcactactcacaacctagtaggccccgggtcctccttgctgcttcaggaagtgtagccgctataaaatttgagagcctttgccgtagcttctctgagtgggcggatgtccgagctgtggccaccacgtcatccttgcacttcgttgatagatcatctctaccaagtggcatcgttctttacactgatgatgatgaatggtcaacctggaagaagataggagatgaagtcttacacattgagctgcggaaatgggcagacgttatggtgatcgctccattgtcagcaaataccctggctaagatcgccggtgggttatgcgacaacctcttgacctgcatcgtgagagcgtgggactacagcaaaccgctctttgttgccccagccatgaacacgttaatgtggaacaacccattcacggagcggcatcttcacacaatcaaccaactgggcatagccttgatccccccagttaccaaaaggctggcctgtggcgattacgggaacggcgcaatggccgaaacctcgcagatccatacttccgtgaggctcgcgtgcaagacgcaaccacacgatgcaggcagttcactcgcgggtcctgtcagtaataaccggccatctagctga

SEQ ID NO: 68357 - protein, 220 aa, Zea mays
MATSEPVQESLVVHYSQPSRPRVLLAASGSVAAIKFESLCRSFSEWADVRAVATTSSLHFVDRSSLPSGIVLYTDDDEWSTWKKIGDEVLHIELRKWADVMVIAPLSANTLAKIAGGLCDNLLTCIVRAWDYSKPLFVAPAMNTLMWNNPFTERHLHTINQLGIALIPPVTKRLACGDYGNGAMAETSQIHTSVRLACKTQPHDAGSSLAGPVSNNRPSS

SEQ ID NO: 68358 - DNA, 20 bp, Artificial sequence
  primer
atggccgcccaccaggactc

SEQ ID NO: 68359 - DNA, 25 bp, Artificial sequence
  primer
ctaaagatgttgcggaccgaaaaag

SEQ ID NO: 68360 - protein, 235 aa, Artificial sequence
  consensus sequence
  Variant (2)..(3): Xaa in position 2 to 3 is any amino acid
  Variant (5)..(6): Xaa in position 5 to 6 is any amino acid
  Variant (8)..(25): Xaa in position 8 to 25 is any amino acid
  Variant (26)..(30): Xaa in position 26 to 30 is any or no amino acid
  Variant (32)..(36): Xaa in position 32 to 36 is any amino acid
  Variant (38)..(61): Xaa in position 38 to 61 is any amino acid
  Variant (62)..(95): Xaa in position 62 to 95 is any or no amino acid
  Variant (98)..(98): Xaa in position 98 is any amino acid
  Variant (100)..(102): Xaa in position 100 to 102 is any amino acid
  Variant (105)..(108): Xaa in position 105 to 108 is any amino acid
  Variant (111)..(112): Xaa in position 111 to 112 is any amino acid
  Variant (114)..(116): Xaa in position 114 to 116 is any amino acid
  Variant (118)..(119): Xaa in position 118 to 119 is any amino acid
  Variant (121)..(121): Xaa in position 121 is any amino acid
  Variant (123)..(124): Xaa in position 123 to 124 is any amino acid
  Variant (126)..(126): Xaa in position 126 is any amino acid
  Variant (128)..(133): Xaa in position 128 to 133 is any amino acid
  Variant (135)..(137): Xaa in position 135 to 137 is any amino acid
  Variant (138)..(156): Xaa in position 138 to 156 is any or no amino acid
  Variant (158)..(160): Xaa in position 158 to 160 is any amino acid
  Variant (166)..(167): Xaa in position 166 to 167 is any amino acid
  Variant (169)..(173): Xaa in position 169 to 173 is any amino acid
  Variant (175)..(190): Xaa in position 175 to 190 is any amino acid
  Variant (191)..(211): Xaa in position 191 to 211 is any or no amino acid
  Variant (213)..(213): Xaa in position 213 is any amino acid
  Variant (214)..(224): Xaa in position 214 to 224 is any or no amino acid
  Variant (226)..(226): Xaa in position 226 is any amino acid
  Variant (228)..(234): Xaa in position 228 to 234 is any amino acid
GXXAXXKXXXXXXXXXXXXXXXXXXXXXXXTXXXXXFXXXXXXXXXXXXXXXXXXXXXXXXXXXXXXXXXXXXXXXXXXXXXXXXXXXXXXXXXXHIXLXXXADXXXXAPXXAXXXAXXAXGXXDXLXXXXXXAXXXXXXXXXXXXXXXXXXXXXXPXXXAPAMNXXMXXXXXTXXXXXXXXXXXXXXXXXXXXXXXXXXXXXXXXXXXXXPXXXXXXXXXXXXGXGXXXXXXXI

SEQ ID NO: 68361 - protein, 35 aa, Artificial sequence
  protein pattern
  Variant (2)..(2): Xaa in position 2 is Ile or Val
  Variant (3)..(3): Xaa in position 3 is any amino acid
  Variant (4)..(4): Xaa in position 4 is Ile, Leu or Val
  Variant (5)..(8): Xaa in position 5 to 8 is any amino acid
  Variant (10)..(10): Xaa in position 10 is any amino acid
  Variant (11)..(11): Xaa in position 11 is Phe, Ile, Leu, Met or Val
  Variant (12)..(12): Xaa in position 12 is Ile, Leu or Val
  Variant (13)..(13): Xaa in position 13 is Ala, Ile, Leu or Val
  Variant (16)..(17): Xaa in position 16 to 17 is any or no amino acid
  Variant (19)..(26): Xaa in position 19 to 26 is any amino acid
  Variant (27)..(28): Xaa in position 27 to 28 is any or no amino acid
  Variant (30)..(30): Xaa in position 30 is any amino acid
  Variant (31)..(31): Xaa in position 31 is Ala, Cys, Asp, Gly or Ser
  Variant (32)..(32): Xaa in position 32 is Asp, Asn, Pro or Ser
  Variant (33)..(33): Xaa in position 33 is Asp, Glu, Asn or Thr
  Variant (34)..(34): Xaa in position 34 is Ile, Leu or Met
  Variant (35)..(35): Xaa in position 35 is Ala, Ile, Leu, Pro or Val
HXXXXXXXDXXXXAPXXAXXXXXXXXXXGXXXXXX

SEQ ID NO: 68362 - protein, 13 aa, Artificial sequence
  protein pattern
  Variant (5)..(6): Xaa in position 5 to 6 is any amino acid
  Variant (8)..(8): Xaa in position 8 is Trp or Tyr
  Variant (9)..(12): Xaa in position 9 to 12 is any amino acid
  Variant (13)..(13): Xaa in position 13 is Asn, Thr or Val
PAMNXXMXXXXXX

SEQ ID NO: 68363 - DNA, 1083 bp, Zea mays
  CDS (1)..(1083)
atgcagcagcacgaggaggagcaggagcggccgccgactgtacgcgcggtcaccatccccttcgccgacctcagggtgccggacagggaccttggcgacaagatcgaggaaggtctgggtccccatgggctcggcatcgtcaccattgccgatgtacctgagtttccagagctaagaaaaaggctgctgcgcttggcaccaaggattgcaaaccttcctgaagaggtgaagaaacagcttgaagatccagatagcagatataactttgggtggagtcatgggaaggagaaactcgagtccgggaaacttgacacatttaaaggttccttttatgcgaaccctgttttggatgtccctactactgatgatgtgcttgtaagtaggtatccatcatattgccgaccaaatatatggccaaacgataatcttcctgagcttgagatagcatttaaagatcttgggaagctgatgatggaagttggtttgatgttggctcatcattgtgatcgctatgtaatgaggcaaggagtagggtcatatgatggtgacagtcttgagcagacaattgctcgttcaaggtgtcacaagggtcgtctgttgtactatttcccacgacagtttagcaagcagacagacttcgagtcggtttcatcatggtgtggatggcacactgatcatggatctctaacagggcttacatgtggcttgtttacgaagaattctatggaggtaccatgtccagacagtgcagctggactatacattcggactcgtgataaccaagttgttaaggttgtgttcgacgaggatcagctggcttaccaaatcggggaaactactgaaatactgtcaagaggttatctatgtgcaaccccacactgtgtgcaggcacccagcagcgaaaatgcttcaaatgttgaccgctctacttttgccttgttcatgcaaccagattggaatgagaagctgaagtttccaagcgaaatcccctatcaccaagagttgattccaccaaacggaacgctgactttcggggagtactcagaaaggctggtagacaagtattaccagacaacaacgtag

SEQ ID NO: 68364 - protein, 360 aa, Zea mays
MQQHEEEQERPPTVRAVTIPFADLRVPDRDLGDKIEEGLGPHGLGIVTIADVPEFPELRKRLLRLAPRIANLPEEVKKQLEDPDSRYNFGWSHGKEKLESGKLDTFKGSFYANPVLDVPTTDDVLVSRYPSYCRPNIWPNDNLPELEIAFKDLGKLMMEVGLMLAHHCDRYVMRQGVGSYDGDSLEQTIARSRCHKGRLLYYFPRQFSKQTDFESVSSWCGWHTDHGSLTGLTCGLFTKNSMEVPCPDSAAGLYIRTRDNQVVKVVFDEDQLAYQIGETTEILSRGYLCATPHCVQAPSSENASNVDRSTFALFMQPDWNEKLKFPSEIPYHQELIPPNGTLTFGEYSERLVDKYYQTTT

SEQ ID NO: 68365 - DNA, 1580 bp, Glycine max
  CDS (43)..(1191)
  misc_feature (16)..(16): n is a, g, c or t
  misc_feature (18)..(18): n is a, g, c or t
cgtctttatcccttgngnaacaaaaacggctgcgagagtctcatgggagtggagacgctgaccctctttggctccccccaccctatttctcaaaacgctgtcgttccccgccacgccatgtcccgctcctccgaaacctcctttcccaccctcactactatctccatctctttctctcaactccaagataagaacgccgacttgtcattcaagattgaagaaggctttggacccaatggattggggattctatccgtcactgatgttccaggatactcttcattgcgcagaaatctattgcatcttgcaccaagattggcaaatcttcccaaagaagtgaaggaggatcttgaagatcctcatagtaggtataattttggttggagtcatgggaaagagaaacttgaatctgggaagccagatattttaaaaggatctttctatgccaatcccatacttgatacacctacaacagaggcttctttgatacaacggcatccatctgggtgcggctcaaatatatggcctagaaacgctttaccagaacttgaagtggctttcaaagcacttgggaagctgatatttgacattggattgatgttggcatatcactgcgatcaatatgtatccaaagggatgaaaattcacaaggatgaaggtctggaatcaatacttcgttgctcccgctgtcataaaggacgtttgctatattattttccttcacaacagggagtcccagatggcaactctttgtcttcttggtgtggatggcatactgaccacggttcactgacaggtctgacttgtggtatgtttacgagagatggtgtagaaattgcttgccctgatagtgctgctggcctctatattcgaacaagaaataatcaaattatcaaagttgtctatggaaaagatgatatagcataccaaattggtgaaaccactgaaatactttctggaggttatctttgtgcaacacctcattgtgttcaggctcctacgggggaggagtcctctggtattgagcgctcgacatttgcgttattcatgcagcctgactgggatgaaaagctcaattttcccgaggaagttcacattcataaagagcttattccatcaaatgctgcccttacttttggagagtattcagagatgctgctcgacaaatattaccaccaaaaacagaactaacttgttacttctctgccaacaagcataactggttgaagagacttagcttgttaattcatgagactaaaataaaattgtgtgaatgtgtagtcgctattggataatagcaaaagaaaaggataactgggtaaggttacaagtgtaactggttgaagagacttagcctgttaattcacgggtaaatgtgtagtcgctattgggtaatagcaaaagaaaaagaaaatttttatagattacgtggaatagcaaaaaaattccccggggacagaaatatagcccatttaatttagttaacaggatattaactcatgggatggaatgaaagttactgtacaatccaatacttatgttctttttctttaatgggaagtaaagcaatgatatcgcct

SEQ ID NO: 68366 - protein, 382 aa, Glycine max
MGVETLTLFGSPHPISQNAVVPRHAMSRSSETSFPTLTTISISFSQLQDKNADLSFKIEEGFGPNGLGILSVTDVPGYSSLRRNLLHLAPRLANLPKEVKEDLEDPHSRYNFGWSHGKEKLESGKPDILKGSFYANPILDTPTTEASLIQRHPSGCGSNIWPRNALPELEVAFKALGKLIFDIGLMLAYHCDQYVSKGMKIHKDEGLESILRCSRCHKGRLLYYFPSQQGVPDGNSLSSWCGWHTDHGSLTGLTCGMFTRDGVEIACPDSAAGLYIRTRNNQIIKVVYGKDDIAYQIGETTEILSGGYLCATPHCVQAPTGEESSGIERSTFALFMQPDWDEKLNFPEEVHIHKELIPSNAALTFGEYSEMLLDKYYHQKQN

SEQ ID NO: 68367 - DNA, 1298 bp, Zea mays subsp. mays
  CDS (73)..(1149)
aatagcgacggctcagcatagagacaagtccagcgctcaagagagagagagcaagcctttcggcctcgcgtgatgcagcagcagcagccgtccgtccgcgccgtcaccatccccttcgccgaccttaaggatcggggcaaggacctgggcggcttcatcgaggaaggcttcgggcctcaggggctcggcatcgtctccatcgccggcgtacccggttacccagagctcaggaaaaggctgctgcgcttggcgccaaggatcgtcagccttcctgatgatgtgaagaaacaactggaggacccagatagcagataccactttggttggagtcgtgtagaagagaaattcgagtctgaaagatgggacacagccaaaggctcctacttggccaacccagtttttgatgtcccaacaactgatgatgagcttgtaactagatacccatcatactgccgaccaaacatatggccaaaggatcatcttcctgagcttgaaatagcattcaaaggtcttggaaaactgatgttggaagttggcttgatgttggctcatcattgtgatcgctatgtaatacagcgaggggtgggacagtacattggtgaaagccttgagaagacacttgctaggtcaaggtgtcccaagggtcgtctgctgtactacttccccaaatcgtttagcaaacaggacgaagtttcgtcatggtgtggatggcatactgactatggatttttgacaggacttacatgtggcttgttcacgagaaaatcagaggaggtcccctgtcctgatattggaactgggctgtatgttcggactcgtgataatcaagtcgtcaaggtcacacttgtggatgatgagttggtctaccaaattggggagactgctgaaatactatcaagagggcatctatgtgcaaccccacactgtgtgaaggctcccagcagcgaagatgcttctgacgttggtcgctcaactttcgttctgtttattcagccaaactgggatgagccgctgaagcttcctagtgaaatacgctatcaccaggagtgcattccaccaaccaggacacttgcgtacggcgagtactccgaaagagtcttggcgagttttagcggcaagagcgtggaacaaaccttgatgccacagtaagaggctccagccagatgaatactccctctgtttctttttatttgtcgctggatagttcaattttatactatccagcgacaattaaaacgaaacggagggagtatatcatatgtatgataccataccattcaagctacagataagtggac

SEQ ID NO: 68368 - protein, 358 aa, Zea mays subsp. mays
MQQQQPSVRAVTIPFADLKDRGKDLGGFIEEGFGPQGLGIVSIAGVPGYPELRKRLLRLAPRIVSLPDDVKKQLEDPDSRYHFGWSRVEEKFESERWDTAKGSYLANPVFDVPTTDDELVTRYPSYCRPNIWPKDHLPELEIAFKGLGKLMLEVGLMLAHHCDRYVIQRGVGQYIGESLEKTLARSRCPKGRLLYYFPKSFSKQDEVSSWCGWHTDYGFLTGLTCGLFTRKSEEVPCPDIGTGLYVRTRDNQVVKVTLVDDELVYQIGETAEILSRGHLCATPHCVKAPSSEDASDVGRSTFVLFIQPNWDEPLKLPSEIRYHQECIPPTRTLAYGEYSERVLASFSGKSVEQTLMPQ

SEQ ID NO: 68369 - DNA, 1212 bp, Arabidopsis thaliana
  CDS (1)..(1212)
atggcagaaacagagattcttgagccctatcaactgtcgttctcggatcttcttttgtcctctcgtaatcgctctcaatggatctcgaaaaatgtgatggacgctcttggccccaccggtcctggtctcctttgtatcaccggcgttcttggctccgcctttctccgccgtaaactccttcctatggctcggaagctggctctgctcgatccggacaagcggaaactcattctcatggagcaccacttgggtagcgacgttcctctcaagaatccagaacgagatgtctcctcttttgcaatgcagctcaattatgaaagaacaacttataaatcctcactgggaaagctgtggttcgatgaggctggatcaaaactggacttgcaggaggatgatgatgatgctttcacaaatcttggtggtgcttttaaagaactcgggttctgcatgagggagttgggcttgtccatagctcgtctatgcgacagggagattggcggaggcttgctggaggagagcttactggattcttgcacagccaaaggacgtctcatacattaccactccgctgctgataaatatgctctcagagaatcccagaggagaaaccaatctggtaaccgagtatcaagcaagaggagagtccagaacgctgctgagcaagagctgaaccgtagaaatggagctggtttgagtgggagtcacttcaatctgtggcagcagtggcattacgattatggcatctttactgttctcacggatcctatgtttctatcgccgtattcctatcaggaattcagtttgatgagcagccattcttacctgcagatctatcatcccagcaagaacaagttctacatggtcaagactccacaagacagttttttggtccaaatcggagaatctgctgatattttgtccaaagggaagctacggtcgacccttcactgtgtgtgcaaaccagagaagctggatcacgtaagccgtgagacatttgttgtcttcttgcacccaaagtggagccaaactttctcagtctcagaatatacaatggaacatctaaggtcggatgaggtcgtccctagaccagatttacagaatattgttccacctctatcgtctcggttaagggatgggatgacttttgccgagttttcacgtgaaacgacaaagcagtactacggagggaatggtttgcaatctaatagatag

SEQ ID NO: 68370 - protein, 403 aa, Arabidopsis thaliana
MAETEILEPYQLSFSDLLLSSRNRSQWISKNVMDALGPTGPGLLCITGVLGSAFLRRKLLPMARKLALLDPDKRKLILMEHHLGSDVPLKNPERDVSSFAMQLNYERTTYKSSLGKLWFDEAGSKLDLQEDDDDAFTNLGGAFKELGFCMRELGLSIARLCDREIGGGLLEESLLDSCTAKGRLIHYHSAADKYALRESQRRNQSGNRVSSKRRVQNAAEQELNRRNGAGLSGSHFNLWQQWHYDYGIFTVLTDPMFLSPYSYQEFSLMSSHSYLQIYHPSKNKFYMVKTPQDSFLVQIGESADILSKGKLRSTLHCVCKPEKLDHVSRETFVVFLHPKWSQTFSVSEYTMEHLRSDEVVPRPDLQNIVPPLSSRLRDGMTFAEFSRETTKQYYGGNGLQSNR

SEQ ID NO: 68371 - DNA, 960 bp, Arabidopsis thaliana
  CDS (1)..(960)
atgtctctctcgtcggactccaccgttcctactgtttccacggtcaccatatcctactcagagctcaaggagagcaacatagatttgtctgcaaggattgaagaaggatttggacctaatggacttggaatcctctctgttaaagatgttcctggatattctgctttaagacagaatctacttcagcttgcacctaggttagctggtcttcctgaagaggtgaagagggagcttgaagatcctcatagtaggtataattttggttggagtcatggcaaggagaaacttgaatccgggaagcttgacatgctgaagggttcttactatgctaatcctctacaagatgtacctacgagtaattcatatgaaatacagcggtatccatcgtattgtggatcaaatatatggccaaggaattctttaccggaacttgaaggagctttcaaagctcttggtaaactgatgttcgaagttgggctaatggtagcttaccactgtgatcaatatgtgtcaaagggtataaaacaacatgaaaagcaaaatcttgaaaagatactacttggctctcggtgtcacaaaggacggctgctttattatttccctgcacaagagagctctacgcatgacaacgattccatctcatcttggtgtggatggcatacagaccatggttcactcacaggtcttactcgagcaatattttctagagattcagttgaagtaccttgcccagatcctgcttctggcttatacatacaaacacgatcaggtcagatcgttaaggttgtgtatggggaagatgaaatagcataccaaataggcgagacaacatcaattctgtctagtggttatctttgtgctacacctcattgtgttcgggcgccacaaggagaagaggcgcgtggtctagagcgatcgacattcgcgttgttcatgcaacctgactgttacaatacatga

SEQ ID NO: 68372 - protein, 319 aa, Arabidopsis thaliana
MSLSSDSTVPTVSTVTISYSELKESNIDLSARIEEGFGPNGLGILSVKDVPGYSALRQNLLQLAPRLAGLPEEVKRELEDPHSRYNFGWSHGKEKLESGKLDMLKGSYYANPLQDVPTSNSYEIQRYPSYCGSNIWPRNSLPELEGAFKALGKLMFEVGLMVAYHCDQYVSKGIKQHEKQNLEKILLGSRCHKGRLLYYFPAQESSTHDNDSISSWCGWHTDHGSLTGLTRAIFSRDSVEVPCPDPASGLYIQTRSGQIVKVVYGEDEIAYQIGETTSILSSGYLCATPHCVRAPQGEEARGLERSTFALFMQPDCYNT

SEQ ID NO: 68373 - DNA, 1074 bp, Gibberella zeae PH-1
  CDS (1)..(1074)
atggttgctcaggcccaagctatttccgtgtctctcaatgacctcaaggatggcaacatcccattcgggactcttaagcaagcctttggtccggactctcttggaattctcgtggtaaaggatgtcccccaagagtttcctgaacttagacatcaggctctttcctacgcttcatatctcgaaaaacttgagaatgctcgggcaaagtatctgactggctggtctctcggcaaggagactctcaagaatggtcaagtcgacaccttcaagggctcatactacgccaactgcgcattctacatcgacccatctctcgaatgcgccaagcctacccaggagttctctactgataacttccccgagtatctgtcccccaacgtctggccgccagaggatgtactcccaggcttcaagccctccgtgacgtctctgtgccgtctcatcattgatgtagccgttctcgtcgctcgtgcatgcgatcgcttcgctcaagaggatatcccaggataccccgctggatacctcgagcacgtcgtcagcacgtccagcaccaccaaggcccgtcttctgcactactatcctcaagagtctgagccatctgctgctggtggcgatgaggatgactggtgtgctacacatcttgaccatggatgtttgacgggtcttacatcagccatgttcatcgacgagcataaaaccagcccttctgtaccagatgttacaaatctgaacggtgcttctctaccacctctcgaggaacttccctcatctcctgatccgtcagctggtttgtacatcaagtctcgcaccggcgaaacagtccaagtcaagatccctcgcgactgcatcgcattccagacaggtgaagccctggagcgtattactgctggtcgctttaaggctgtgcctcactttgttagaggtgtacgagctagtgtcagtgatggaaaggttgctcgtaacacgttggcggtctttactcagcccaacctgggagaagaggttgatattgagcaacatcttacatttggagagtttgcccgcggtattgttaacaagaacactgtatcgtaa

SEQ ID NO: 68374 - protein, 357 aa, Gibberella zeae PH-1
MVAQAQAISVSLNDLKDGNIPFGTLKQAFGPDSLGILVVKDVPQEFPELRHQALSYASYLEKLENARAKYLTGWSLGKETLKNGQVDTFKGSYYANCAFYIDPSLECAKPTQEFSTDNFPEYLSPNVWPPEDVLPGFKPSVTSLCRLIIDVAVLVARACDRFAQEDIPGYPAGYLEHVVSTSSTTKARLLHYYPQESEPSAAGGDEDDWCATHLDHGCLTGLTSAMFIDEHKTSPSVPDVTNLNGASLPPLEELPSSPDPSAGLYIKSRTGETVQVKIPRDCIAFQTGEALERITAGRFKAVPHFVRGVRASVSDGKVARNTLAVFTQPNLGEEVDIEQHLTFGEFARGIVNKNTVS

SEQ ID NO: 68375 - DNA, 1017 bp, Debaryomyces hansenii CBS767
  CDS (1)..(1017)
atggatcaatctggaccagtgactgtaacacttgacgatttatcaaagggaattgattttaacactttagagaaagcatttggactcgattcattaggcattatagtcgttaaggatctaccagaaaaatttcttgaattgaggctacgagtattaaaaagcgcttctatattggcgagtttgcccaaagaagaattgtcgactttagaatcagaagagtccatgtggttatcgggatggtcttgtgggaaagaaacattaggtagtaatggcacccctgactataacaaaggatctttttatatgaactgtgcctttcacaaggatcctgaactagaaggacctattaagagtatctgtgatgaattcaaagactttaagacgtatactacttggaacatatggccttcaaatgaattggaagggttatctacgttcgagagagactgtaaagagctatgtaatttaattatagatgtggctcaaacagttgcatcgaattgtgataaatatatagctaaaacccaaccaaattacgaagagcacttcttggaacgaattgttaagaactcgacttcaaccaaggcaagattattacattattacccatccaatggaaattcaaccagtgatgacgattggtgtggtgaacatttagatcactcgtgtattacgggacttacatctgcgttatttctcgatgaatcgaagggtttaactcatggtctaaatcgttctcccgatcctgaagctggtttatatattcgtaacaggcgtaatgacgttgttaaggttaatatccccagcgactgtttggcttttcaatcaggctctgctttacaagaagtgtctaagggtagtttgaaagcagtcccacattatgtaaaaggttcgcaacaaaagagtgttgctaggaatacattagcagttttttgtcaacctgatttgaacgaaaaggttaatagtaacgaaaactttgctcaatatgctgaaagaattgtgttatctaatcattag

SEQ ID NO: 68376 - protein, 338 aa, Debaryomyces hansenii CBS767
MDQSGPVTVTLDDLSKGIDFNTLEKAFGLDSLGIIVVKDLPEKFLELRLRVLKSASILASLPKEELSTLESEESMWLSGWSCGKETLGSNGTPDYNKGSFYMNCAFHKDPELEGPIKSICDEFKDFKTYTTWNIWPSNELEGLSTFERDCKELCNLIIDVAQTVASNCDKYIAKTQPNYEEHFLERIVKNSTSTKARLLHYYPSNGNSTSDDDWCGEHLDHSCITGLTSALFLDESKGLTHGLNRSPDPEAGLYIRNRRNDVVKVNIPSDCLAFQSGSALQEVSKGSLKAVPHYVKGSQQKSVARNTLAVFCQPDLNEKVNSNENFAQYAERIVLSNH

SEQ ID NO: 68377 - DNA, 1020 bp, Yarrowia lipolytica CLIB122
  CDS (1)..(1020)
atgacagactactccactactccggtcgtagtgtctctcgaagagctgcaaagcggcgccaaagacagcctactgccttcggcctttggccccgactctctcggagtcattatcgtcacaggactgccaaaagactttgtttcgctgcgacaaaaggtgctgttgtcagcttctgatctggcagccctgccggccgacaaactggcggcaatggagcacgagccgagtttctggtgccagggctggtcccggggccgggaaaagctggccaatggcgtgcccgactttaacaagggctcgttctacgccaactgcgcgttccacaaagacccccaactcgaagcgccacccaaggaggagacggtgggatacgaagatatgcacatgtacaccgcacccaacatctggccccaagaggaggatctgccacagttccagaccaacctcaaggctctctgtaacctcattatcgacgtggccgaacatgtggcccgtgcatgcgacaggtacgtggctggacacgccaagatcgatggctacaccgccgggtacctggaggacgttgttcgcacttctacgaccaccaaggctcgattgttgcactactttccgatgcagcagcagcaggagcaggcagatactccagacgacgcttggtgcggcacccacaaggaccacagctgtctcactggtctgacatcagcaatgtttctggatggcaagactgtgctacccaaaagcccggatcccgaggccggtctgtacattcacaacagacatggcaaggtggtgcaagtgaagattcctgccgatgctctggctttccagaccggctccgccctcgaagcagccacccacggcgagttcaaggctgtgccgcactttgtcaagggcgccaatgttgctggggtgtcgaggaatacgcttgcggtcttttgccagccctccatgcatcgtcagttggggtccgaggggtcttttgctgagtactctaccaggattctggaggggaatcattga

SEQ ID NO: 68378 - protein, 339 aa, Yarrowia lipolytica CLIB122
MTDYSTTPVVVSLEELQSGAKDSLLPSAFGPDSLGVIIVTGLPKDFVSLRQKVLLSASDLAALPADKLAAMEHEPSFWCQGWSRGREKLANGVPDFNKGSFYANCAFHKDPQLEAPPKEETVGYEDMHMYTAPNIWPQEEDLPQFQTNLKALCNLIIDVAEHVARACDRYVAGHAKIDGYTAGYLEDVVRTSTTTKARLLHYFPMQQQQEQADTPDDAWCGTHKDHSCLTGLTSAMFLDGKTVLPKSPDPEAGLYIHNRHGKVVQVKIPADALAFQTGSALEAATHGEFKAVPHFVKGANVAGVSRNTLAVFCQPSMHRQLGSEGSFAEYSTRILEGNH

SEQ ID NO: 68379 - DNA, 1089 bp, Aspergillus nidulans FGSC A4
  CDS (1)..(1089)
atggcgtcgaaacctatcaaacaggctcaggccgtgactgtcagcctgcaagagctgattgacggcaccgtttctttcgacactctcacggaagccttcggcccctcctcgctagggatcatcgttgtcaaagatctcgacccgaaattccagcatcttcgtgcgcaagttctctccaacgcgtcgtacgttgctgcgctcaaaaacgatgagctcgaatccctcacctccccctcggctaaatacctgatcggctggtcctgcggcaaagaaaccctgagatcagggcacttcgacacactcaagggttcctactacgtgaattgcgcgttctacaaggacccgtctttgcagggcgcgccgtctgacgaacaccccgatctccccgagtacacggcgccgaacatctggccggacgttcagaagttgccgaatttccgcagcggacttgaggaactgtgcaggttgatcattgatacggcggtgctggtggctagggcttgtgatcggtatgcggaggggaacattgaggggtataaagcaggttatttggagaaggttgttaggggcagtttgacgacgaaggcgcggttgctgcattacttccccgcgccggatggtgtccatgctgaagaggctcggaaagatgaagagaatgaggaggatgacgactggtgcgcaacgcacctcgatcacgggtgtctgacgggtcttacatctgcgatgtttgtcgacgaagatgcgcacccgcctgcctcttcttctgctacctcgaacctccctgaactacctgcgtctccggacccgaaagccggactgtacattcagtcgcgcacaggggaggtggtcaaggtgaatatccccaaggattgcctggcgttccagacgggtgaagcactgcagttgatcacgaagggcaaattccgcgccgtgccgcactttgtgaagggggcaaaggtgcccaagggacaggggaagattgcgcggaatacgctggctgtcttcacgcagccgaatctgggagaggaggtggaggaagggaagacgtttgcggactttgcgagggaggttgttgagagaacttattga

SEQ ID NO: 68380 - protein, 362 aa, Aspergillus nidulans FGSC A4
MASKPIKQAQAVTVSLQELIDGTVSFDTLTEAFGPSSLGIIVVKDLDPKFQHLRAQVLSNASYVAALKNDELESLTSPSAKYLIGWSCGKETLRSGHFDTLKGSYYVNCAFYKDPSLQGAPSDEHPDLPEYTAPNIWPDVQKLPNFRSGLEELCRLIIDTAVLVARACDRYAEGNIEGYKAGYLEKVVRGSLTTKARLLHYFPAPDGVHAEEARKDEENEEDDDWCATHLDHGCLTGLTSAMFVDEDAHPPASSSATSNLPELPASPDPKAGLYIQSRTGEVVKVNIPKDCLAFQTGEALQLITKGKFRAVPHFVKGAKVPKGQGKIARNTLAVFTQPNLGEEVEEGKTFADFAREVVERTY

SEQ ID NO: 68381 - DNA, 1380 bp, Myxococcus xanthus DK 1622
  CDS (1)..(1380): transl_table=11
gtgggctttccatcgcggggttctccttgtgagaggaaatacgaccccccatgtgagtcctggttgccgccgcgcgcgactgccctgcgggacgagggagcggggcctggcacgagagcggggaggggagcaggggtttccgcccaccaccgagagacgcaggtggcacgcatgcgcccaaaccgggcagtatggcgcccgtctcccttgtcacgggtggcctgtgcacaccctgcccggcgcggatgccggtgtggcaccgtggggagaagacacgaggcacctgggatgagcagcgacgtggcggaaacgaaagacggagtggttcttctcgactatgcgcagctcgtggcgggcgcggacctgagcgccgccatcgagcgcgcctacgggcatgacggcattggcctgctcgtcgttcggggcatccccgggctggccgagctgcgcgacaacctgctgcccctgggcttccgcttcgccgcgctgcccaccgaggtgaaggaccgctacgtccacgcgcgcagcagctactcgttcggctggagccacgggaaggagctgctgcgccccggccagttcgacgagttcaagggctcgtactacaacaacccgcagtacgacgtgccgcacaccgacgcggagctcatcgagaagcacccggagaactaccaccccaacgtgtggccggacgcggacttcccggagctgcggcccgccttcatggcgctgggccagcggatggtggacgtgggcgtgctggtcgccgggcagtgcgacaagtacgtgcaggccaaactgggcagccgcctggcaccggacgcggcgctggcgaagacgattcgtgattcgcgcacgtgcaaggcgcggctgctctactacttcgccatcaacgaggacgcgacgccgcgcacgcgcgactcgtggtgcggctggcacagcgaccacggctcgctcacggcgctgtgcccggccatgtacttcgaggccgagccgggcgcggcggagccggcgcgcaaggacatcccggtgccggacccggaggcgggcctgtacgtgcgcacgcggtccggcgaggagcgcaaggtcgtcatcccgaaggacagcctggccttccagattggcgaaagctcccagattgtcaccggcgggctgctgcggtccacgccgcacgcggtgcaggcgctggcccatccggccagccgcaacatctcccgcgccaccttcgcggtgttcatgcagccggacaatgacatgcacctgcgtccgccggagggcgtggaccccgccgagcagaaggtgggcgccttccagcctggaatgactttcggcgatttcgccaaggcgacgttcgcgaagttctacaacccctacgcgtag

SEQ ID NO: 68382 - protein, 459 aa, Myxococcus xanthus DK 1622
MGFPSRGSPCERKYDPPCESWLPPRATALRDEGAGPGTRAGRGAGVSAHHRETQVARMRPNRAVWRPSPLSRVACAHPARRGCRCGTVGRRHEAPGMSSDVAETKDGVVLLDYAQLVAGADLSAAIERAYGHDGIGLLVVRGIPGLAELRDNLLPLGFRFAALPTEVKDRYVHARSSYSFGWSHGKELLRPGQFDEFKGSYYNNPQYDVPHTDAELIEKHPENYHPNVWPDADFPELRPAFMALGQRMVDVGVLVAGQCDKYVQAKLGSRLAPDAALAKTIRDSRTCKARLLYYFAINEDATPRTRDSWCGWHSDHGSLTALCPAMYFEAEPGAAEPARKDIPVPDPEAGLYVRTRSGEERKVVIPKDSLAFQIGESSQIVTGGLLRSTPHAVQALAHPASRNISRATFAVFMQPDNDMHLRPPEGVDPAEQKVGAFQPGMTFGDFAKATFAKFYNPYA

SEQ ID NO: 68383 - DNA, 1260 bp, Oryza sativa subsp
  CDS (1)..(1260)
atggagattggtcgtctcgtgcggacgcagacgcagccaggctgggcaccaaccacccgaggaggaggaagacgacgaccactcgctctcgcgctcgggcggctctcgtcccgtcgtccggtgcggtgccgctgcctcgccgccatgcagacttcgccgccgccgccgtccgtgcgcacggtctccatccccttctccgacctcaaggagagggatagggacctgagcgggaagatcgaggaagggctcgggcccaacgggctcgggatcatctccattgctgacgtgcctggttttcccgtgctaaggaaaacgttgctgcgcctggcaccaaaagttgcaaaccttcctgaagatgtgaagaaagaacttgaagacccagacagcaggtttaactttggatggagtcatgggaaagagaaacttgagtcagggaaactcgacacattcaaaggctccttttatgccaacccaattttggatgctccaaccactgatgatgtacttgtgagaaggttgtactccatttaccttactggctgtcttgtatctcaaggtgctaaatcatttaaagctcttggaaagctgatgttggaagttggcttgatgttggctcatcattgtgatcgctatgtaatgcagcaaggagtgggaccatatgatggtgaaagccttgagcagacaattgccagctcaaggtgtcacaagggccgccttctgtattactacccccggcaatttagtaaacaagaggaaggtggttctgtttcatcgtggtgtggatggcatactgaccatggatctttaacaggacttacatgtgccttgtttacgaaaaattcaatggagatcccctgtcctgatagtgctgctggattgtatataaggactcgtgatgataaagttgttaagcatattatacaggagagggttatgtggtctgcactaattgaaattttactgcataaggttacatttgaggagaatgaattggcttaccaagttggagaaaccactgaaatactatcaagaggtcgtctatgtgcaactccacactgtgtgaaggcccccagcagtgaaaacgcctcgaatgttgatcgttcgaccttcgcgatgttcatgcaaccagattgggatgaaaagctcaagtttccaagtgaaattccgtatcatcaagagttgatcccaccgaatggaactcttacattcggggagtattcagaaagattggtgaacaagtattaccagggaaagacatga

SEQ ID NO: 68384 - protein, 419 aa, Oryza sativa subsp
MEIGRLVRTQTQPGWAPTTRGGGRRRPLALALGRLSSRRPVRCRCLAAMQTSPPPPSVRTVSIPFSDLKERDRDLSGKIEEGLGPNGLGIISIADVPGFPVLRKTLLRLAPKVANLPEDVKKELEDPDSRFNFGWSHGKEKLESGKLDTFKGSFYANPILDAPTTDDVLVRRLYSIYLTGCLVSQGAKSFKALGKLMLEVGLMLAHHCDRYVMQQGVGPYDGESLEQTIASSRCHKGRLLYYYPRQFSKQEEGGSVSSWCGWHTDHGSLTGLTCALFTKNSMEIPCPDSAAGLYIRTRDDKVVKHIIQERVMWSALIEILLHKVTFEENELAYQVGETTEILSRGRLCATPHCVKAPSSENASNVDRSTFAMFMQPDWDEKLKFPSEIPYHQELIPPNGTLTFGEYSERLVNKYYQGKT

SEQ ID NO: 68385 - DNA, 1134 bp, Oryza sativa subsp
  CDS (1)..(1134)
atggcggagaccgctctggcgacggcattggacatcgccgagctccctttctcggatcttctcctcctcatctcaccggatcttccggacgatggccggcgcggccgtctcctcaccaccgtcgctacctcccttggtcgcggcgggtccggtttgcttgccatcaccaacgtgcctctcgcagccgccctccgccgccggcttctcccgctggctcgccgccttgccgtcatggaccacccctcccgctcccagctcctcaagaagcacggtttgggtagcgacgtgcctctgaagaagctggaccggcgcgtttcctcatttgcgcggcttttgcgtcattcaggtgagttccaattgctggagtcgatgaaagaaatcgagagcatcaagaacgaccctgattatctggagaaagctttggatggtgttgtaattggggaacccatgggcgatggtaccgagaagcttggatcctgtatcagatcagaatgtgctatgacggacacactaaaggattccaatgataagtcgattcatggtcagggtagtgttgtttctctcacaaacttatggcaagagtggcactatgactatggggtccttactgttttaacagcaccattattcttgtgctccacaatgggagaagattgttccatcagcaaagaatgctctcctcctgacgagcacacgtacttgcagctattcaataggaggaaggtattctcggtgagatgctctccagagagcttcattgtgcaggtcggggagacagcagacatcttgtcaggcgggaagctgaggtctacacttcatgctgtgagtagaccatacggctcaacaaacatcagccgggaaacttttgtggtcttcttacagccatcatgggacaaaaagttgccttactctggtcactgttttgctggtgatgatgaacctagtgaaggcgatgactcaacattcagtgatgggtcagacatgttttcgagtgagcatacattgatgcaagatattttgaaaaagatcccccctctgtcatcaagggtaaaagaagggatgacgtttgctgaattttctcgacagacaacgaaacagtattatggtggtggaggtatccaacaaaacaattaa

SEQ ID NO: 68386 - protein, 377 aa, Oryza sativa subsp
MAETALATALDIAELPFSDLLLLISPDLPDDGRRGRLLTTVATSLGRGGSGLLAITNVPLAAALRRRLLPLARRLAVMDHPSRSQLLKKHGLGSDVPLKKLDRRVSSFARLLRHSGEFQLLESMKEIESIKNDPDYLEKALDGVVIGEPMGDGTEKLGSCIRSECAMTDTLKDSNDKSIHGQGSVVSLTNLWQEWHYDYGVLTVLTAPLFLCSTMGEDCSISKECSPPDEHTYLQLFNRRKVFSVRCSPESFIVQVGETADILSGGKLRSTLHAVSRPYGSTNISRETFVVFLQPSWDKKLPYSGHCFAGDDEPSEGDDSTFSDGSDMFSSEHTLMQDILKKIPPLSSRVKEGMTFAEFSRQTTKQYYGGGGIQQNN

SEQ ID NO: 68387 - DNA, 1260 bp, Oryza sativa subsp
  CDS (1)..(1260)
atggagattggtcgtctcgtgcggaagcagacgcagccaggctgggcaccaaccacccgaggaggaggaagacgacgaccattcgctctcgcgctcgggcggctctcgtcccgtcgtccggtgcggtgccgctgcctcgccgccatgcagacttcgccgccgccgccgtccgtgcgcacggtctccatccccttctccgacctcaaggagagggatagggacctgagcgggaagatcgaggaagggctcgggcccaacgggctcgggatcatctccattgctgacgtgcctggttttcccgtgctaaggaaaacgttgctgcgcctggcaccaaaatttgcaaaccttcctgaagatgtgaagaaagaacttgaagacccagacagcaggtttaactttggatggagtcatgggaaagagaaacttgagtcagggaaactcgacacattcaaaggctccttttatgccaacccaattttggatgctccaaccactgatgatgtacttgtgagaaggttgtactccatttaccttactggctgtcttgtatctcaaggtgctaaatcatttaaagctcttggaaagctgatgttggaagttggcttgatgttggctcatcattgtgatcgctatgtaatgcagcaaggagtgggaccatatgatggtgaaagccttgagcagacaattgccagctcaaggtgtcacaagggccgccttctgtattactacccccggcaatttagtaaacaagaggaaggtggttctgtttcatcgtggtgtggatggcatactgaccatggatctttaacaggacttacatgtgccttgtttacgaaaaattcaatggagatcccctgtcctgatagtgctgctggattgtatataaggactcgtgatgataaagttgttaagcatattatacaggagagggttatgtggtctgcactaattgaaattttactgcataaggttacatttgaggagaatgaattggcttaccaagttggagaaaccactgaaatactatcaagaggtcgtctatgtgcaactccacactgtgtgaaggcccccagcagtgaaaacgcctcgaatgttgatcgttcgaccttcgcgatgttcatgcaaccagattgggatgaaaagctcaagtttccaagtgaaattccgtatcatcaagagttgatcccaccgaatggaactcttacattcggggagtattcagaaagattggtgaacaagtattaccagggaaagacatga

SEQ ID NO: 68388 - protein, 419 aa, Oryza sativa subsp
MEIGRLVRKQTQPGWAPTTRGGGRRRPFALALGRLSSRRPVRCRCLAAMQTSPPPPSVRTVSIPFSDLKERDRDLSGKIEEGLGPNGLGIISIADVPGFPVLRKTLLRLAPKFANLPEDVKKELEDPDSRFNFGWSHGKEKLESGKLDTFKGSFYANPILDAPTTDDVLVRRLYSIYLTGCLVSQGAKSFKALGKLMLEVGLMLAHHCDRYVMQQGVGPYDGESLEQTIASSRCHKGRLLYYYPRQFSKQEEGGSVSSWCGWHTDHGSLTGLTCALFTKNSMEIPCPDSAAGLYIRTRDDKVVKHIIQERVMWSALIEILLHKVTFEENELAYQVGETTEILSRGRLCATPHCVKAPSSENASNVDRSTFAMFMQPDWDEKLKFPSEIPYHQELIPPNGTLTFGEYSERLVNKYYQGKT

SEQ ID NO: 68389 - DNA, 2763 bp, Aspergillus oryzae
  CDS (1)..(2763)
atggactggagggctgagagggcagcactcgacgagtatattgagcagttaggcatgcagccttcctacgttcctcgacccggagaagtcgtactctgggctccggagtatcagggggaactagcctggaaccacgaaaccaagcgcgtcgaaatgtacgcgcccaatcaaaacgaatggttgggaacccccgcatggcgggctggtattgtaggccagactccagaagaagacacagtccttcaggacttagtcattacagcgcccaaaaaatggggtgtcaactactccggctttcgcgtggaaacttttcctgatcctcaaagctacgataaaagttactcattgcactacaaatatgtccatttgttgtgtatcaagcccttcaatgcatacgagctctttctgcaaggaattccgcccgaagagttacacccctccatcgggtatgcgatgacgataatgtcgtcgttcagtctcctggacaaatatcacttcaaaggaacttggccaaacgcagccatttattgccggggtattttcatcggagcggagctcttggttgttggagatgctgtccgcttgaaaccagccctcccgtcttactcagaggaagtccataacgccgttgaggatgttatggtcattgatgaaatacgcctggaacttgtcaactgcgtgaacgatctcatgtcggatcaactggcagagcgatatcaggttcgagtggcaggaaaggtctatacgaacgctccccaaagagctagtgctgggacccacgggacgagccaacccttgcctatgaagcacgaggaagtcattgacgtgtttcaatcgattggcatgggtggttatgggtcttggtacagggtgtgggaaggtgccacggtggaagtctcacagaatatgataattggtcgttgctacgagcccgatgctatgaacctcttgttcgggtcttgctctttgggtcaggatctgtcgggggtgaccaaggcgagggagtattcacggaaagtcgatgaacgtattcccgaaggcaaagactggttttggggcgactttcgaactcagaccctcgcgatcgatactctcaatggccaggatgtgggccactacagtgacgcacgcgatatcaagatgtggagagcgaatctccacattcttgatggcacagcggattcagccgatcttcgcttggctaagcttcccggcaatgttggtcggccctccacgaaggctcggtccaacttctcagagattggcaagcttagcaggctggtcagtacaggtcttggggccgcggacgtgagcaacccagtaagctccgaagaagggcccaacctgccagacgaggaagatacctctgaatcagatgaagttttcacgttagccatgaatcaactcccaggggggacggacgaatcagaggaagggcaaacggccgaagcacgatatttgatcacggatactctgaagctccttcttgtcgatactcttgacccgaggttcacttatggcgaggaaacacttacgttctggtctttgacatactttgctgattgctattatattctttctcccaatagtatccgatcatttggagaggggcaacaacaagtcaactgtaactctcttgtatactcctcaatcgatcatcctctcacaagccacaagaatactatcgcaacaatgggtctagacggcgtacctcaagcccaagccgtaacagtgagtctcaaagacctcatcaacggaaccgtctccttcgagaccctcaccgaagctttcggcccctcctctctaggcataatcgtggtaaaagacctagaccccgaattccaacgtctacgcacccaagtcctctccaacgcatcctatctcgcagccctccccaacgacgaactagaatccctaaccagtccctccgcaaaatacctcgtaggctggtcctgcggcaaagaaaccctgcgatccggccacttcgacaccctcaagggctcctactacgtcaactgcgcattctaccaagaccccaccctccaaggcgcccccgccgacaacttccccgatctatccgagtacacagccccgaatatctggccgccggcggaccgattgcctacgttccggcccgcgctggaagagctctgtaggcttgttattgatactgcggcattggtggcgagggcgtgtgatcggtatgcgacggagaatattgaggggtataagagtgggtacttggagcatgttgttaggacgagtttgacgacgaaggcgaggttgttgcattattttcctgccgaggctggggtgggagagagagatggggagggagagggagagggggatgatgattggtgtgcgacgcatttggatcatgggtgtttgacgggtttgacttctgctatgtttgtcgatgaggttgctagtcctcctgggcagggaggcgagcttgttgagttgggggcttcgccggatccgaaggctgggctttatattcagtcgaggactgggaaggtggttaaggttaatattcctcgggattgtttggcttttcagaccggggaggcgttgcagcttattacgagagggaagtttagggctgtgccgcattttgtgaagggcgcgaagccttctgcgggcaagaggattgcgaggaatacgttggccgtgtttacacagccgaatttggaggaggaggtggagagtgggaagagttttgcggagtttgcgagggaggtggtggcgaggacttattag

SEQ ID NO: 68390 - protein, 920 aa, Aspergillus oryzae
MDWRAERAALDEYIEQLGMQPSYVPRPGEVVLWAPEYQGELAWNHETKRVEMYAPNQNEWLGTPAWRAGIVGQTPEEDTVLQDLVITAPKKWGVNYSGFRVETFPDPQSYDKSYSLHYKYVHLLCIKPFNAYELFLQGIPPEELHPSIGYAMTIMSSFSLLDKYHFKGTWPNAAIYCRGIFIGAELLVVGDAVRLKPALPSYSEEVHNAVEDVMVIDEIRLELVNCVNDLMSDQLAERYQVRVAGKVYTNAPQRASAGTHGTSQPLPMKHEEVIDVFQSIGMGGYGSWYRVWEGATVEVSQNMIIGRCYEPDAMNLLFGSCSLGQDLSGVTKAREYSRKVDERIPEGKDWFWGDFRTQTLAIDTLNGQDVGHYSDARDIKMWRANLHILDGTADSADLRLAKLPGNVGRPSTKARSNFSEIGKLSRLVSTGLGAADVSNPVSSEEGPNLPDEEDTSESDEVFTLAMNQLPGGTDESEEGQTAEARYLITDTLKLLLVDTLDPRFTYGEETLTFWSLTYFADCYYILSPNSIRSFGEGQQQVNCNSLVYSSIDHPLTSHKNTIATMGLDGVPQAQAVTVSLKDLINGTVSFETLTEAFGPSSLGIIVVKDLDPEFQRLRTQVLSNASYLAALPNDELESLTSPSAKYLVGWSCGKETLRSGHFDTLKGSYYVNCAFYQDPTLQGAPADNFPDLSEYTAPNIWPPADRLPTFRPALEELCRLVIDTAALVARACDRYATENIEGYKSGYLEHVVRTSLTTKARLLHYFPAEAGVGERDGEGEGEGDDDWCATHLDHGCLTGLTSAMFVDEVASPPGQGGELVELGASPDPKAGLYIQSRTGKVVKVNIPRDCLAFQTGEALQLITRGKFRAVPHFVKGAKPSAGKRIARNTLAVFTQPNLEEEVESGKSFAEFAREVVARTY

SEQ ID NO: 68391 - DNA, 1302 bp, Arabidopsis thaliana
  CDS (1)..(1302)
atggcagaaacagagattcttgagccctatcaactgtcgttctcggatcttcttttgtcctctcgtaatcgctctcaatggatctcgaaaaatgtgatggacgctcttggccccaccggtcctggtctcctttgtatcaccggcgttcttggctccgcctttctccgccgtaaactccttcctatggctcggaagctggctctgctcgatccggacaagcggaaactcattctcatggagcaccacttgggtagcgacgttcctctcaagaatccagaacgagatgtctcctcttttgcaatgcagctcaattatgaaagaacaacttataaatcctcactgggaaagctgtggttcgatgaggctggatcaaaactggacttgcaggaggatgatgatgatgctttcacaaatcttggtggtgcttttaaagaactcgggttctgcatgagggagttgggcttgtccatagctcgtctatgcgacagggagattggcggaggcttgctggaggagagcttactggattcttgcacagccaaaggacgtctcatacattaccactccgctgctgataaatatgctctcagagaatcccagaggagaaaccaatctggtaaccgagtatcaagcaagaggagagtccagaacgctgctgagcaagagctgaaccgtagaaatggagctggtttgagtgggagtcacttcaatctgtggcagcagtggcattacgattatggcatctttactgttctcacggatcctatgtttctatcgccgtattcctatcaggaattcagtttgatgagcagccattcttacctgcagatctatcatcccagcaagaacaagttctacatggtcaagactccacaagacagttttttggtccaaatcggagaatctgctgatattttgtccaaagggaagctacggtcgacccttcactgtgtgtgcaaaccagagaagctggatcacgtaagccgtgagacatttgttgtcttcttgcacccaaagtggagccaaactttctcagtctcagaatatacaatggaacatctaaggtcggatgaggtcgtccctagaccagatttacagaatattgttccacctctatcgtctcggttaagggatgggatgacttttgccgagttttcacgtgaaacgacaaagcagtactacggagggaatgtggaaggcaagaggaatgagccaagagggttagttgtaaaagagattagattaaagggagagttgggattcgttatgtgtacttcgatgttggagccaaaacaacagtga

SEQ ID NO: 68392 - protein, 433 aa, Arabidopsis thaliana
MAETEILEPYQLSFSDLLLSSRNRSQWISKNVMDALGPTGPGLLCITGVLGSAFLRRKLLPMARKLALLDPDKRKLILMEHHLGSDVPLKNPERDVSSFAMQLNYERTTYKSSLGKLWFDEAGSKLDLQEDDDDAFTNLGGAFKELGFCMRELGLSIARLCDREIGGGLLEESLLDSCTAKGRLIHYHSAADKYALRESQRRNQSGNRVSSKRRVQNAAEQELNRRNGAGLSGSHFNLWQQWHYDYGIFTVLTDPMFLSPYSYQEFSLMSSHSYLQIYHPSKNKFYMVKTPQDSFLVQIGESADILSKGKLRSTLHCVCKPEKLDHVSRETFVVFLHPKWSQTFSVSEYTMEHLRSDEVVPRPDLQNIVPPLSSRLRDGMTFAEFSRETTKQYYGGNVEGKRNEPRGLVVKEIRLKGELGFVMCTSMLEPKQQ

SEQ ID NO: 68393 - DNA, 921 bp, Arabidopsis thaliana
  CDS (1)..(921)
atgtctctctcgtcggactccaccgttcctactgtttccacggtcaccatatcctactcagagctcaaggagagcaacatagatttgtctgcaaggattgaagaaggatttggacctaatggacttggaatcctctctgttaaagatgttcctggatattctgctttaagacagaatctacttcagcttgcacctaggttagctggtcttcctgaagaggtgaagagggagcttgaagatcctcatagtaggtataattttggttggagtcatggcaaggagaaacttgaatccgggaagcttgacatgctgaagggttcttactatgctaatcctctacaagatgtacctacgagtaattcatatgaaatacagcggtatccatcgtattgtggatcaaatatatggccaaggaattctttaccggaacttgaaggagctttcaaagctcttggtaaactgatgttcgaagttgggctaatggtagcttaccactgtgatcaatatggtcttactcgagcaatattttctagagattcagttgaagtaccttgcccagatcctgcttctggcttatacatacaaacacgatcaggtcagatcgttaaggttgtgtatggggaagatgaaatagcataccaaataggcgagacaacatcaattctgtctagtggttatctttgtgctacacctcattgtgttcgggtaatattcttcataccttcgcggatggcgccacaaggagaagaggcgcgtggtctagagcgatcgacattcgcgttgttcatgcaacctgactggtattattctgaaactaagataattacaatacatgaagagttatgtctctctgatgaagtcttgacgtttggagaatatacagagaaactgctcaacaaatactatgatacaaaaccttag

SEQ ID NO: 68394 - protein, 306 aa, Arabidopsis thaliana
MSLSSDSTVPTVSTVTISYSELKESNIDLSARIEEGFGPNGLGILSVKDVPGYSALRQNLLQLAPRLAGLPEEVKRELEDPHSRYNFGWSHGKEKLESGKLDMLKGSYYANPLQDVPTSNSYEIQRYPSYCGSNIWPRNSLPELEGAFKALGKLMFEVGLMVAYHCDQYGLTRAIFSRDSVEVPCPDPASGLYIQTRSGQIVKVVYGEDEIAYQIGETTSILSSGYLCATPHCVRVIFFIPSRMAPQGEEARGLERSTFALFMQPDWYYSETKIITIHEELCLSDEVLTFGEYTEKLLNKYYDTKP

SEQ ID NO: 68395 - DNA, 1215 bp, Oryza sativa
  CDS (1)..(1215)
atggagattggtcgtctcgtgcggaagcagacgcagccaggctgggcaccaaccacccgaggaggaggaagacgacgaccactcgctctcgcgctcgggcggctctcgtcccgtcgtccggtgcggtgccgctgcctcgccgccatgcagacttcgccgccgccgccgtccgtgcgcacggtctccatccccttctccgacctcaaggagagggatagggacctgagcgggaagatcgaggaagggctcgggcccaacgggctcgggatcatctccattgctgacgtgcctggttttcccgtgctaaggaaaacgttgctgcgcctggcaccaaaatttgcaaaccttcctgaagatgtgaagaaagaacttgaagacccagacagcaggtttaactttggatggagtcatgggaaagagaaacttgagtcagggaaactcgacacattcaaaggctccttttatgccaacccaattttggatgctccaaccactgatgatgtacttgtgagaaggtacccatcttattgccgaacaaatatatggccagccagtcatcttcctgagctcgaaatagcatttaaagctcttggaaagctgatgttggaagttggcttgatgttggctcatcattgtgatcgctatgtaatgcagcaaggagtgggaccatatgatggtgaaagccttgagcagacaattgccagctcaaggtgtcacaagggccgccttctgtattactacccccggcaatttagtaaacaagaggaaggtggttctgtttcatcgtggtgtggatggcatactgaccatggatctttaacaggacttacatgtgccttgtttacgaaaaattcaatggagatcccctgtcctgatagtgctgctggattgtatataaggactcgtgatgataaagttgttaaggttacatttgaggagaatgaattggcttaccaagttggagaaaccactgaaatactatcaagaggtcgtctatgtgcaactccacactgtgtgaaggcccccagcagtgaaaacgcctcgaatgttgatcgttcgaccttcgcgatgttcatgcaaccagattgggatgaaaagctcaagtttccaagtgaaattccgtatcatcaagagttgatcccaccgaatggaactcttacattcggggagtattcagaaagattggtgaacaagtattaccagggaaagacatga

SEQ ID NO: 68396 - protein, 404 aa, Oryza sativa
MEIGRLVRKQTQPGWAPTTRGGGRRRPLALALGRLSSRRPVRCRCLAAMQTSPPPPSVRTVSIPFSDLKERDRDLSGKIEEGLGPNGLGIISIADVPGFPVLRKTLLRLAPKFANLPEDVKKELEDPDSRFNFGWSHGKEKLESGKLDTFKGSFYANPILDAPTTDDVLVRRYPSYCRTNIWPASHLPELEIAFKALGKLMLEVGLMLAHHCDRYVMQQGVGPYDGESLEQTIASSRCHKGRLLYYYPRQFSKQEEGGSVSSWCGWHTDHGSLTGLTCALFTKNSMEIPCPDSAAGLYIRTRDDKVVKVTFEENELAYQVGETTEILSRGRLCATPHCVKAPSSENASNVDRSTFAMFMQPDWDEKLKFPSEIPYHQELIPPNGTLTFGEYSERLVNKYYQGKT

SEQ ID NO: 68397 - DNA, 1398 bp, Oryza sativa
  CDS (1)..(1398)
atggcgaagaccgctctggcgacggcattggacatcgccgagctccctttctcggatcttctcctcctcatctcaccggatcttccggacgatggccggcgcggccgtctcctcaccaccgtcgctacctcccttggtcgcggcgggtccggtttgcttgccatcaccaacgtgcctctcgcagccgccctccgccgccggcttctcccgctggctcgccgccttgccgtcatggaccacccctcccgctcccagctcctcaagaagcacggtttgggtagcgacgtgcctctgaagaagctggaccggcgcgtttcctcatttgcgcggcttttgcgtcattcaggtgagttccaattgctggagtcgatgaaagaaatcgagagcatcaagaacgaccctgattatctggagaaagctttggatggtgttgtaattggggaacccatgggcgatggtaccgagaagcttggtgagctcgttgaggagcttggtctttgcatgatggaacttgggattttggttgcacgagcctgcgacactgttactggtggaaatcagttggagaaaagcattactgactttgggaccgcaaaggcaaggctcattcactaccactctgagttggataacattattatcaagaatagtagcagcaagagaaaagttccgataaataaaatcgcaaaggcaacagcttatgagtcatgctctcgaaggtctgcatcatcacaaggatcctgtatcagatcagaatgtgctatgacggacacattaaaggattccaatgataagtcgattcatggtcagggtagtgttgtttctctcacaaacttatggcaagagtggcactatgactatggggtccttactgttttaacagcaccattattcttgtgctccacaatgggagaagattgttccatcaacaaagaatgctctcctcctgacgagcacacgtacttgcagctattcaataggaggaaggtattctcggtgagatgctctccagagagcttcattgtgcaggtcggggagacagcagacatcttgtcaggcgggaagctgaggtctacacttcatgctgtgagtagaccatacggctcaacaaacatcagccgggaaacttttgtggtcttcttacagccatcatgggacaaaaagttgccttactctggtcactgttttgctggtgatgatgaacctagtgaaggcgatgactcaacattcagtgatgggtcagacatgttttcgagtgagcatacattgatgcaagatattttgaaaaagatcccccctctgtcatcaagggtaaaagaagggatgacgtttgctgaattttctcgacagacaacgaaacagtattatggtggtggaggtatccaacaaaacaattaa

SEQ ID NO: 68398 - protein, 465 aa, Oryza sativa
MAKTALATALDIAELPFSDLLLLISPDLPDDGRRGRLLTTVATSLGRGGSGLLAITNVPLAAALRRRLLPLARRLAVMDHPSRSQLLKKHGLGSDVPLKKLDRRVSSFARLLRHSGEFQLLESMKEIESIKNDPDYLEKALDGVVIGEPMGDGTEKLGELVEELGLCMMELGILVARACDTVTGGNQLEKSITDFGTAKARLIHYHSELDNIIIKNSSSKRKVPINKIAKATAYESCSRRSASSQGSCIRSECAMTDTLKDSNDKSIHGQGSVVSLTNLWQEWHYDYGVLTVLTAPLFLCSTMGEDCSINKECSPPDEHTYLQLFNRRKVFSVRCSPESFIVQVGETADILSGGKLRSTLHAVSRPYGSTNISRETFVVFLQPSWDKKLPYSGHCFAGDDEPSEGDDSTFSDGSDMFSSEHTLMQDILKKIPPLSSRVKEGMTFAEFSRQTTKQYYGGGGIQQNN

SEQ ID NO: 68399 - DNA, 1149 bp, Glycine max
  CDS (1)..(1149)
atgggcatgcagacgctgaccctctttcgctccccccaccctatttctcaaaacgctgtcgttccccgccacgccatgtcccgctcctccgaaacctcctttcccaccctcactactatctccatctctttctctcaactccaagataagaacgccgacttgtcgttcaagattgaagaaggctttggacccaatggattggggattctatccgtcactgatgtcccaggatactcttcattgcgtagaaatctattgcatcttgcaccaagattggcaaatcttcccaaagaagtgaaggaggatcttgaagatcctcatagtaggtacaattttggttggagtcatgggaaagagaaacttgaatctgggaagccagatattttaaaaggatctttctatgccaatcccatacttgatacacctacaacagaggcttctttgatacaacggtatccatcatattgcggctcaaatatatggcctagaaacgctttaccagaacttgaagtggctttcaaagcacttgggaagctgatatttgacattggattgatgttggcatatcactgcgatcaatatgtatccaaagggatgaaaattcacaaggatgaaggtctggaatcaatacttcgttgctcccgctgtcataaaggacgtttgctatattattttccttcacaacagggagtcccagatggcaactctttgtcttcttggtgtggatggcatactgaccacggttcactgacaggtctgacttgtggtatgtttacgagagatggtgtagaaattgcttgccctgatagtgctgctggcctctatattcgaacaagaaataatcaaattatcaaagttgtctatggaaaagatgatatagcataccaaattggtgaaaccactgaaatactttctggaggttatctttgtgcaacacctcattgtgttcaggctcctacgggggaggagtcctctggtattgagcgctcaacatttgcattattcatgcagcctgactgggatgaaaagctcaatttacccgagaaagttcacattcataaagagcttattccatcaaatgctgcccttacttttggagagtattcagagatgctgctcgacaaatattaccaccaaaaacagaactaa

SEQ ID NO: 68400 - protein, 382 aa, Glycine max
MGMQTLTLFRSPHPISQNAVVPRHAMSRSSETSFPTLTTISISFSQLQDKNADLSFKIEEGFGPNGLGILSVTDVPGYSSLRRNLLHLAPRLANLPKEVKEDLEDPHSRYNFGWSHGKEKLESGKPDILKGSFYANPILDTPTTEASLIQRYPSYCGSNIWPRNALPELEVAFKALGKLIFDIGLMLAYHCDQYVSKGMKIHKDEGLESILRCSRCHKGRLLYYFPSQQGVPDGNSLSSWCGWHTDHGSLTGLTCGMFTRDGVEIACPDSAAGLYIRTRNNQIIKVVYGKDDIAYQIGETTEILSGGYLCATPHCVQAPTGEESSGIERSTFALFMQPDWDEKLNLPEKVHIHKELIPSNAALTFGEYSEMLLDKYYHQKQN

SEQ ID NO: 68401 - DNA, 1149 bp, Glycine max
  CDS (1)..(1149)
atgggaatgcagacgctgaccctctttcgctccccccaacctatttctcaaaacgctgtcgttccccgccacgccatgtcccgctcctccgaaacctcctttcccaccctcactactatctccatctctttctctcaactccaagataagaacgccgacttgtcattcaagattgaagaaggctttggacccaatggattggggattctatccgtcactgatgttccaggatactcttcattgcgcagaaatctattgcatcttgcaccaagattggcaaatcttcccaaagaagtgaaggaggatcttgaagatcctcatagtaggtataattttggttggagtcatgggaaagagaaacttgaatctgggaagccagatattttaaaaggatctttctatgccaatcccatacttgatacacctacaacagaggcttctttgatacaacggtatccatcatattgcagatcaaacatatggcctagaaacgctttaccagaacttgaagtggctttcaaagcacttgggaaactgatatttgacattggattgatgttggcatatcactgcgatcaatatgtatccaaagggatgaaaattcacaaggatgaaggtctggaatcaatacttcgttgctcccgctgtcataaaggacgtttgctatattattttccttcacaacagggagtcccagatggcaactctttgtcttcttggtgtggatggcatactgaccacggttcactgacaggtctgacttgcggtatgtttacgagagatggtgtagaaattgcttgccctgatagtgctgctggcctctatattcgaacaagaaataatcaaattatcaaagttgtctatggaaaagatgatatagcataccaaattggtgaaaccactgaaatactttctggaggttatctttgtgcaacacctcattgtgttcaggctcctaagggggaggagtcctctggtattgagcgctcgacatttgcgttattcatgcagcctgactgggatgaaaagctcaattttcccgaggaagttcacattcataaagagcttattccatcaaatgctgcccttacttttggagagtattcagagatgctgctcgacaaatattaccaccaaaaacagaactaa

SEQ ID NO: 68402 - protein, 382 aa, Glycine max
MGMQTLTLFRSPQPISQNAVVPRHAMSRSSETSFPTLTTISISFSQLQDKNADLSFKIEEGFGPNGLGILSVTDVPGYSSLRRNLLHLAPRLANLPKEVKEDLEDPHSRYNFGWSHGKEKLESGKPDILKGSFYANPILDTPTTEASLIQRYPSYCRSNIWPRNALPELEVAFKALGKLIFDIGLMLAYHCDQYVSKGMKIHKDEGLESILRCSRCHKGRLLYYFPSQQGVPDGNSLSSWCGWHTDHGSLTGLTCGMFTRDGVEIACPDSAAGLYIRTRNNQIIKVVYGKDDIAYQIGETTEILSGGYLCATPHCVQAPKGEESSGIERSTFALFMQPDWDEKLNFPEEVHIHKELIPSNAALTFGEYSEMLLDKYYHQKQN

SEQ ID NO: 68403 - DNA, 1077 bp, Zea mays
  CDS (1)..(1077)
atgcagcagcagcagccgtccgtccgcgccgtcaccatccccttcgccgaccttaaggatcggggcaaggacctgggcggcttcatcgaggaaggcttcgggcctcaggggctcggcatcgtctccatcgccggcgtacccggttacccagagctcaggaaaaggctgctgcgcttggcgccaaggatcgtcagccttcctgatgatgtgaagaaacaactggaggacccagatagcagataccactttggttggagtcgtgtagaagagaaattcgagtctgaaagatgggacacagccaaaggctcctacttcgccaacccagtttttgatgtcccaacaactgatgatgagcttgtaactagatacccatcatactgccgaccaaacatatggccaaaggatcatcttcctgagcttgaaatagcattcaaaggtcttggaaaactgatgttggaagttggcttgatgttggctcatcattgtgatcgctatgtaatacagcgaggggtgggacagtacattggtgaaagccttgagaagacacttgctaggtcaaggtgtcccaagggtcgtctgctgtactacttccccaaatcgtttagcaaacaggacgaagtttcgtcatggtgtggatggcatactgactatggatttttgacaggacttacatgtggcttgttcacgagaaaatcagaggaggtcccctgtcctgatattggaactgggctgtatgttcggactcgtgataatcaagtcgtcaaggtcacacttgtggatgatgagttggtctaccaaattggggagactgctgaaatactatcaagagggcatctatgtgcaaccccacactgtgtgaaggctcccagcagcgaagatgcttctgacgttggtcgctcaactttcgttctgtttattcagccaaactgggatgagccgctgaagcttcctagtgaaatacgctatcaccaggagtgcattccaccaaccaggacacttgcgtacggcgagtactccgaaagagtcttggcgagttttagcggcaagagcgtggaacaaaccttgatgccacagtaa

SEQ ID NO: 68404 - protein, 358 aa, Zea mays
MQQQQPSVRAVTIPFADLKDRGKDLGGFIEEGFGPQGLGIVSIAGVPGYPELRKRLLRLAPRIVSLPDDVKKQLEDPDSRYHFGWSRVEEKFESERWDTAKGSYFANPVFDVPTTDDELVTRYPSYCRPNIWPKDHLPELEIAFKGLGKLMLEVGLMLAHHCDRYVIQRGVGQYIGESLEKTLARSRCPKGRLLYYFPKSFSKQDEVSSWCGWHTDYGFLTGLTCGLFTRKSEEVPCPDIGTGLYVRTRDNQVVKVTLVDDELVYQIGETAEILSRGHLCATPHCVKAPSSEDASDVGRSTFVLFIQPNWDEPLKLPSEIRYHQECIPPTRTLAYGEYSERVLASFSGKSVEQTLMPQ

SEQ ID NO: 68405 - DNA, 21 bp, Artificial sequence
  primer
atgcagcagcacgaggaggag

SEQ ID NO: 68406 - DNA, 22 bp, Artificial sequence
  primer
ctacgttgttgtctggtaatac

SEQ ID NO: 68407 - protein, 487 aa, Artificial sequence
  consensus sequence
  Variant (2)..(14): Xaa in position 2 to 14 is any amino acid
  Variant (15)..(26): Xaa in position 15 to 26 is any or no amino acid
  Variant (29)..(31): Xaa in position 29 to 31 is any amino acid
  Variant (33)..(39): Xaa in position 33 to 39 is any amino acid
  Variant (41)..(44): Xaa in position 41 to 44 is any amino acid
  Variant (45)..(45): Xaa in position 45 is any or no amino acid
  Variant (48)..(50): Xaa in position 48 to 50 is any amino acid
  Variant (52)..(53): Xaa in position 52 to 53 is any amino acid
  Variant (55)..(57): Xaa in position 55 to 57 is any amino acid
  Variant (59)..(59): Xaa in position 59 is any amino acid
  Variant (61)..(69): Xaa in position 61 to 69 is any amino acid
  Variant (70)..(77): Xaa in position 70 to 77 is any or no amino acid
  Variant (81)..(83): Xaa in position 81 to 83 is any amino acid
  Variant (85)..(85): Xaa in position 85 is any amino acid
  Variant (87)..(91): Xaa in position 87 to 91 is any amino acid
  Variant (92)..(92): Xaa in position 92 is any or no amino acid
  Variant (94)..(95): Xaa in position 94 to 95 is any amino acid
  Variant (99)..(99): Xaa in position 99 is any amino acid
  Variant (101)..(101): Xaa in position 101 is any amino acid
  Variant (103)..(137): Xaa in position 103 to 137 is any amino acid
  Variant (138)..(151): Xaa in position 138 to 151 is any or no amino acid
  Variant (153)..(163): Xaa in position 153 to 163 is any amino acid
  Variant (164)..(170): Xaa in position 164 to 170 is any or no amino acid
  Variant (172)..(173): Xaa in position 172 to 173 is any amino acid
  Variant (176)..(177): Xaa in position 176 to 177 is any amino acid
  Variant (178)..(246): Xaa in position 178 to 246 is any or no amino acid
  Variant (248)..(248): Xaa in position 248 is any amino acid
  Variant (250)..(265): Xaa in position 250 to 265 is any amino acid
  Variant (266)..(276): Xaa in position 266 to 276 is any or no amino acid
  Variant (278)..(280): Xaa in position 278 to 280 is any amino acid
  Variant (282)..(282): Xaa in position 282 is any amino acid
  Variant (284)..(284): Xaa in position 284 is any amino acid
  Variant (286)..(286): Xaa in position 286 is any amino acid
  Variant (289)..(289): Xaa in position 289 is any amino acid
  Variant (292)..(294): Xaa in position 292 to 294 is any amino acid
  Variant (296)..(304): Xaa in position 296 to 304 is any amino acid
  Variant (305)..(325): Xaa in position 305 to 325 is any or no amino acid
  Variant (328)..(330): Xaa in position 328 to 330 is any amino acid
  Variant (334)..(336): Xaa in position 334 to 336 is any amino acid
  Variant (338)..(343): Xaa in position 338 to 343 is any amino acid
  Variant (344)..(362): Xaa in position 344 to 362 is any or no amino acid
  Variant (364)..(372): Xaa in position 364 to 372 is any amino acid
  Variant (374)..(374): Xaa in position 374 is any amino acid
  Variant (377)..(383): Xaa in position 377 to 383 is any amino acid
  Variant (385)..(385): Xaa in position 385 is any amino acid
  Variant (387)..(389): Xaa in position 387 to 389 is any amino acid
  Variant (392)..(392): Xaa in position 392 is any amino acid
  Variant (394)..(402): Xaa in position 394 to 402 is any amino acid
  Variant (403)..(414): Xaa in position 403 to 414 is any or no amino acid
  Variant (416)..(416): Xaa in position 416 is any amino acid
  Variant (418)..(420): Xaa in position 418 to 420 is any amino acid
  Variant (422)..(422): Xaa in position 422 is any amino acid
  Variant (425)..(429): Xaa in position 425 to 429 is any amino acid
  Variant (430)..(484): Xaa in position 430 to 484 is any or no amino acid
  Variant (486)..(486): Xaa in position 486 is any amino acid
LXXXXXXXXXXXXXXXXXXXXXXXXXGPXXXGXXXXXXXPXXXXXLRXXXLXXAXXXAXLXXXXXXXXXXXXXXXXXGWSXXXEXLXXXXXXDXXKGSXYXNXXXXXXXXXXXXXXXXXXXXXXXXXXXXXXXXXXXXXXXXXXXXXXXXXLXXXXXXXXXXXXXXXXXXAXXCDXXXXXXXXXXXXXXXXXXXXXXXXXXXXXXXXXXXXXXXXXXXXXXXXXXXXXXXXXXXXXXXXXXXXXXXKXRXXXXXXXXXXXXXXXXXXXXXXXXXXXWXXXHXDXGXLTXLTXXXFXXXXXXXXXXXXXXXXXXXXXXXXXXXXXXPDXXXGLYXXXRXXXXXXXXXXXXXXXXXXXXXXXXXVXXXXXXXXXQXGEXXXXXXXGXLXXXPHXVXXXXXXXXXXXXXXXXXXXXXRXTXXXFXQPXXXXXXXXXXXXXXXXXXXXXXXXXXXXXXXXXXXXXXXXXXXXXXXXXXXXXXXXXXXXFXE

SEQ ID NO: 68408 - protein, 35 aa, Artificial sequence
  protein pattern
  Variant (3)..(11): Xaa in position 3 to 11 is any amino acid
  Variant (12)..(14): Xaa in position 12 to 14 is any or no amino acid
  Variant (16)..(16): Xaa in position 16 is any amino acid
  Variant (18)..(18): Xaa in position 18 is Glu or Ser
  Variant (19)..(19): Xaa in position 19 is Ala or Thr
  Variant (20)..(20): Xaa in position 20 is any amino acid
  Variant (21)..(21): Xaa in position 21 is Asp, Glu, Gln or Ser
  Variant (22)..(22): Xaa in position 22 is any amino acid
  Variant (23)..(23): Xaa in position 23 is Ala, Ile, Leu or Val
  Variant (24)..(24): Xaa in position 24 is Ser or Thr
  Variant (25)..(25): Xaa in position 25 is any amino acid
  Variant (27)..(27): Xaa in position 27 is any amino acid
  Variant (28)..(28): Xaa in position 28 is Phe or Leu
  Variant (29)..(29): Xaa in position 29 is any amino acid
  Variant (30)..(30): Xaa in position 30 is Ala or Ser
  Variant (31)..(31): Xaa in position 31 is Thr or Val
  Variant (32)..(32): Xaa in position 32 is Leu or Pro
  Variant (34)..(34): Xaa in position 34 is any amino acid
KVXXXXXXXXXXXXQXGXXXXXXXXGXXXXXXHXV

SEQ ID NO: 68409 - protein, 15 aa, Artificial sequence
  protein pattern
  Variant (2)..(4): Xaa in position 2 to 4 is any or no amino acid
  Variant (6)..(6): Xaa in position 6 is any amino acid
  Variant (8)..(8): Xaa in position 8 is His or Tyr
  Variant (10)..(10): Xaa in position 10 is any amino acid
  Variant (11)..(11): Xaa in position 11 is Phe or Leu
  Variant (13)..(13): Xaa in position 13 is Gly or Val
WXXXHXDXGXXTXLT

SEQ ID NO: 68410 - protein, 11 aa, Artificial sequence
  protein pattern
  Variant (2)..(2): Xaa in position 2 is Glu, Asn or Ser
  Variant (4)..(4): Xaa in position 4 is Phe or Leu
  Variant (5)..(5): Xaa in position 5 is Ala or Val
  Variant (6)..(6): Xaa in position 6 is Leu, Met or Val
  Variant (8)..(8): Xaa in position 8 is any amino acid
  Variant (11)..(11): Xaa in position 11 is Asp, Asn or Ser
RXTXXXFXQPX

SEQ ID NO: 68411 - protein, 13 aa, Artificial sequence
  protein pattern
  Variant (2)..(2): Xaa in position 2 is any amino acid
  Variant (3)..(3): Xaa in position 3 is Cys or Thr
  Variant (4)..(4): Xaa in position 4 is any amino acid
  Variant (6)..(6): Xaa in position 6 is Ala or Gly
  Variant (9)..(9): Xaa in position 9 is any amino acid
  Variant (10)..(10): Xaa in position 10 is any or no amino acid
  Variant (12)..(12): Xaa in position 12 is Phe, His or Tyr
  Variant (13)..(13): Xaa in position 13 is Ala, Pro or Ser
SXXXKXRLXXYXX

SEQ ID NO: 68412 - protein, 15 aa, Artificial sequence
  protein pattern
  Variant (2)..(2): Xaa in position 2 is Leu or Pro
  Variant (3)..(3): Xaa in position 3 is any amino acid
  Variant (4)..(4): Xaa in position 4 is Gly or Ser
  Variant (5)..(5): Xaa in position 5 is Leu or Pro
  Variant (7)..(9): Xaa in position 7 to 9 is any or no amino acid
  Variant (11)..(11): Xaa in position 11 is any amino acid
  Variant (12)..(12): Xaa in position 12 is Asp, Gly, Ser or Val
  Variant (14)..(14): Xaa in position 14 is any amino acid
  Variant (15)..(15): Xaa in position 15 is Asp, Glu or Gly
GXXXXGXXXIXXVXX

SEQ ID NO: 68413 - DNA, 348 bp, Zea mays
  CDS (1)..(348)
atggctatggggttgattaatgctaatcctataatccatgagaaaaaagagaggcgtgccagacaggcaccagagaccacagatgaaagtaattatgtcagggttacattcaccccaacagtggagcactgcagtatggcaactattattggcctttgcatacgcgtgaaacttgtacggagtctccctcctcgttacaaggtggacataagggttgcccctggatcacatgcaactgaagctgctgtgaataagcaactgaacgacaaagaacgtgttgcggctgcattggagaacccaaacctactggacatggtcgaagagtgcttatcaccaacatttgattga

SEQ ID NO: 68414 - protein, 115 aa, Zea mays
MAMGLINANPIIHEKKERRARQAPETTDESNYVRVTFTPTVEHCSMATIIGLCIRVKLVRSLPPRYKVDIRVAPGSHATEAAVNKQLNDKERVAAALENPNLLDMVEECLSPTFD

SEQ ID NO: 68415 - DNA, 752 bp, Arabidopsis thaliana
  CDS (102)..(578)
aaatttctcaaaatcgcaaaatctttgcctctttcttctctaatcgaactaaatcttaaaactttgctgattgattgattttcgattccgggagaagaaaaatggtatctgggttgattaatgagaaccctatcatttacccaaagaaagagaggcgtcttcgtactgatacaagcattactgatgagcttacaccagaaccaattgatcaacttgagatttttgataatcatataagagatatcaaagatccagagcatcctaatactctggaagatctcagagtagttacagaagactcagttgaagtggatgatgagaacagttatgttagggttacgttcactccaactgtcgaacattgtagcatggcaaccgttatcggtctttgtgtccgtgtgaaacttctacgaagccttccttctcgatacaagattgatataagggtagcacctggttctcatgcaacagaagatgcattgaataaacaactaaacgataaagaacgtgtggcggctgcactagagaatccaaacctcgtggagatggttgatgaatgcctgccatcagaagagtgaattgcttttattttcttgtgagcaagtaatttacacaagcctggtggtctcagtttacactatcaatacatgtctctgttttatttgcaaagattttgatccatcacatcgactaggacttgcattgtaatacttactctgatttcaagtttgttctcaatcatttcaataaag

SEQ ID NO: 68416 - protein, 158 aa, Arabidopsis thaliana
MVSGLINENPIIYPKKERRLRTDTSITDELTPEPIDQLEIFDNHIRDIKDPEHPNTLEDLRVVTEDSVEVDDENSYVRVTFTPTVEHCSMATVIGLCVRVKLLRSLPSRYKIDIRVAPGSHATEDALNKQLNDKERVAAALENPNLVEMVDECLPSEE

SEQ ID NO: 68417 - DNA, 480 bp, Glycine max
  CDS (1)..(480)
atggtatccgagttaatcaatgcaaaccctatcatatatgaaaagaaagagcgtcgacctcgaactgctccatctgctccccatgatgagtatgctgtcgaactaatcgaccaacaagaggtttttgatcatataagagatataaaggaccctgagcacccatattccttggaagagcttaaggtgatcacggaggaagcagttgaagttgatgatcaacgtaattatgtgagggttacgtttactcctacagtggaacattgcagtatggcgacagttataggtctatgcttacgtgtcaagctcatgagaagcttgccttcacgatacaaggtggatatcagagtggcacctggatctcatgcaaccgaagctgcagttaacaaacaattaaacgataaagaacgtgtggcagctgcactggaaaactcaaaccttctgaatatggttgatgattgtcttgctccatcttatgattga

SEQ ID NO: 68418 - protein, 159 aa, Glycine max
MVSELINANPIIYEKKERRPRTAPSAPHDEYAVELIDQQEVFDHIRDIKDPEHPYSLEELKVITEEAVEVDDQRNYVRVTFTPTVEHCSMATVIGLCLRVKLMRSLPSRYKVDIRVAPGSHATEAAVNKQLNDKERVAAALENSNLLNMVDDCLAPSYD

SEQ ID NO: 68419 - DNA, 1079 bp, Glycine max
  CDS (41)..(586)
ttttgaggtgcgagagagacagtggaaagaaaggaaagggatgacgctgggtctgatcaatgcgaatcctgtggttcacgccaagaaagagcgaatcgctcgttctgatgatcctcacgccgatgacgccgttgatcctctcgacatctatgatatccttttttttttttcattttctcttctcccactcccaactcaactaactgttgagatccttgacttggctttgacaaatttcgtgagggatattcgggatcccgaacatccttattccctggaacagctcagtgttctctccgaggaatctatctccgttgacgacaaattaggccgaattctgataacttttacgccgaccgtacagcactgtagcatggccacggttattggactttgtctcagagttaaactgaagcactacttccctcctcattacaaagtggacatcaaggtttctcctggatctcatgccaacgaagaatcagtcaataagcagttgaatgataaagaaagagtcgctgctgccttggagaatcctaacctccgccagcttgtggacgagtgcctctactccaatgaactgtgaactagcagatatgccatcataataactattgtacagggcatttaccacttatgatgttataaaaagtagtcaatgtgtatggaaattagttggacggatttacctttggagaagctttatctctttgaagctatttgattttcagaggatgcatcttccctcttcttacccacttcacgttgtgtttagcatgtggtatgtatgtaaatcaagtaagacatcacgatgtcatatttttgcacctttcactacagaatgtgctgaatcagtctgtttaggggttgacccggtccttatgctcatagttcatgccatcccttttaataagtttaggtggaaagtaagcatcatttcttgtgtgtgacaaatgataattatatttgcagttatatgtggcatcgtctcatttttttagctgagggcttttgctttccctcaagtactaacctatactagttagagaggtttctcgtttgctgaatgatagcttgtt

SEQ ID NO: 68420 - protein, 181 aa, Glycine max
MTLGLINANPVVHAKKERIARSDDPHADDAVDPLDIYDILFFFSFSLLPLPTQLTVEILDLALTNFVRDIRDPEHPYSLEQLSVLSEESISVDDKLGRILITFTPTVQHCSMATVIGLCLRVKLKHYFPPHYKVDIKVSPGSHANEESVNKQLNDKERVAAALENPNLRQLVDECLYSNEL

SEQ ID NO: 68421 - DNA, 705 bp, Sorghum bicolor
  CDS (142)..(606)
caggatccaaacaaaaaaaaaaaaaaaaaaaaaaaaaaaaaaaaaaggggcggccgctcgcgatctagaactgctgtgtcctctgctctcccaaatcaattcactaccgccagcgccggatccaagaggagttggaggaagatgactgtgggcatgatcaacgcaaacccggtggtgcacgagcggccggagcgcgccgcgcacccccacgccgccgacgcgctcgacccgctcgatgtctttgatacggtgcgggatatcaaggacccggagcacccgtactccttggagcagctcagcgtgctgtcgcaggagtccgtctccgttgacgagaagctcggacgcatccagataaccttcaccccaaccgtgcagcactgcagtatggccacagtcattggtctgtgcctccgacttaagttgatgcagaacttccctccgcatttcaaggttgacatcaaagttgctccaggatctcttgctaatgaagaatcagtaaacaagcaactgaacgacaaggagagagttgcagcagctttggagaaccccaacctacgccagttggttgatgaatgcttatgcttcaatgatccatactcacgttaacttgttccatgctgcttcactagtcacaacctgcctgctgtgctgtacagttgtaaccatgcatgctgtagtttgcccaatatgttaaactgtgtatac

SEQ ID NO: 68422 - protein, 154 aa, Sorghum bicolor
MTVGMINANPVVHERPERAAHPHAADALDPLDVFDTVRDIKDPEHPYSLEQLSVLSQESVSVDEKLGRIQITFTPTVQHCSMATVIGLCLRLKLMQNFPPHFKVDIKVAPGSLANEESVNKQLNDKERVAAALENPNLRQLVDECLCFNDPYSR

SEQ ID NO: 68423 - DNA, 827 bp, Zea mays
  CDS (138)..(626)
ccggccgggaaaagtgcaccaatgattgagacccgactcgtcgttcgaggtctcccgggattccttagctctgccctccgcccctcccaaatccattcactaccgccggcgccggatccaataggaggaggaggaagatgactgtgggcatgatcaacgcaaacccggtggtgcacgagcggccggagcgcgcctcgcacccccacgccgccgatgtgctcgaccctctcgatgtctttggtagagtacttcagtcctctcctcatacggtgcgggacatcaaggacccggagcacccgtactccctggagcagctcagcgtgccgtcggaggagtccgtctccgttgacgagacgctcggacgcatccagataaccttcactccaactgtgcagcactgcagtatggccacagtcattggcctgtgcctccgacttaagttgatgcagaacttccctccacatttcaaggttgacatcaaagttgctccaggatctcttgctaatgaagaatcagtaaacaagcaattgaacgacaaggagagggttgcagcagccttggagaaccccaacctacgccagctggtcgatgaatgcttatgcttcaatgatccatactcacgttaacttgttccatgctgcttcacaagtcgcaaccctgcctgctgtacagtagtaaccatgcatgctgtagtctgccctatatgttgacgctgtcgttgtacctggcaacgtgtaattaactgccccggagacatctgtttttgccatctttaaaacgtatggatctcaataatatgacaagagttgcctgcttatgtgacatta

SEQ ID NO: 68424 - protein, 162 aa, Zea mays
MTVGMINANPVVHERPERASHPHAADVLDPLDVFGRVLQSSPHTVRDIKDPEHPYSLEQLSVPSEESVSVDETLGRIQITFTPTVQHCSMATVIGLCLRLKLMQNFPPHFKVDIKVAPGSLANEESVNKQLNDKERVAAALENPNLRQLVDECLCFNDPYSR

SEQ ID NO: 68425 - DNA, 895 bp, Zea mays
  CDS (97)..(588)
ctcgaggccggccgggacattccttagctctgccctccgcccctcccaaatccattcactaccgccggcgccggatccaataggaggaggaggaagatgactgtgggcatgatcaacgcaaacccggtggtgcacgagcggccggagcgcgcctcgcacccccacgccgccgatgtgctcgaccctctcgatgtctttggcgggctttcgtggtgcggtgcgtcagatacggtgcgggacatcaaggacccggagcacccgtactccctggagcagctcagcgtgctgtcggaggagtccgtctccgttgacgagacgctcggacgcatccagataaccttcactccaactgtgcagcactgcagtatggccacagtcattggcctgtgcctccgacttaagttgatgcagaacttccctccacatttcaaggttgacatcaaagttgctccaggatctcttgctaatgaagaatcagtaaacaagcaactgaacgacaaggagagggttgcagcagccttggagaaccccaacctacgccagctggtcgatgaatgcttatgcttcaatgatccatactcacgttaacttgttccatgctgcttcacaagtcgcaaccctgcctgctgtacagtagtaaccatgcatgctgtagtctgccctatatgttgacgctgtcgttgtacctggcaacgtgtaattaactgccccggagacatctgtttttgccatctttaaaacgtatggatctcaataatatgacaagagttgcctgcttatgtgacattagcatccaaaagcaagtgtcatttaatgtaaaatcttggtctttgttggtcatctgcatcggacgtcaattctgatccttgaaaaatataaaaaaaaaggcccctag

SEQ ID NO: 68426 - protein, 163 aa, Zea mays
MTVGMINANPVVHERPERASHPHAADVLDPLDVFGGLSWCGASDTVRDIKDPEHPYSLEQLSVLSEESVSVDETLGRIQITFTPTVQHCSMATVIGLCLRLKLMQNFPPHFKVDIKVAPGSLANEESVNKQLNDKERVAAALENPNLRQLVDECLCFNDPYSR

SEQ ID NO: 68427 - DNA, 844 bp, Zea mays subsp. mays
  CDS (118)..(594)
aaagtggagagtcacaccagcgtcttcgtcttccatcaaactcctctctctaatcgaattgcgccaaagtagggttttgcaatctcaattgaaatagtttttgatcggaaaaaaagaatggtatctgggttaataaacgagaacccaactgtgtacgagagaaaagagcgtcgtgttcgtaccgattccaccaactccgatgagttctccgtagaacctatcgatcagctcgagatttttgatcatataagagatataagagatccagagcatccttattctcttgaacaactcaaagttctaactgaagactctgttgaagttgatgatctcaagagttatgtcagggttacattcactccaacggtggaacattgtagcatggcaaccattattggtctttctatccgggttaaacttatgcgcaaccttcctcctcgttacaagattgatataagggtagcacccggttctcatgcaacagaggctgcactcaataagcaactaaacgacaaggagcgtgtggcggctgcactagagaatccaaacctcgtggagatggttgatgaatgtctatctccatcatttgaatgatgcttgatgctctcaacgtacactatatcataatatgtctctgctcttgtccgcgaagattttgattcactaggactttgtgttcagtttcgatcctgttaaagactgaggatttattcacagaacaatatattgattttgtctcgttgtttccatcttaaatcacattcctttcactactgaacttgtcacacacttgttctcttacacatgtgctccttttgttgccattaaactaacagtttgtagc

SEQ ID NO: 68428 - protein, 158 aa, Zea mays subsp. mays
MVSGLINENPTVYERKERRVRTDSTNSDEFSVEPIDQLEIFDHIRDIRDPEHPYSLEQLKVLTEDSVEVDDLKSYVRVTFTPTVEHCSMATIIGLSIRVKLMRNLPPRYKIDIRVAPGSHATEAALNKQLNDKERVAAALENPNLVEMVDECLSPSFE

SEQ ID NO: 68429 - DNA, 1107 bp, Zea mays subsp. mays
  CDS (193)..(819)
accagaaagatagacacgcacgtccgccgtctctgctccggttttcgctgtctcgctgccgtcctaggtttggagccaggtcaccggcgctaggagggcgtgaaatcgagtcgacggtcggcacccggcactcacgcgttctccacctactgctggcgctcctgtgaggcgacgccggaccggccaccccgcatgcgaacagcgcacggaccggccaccggtgtgactcctccatccaaggcttcagctccagaccgagccgccccgccaatcgccgtccgccgaaccaggcctaggaatttgttttcctcatcgaaagttactgcattgtattccatagaaatggctatggggttgattaatgctaatcctataatccatgagaaaaaagaaagacgcatccgacaggcaccagagaccacagatgaaaatgcggcagagtccatagaccagctggaaatatttgatcacattagagatataaaggatccagagcacccatactcactggaacagctgaatgtggtaactgaagactcaattgaactcaatgatgaaagcaatcatgtcagggttattttcaccccaacagtggagcactgcagtatggcaactattattggcctttgcatacgggtgaaacttgtacggagtctccctccttattacaaggtggacataagggttgcccctggatcacacgcaactgaagctgctgtgaataagcaactgaatgacaaagaacgtgttgcggctgcattggaaaacccaaacctactggacatggttgaagagtgcttatcaccaacattcgattgaggtctcagttgttgcacatctgggagccatggtgtttcatgttcagaagccacacaagcttattgccataggaattcactcctgaatattatatctgagggccatggtgtttcatgtgcatgatttttttttttgtcctccgtccctttgagttaatacaattgttatctttttggacatttgttggtgcttgtgacctccctgggcaaagggacctgtaatcagatcttgtgtagtagctttcagagcgtttccagtgccacgccattttgtggctgttgtaccccc

SEQ ID NO: 68430 - protein, 208 aa, Zea mays subsp. mays
MRTAHGPATGVTPPSKASAPDRAAPPIAVRRTRPRNLFSSSKVTALYSIEMAMGLINANPIIHEKKERRIRQAPETTDENAAESIDQLEIFDHIRDIKDPEHPYSLEQLNVVTEDSIELNDESNHVRVIFTPTVEHCSMATIIGLCIRVKLVRSLPPYYKVDIRVAPGSHATEAAVNKQLNDKERVAAALENPNLLDMVEECLSPTFD

SEQ ID NO: 68431 - DNA, 477 bp, Zea mays subsp. mays
  CDS (1)..(477)
atggctatggggttgattaatgctaatcctataatccatgagaaaaaagaaagacgcatccgacaggcaccagagaccacagatgaaaatgcggcagagtccatagaccagctggaaatatttgatcacattagagatataaaggatccagagcacccatactcactggaacagctgaatgtggtaactgaagactcaattgaactcaatgatgaaagcaatcatgtcagggttattttcaccccaacagtggagcactgcagtatggcaactattattggcctttgcatacgggtgaaacttgtacggagtctccctccttattacaaggtggacataagggttgcccctggatcacacgcaactgaagctgctgtgaataagcaactgaatgacaaagaacgtgttgcggctgcattggaaaacccaaacctactggacatggttgaagagtgcttatcaccaacattcgattga

SEQ ID NO: 68432 - protein, 158 aa, Zea mays subsp. mays
MAMGLINANPIIHEKKERRIRQAPETTDENAAESIDQLEIFDHIRDIKDPEHPYSLEQLNVVTEDSIELNDESNHVRVIFTPTVEHCSMATIIGLCIRVKLVRSLPPYYKVDIRVAPGSHATEAAVNKQLNDKERVAAALENPNLLDMVEECLSPTFD

SEQ ID NO: 68433 - DNA, 471 bp, Zea mays subsp. mays
  CDS (1)..(471)
atggggttgattaatgctaatcctataatccatgagaaaaaagaaagacgcatccgacaggcaccagagaccacagatgaaaatgcggcagagtccatagaccagctggaaatatttgatcacattagagatataaaggatccagagcacccatactcactggaacagctgaatgtggtaactgaagactcaattgaactcaatgatgaaagcaatcatgtcagggttattttcaccccaacagtggagcactgcagtatggcaactattattggcctttgcatacgggtgaaacttgtacggagtctccctccttattacaaggtggacataagggttgcccctggatcacacgcaactgaagctgctgtgaataagcaactgaatgacaaagaacgtgttgcggctgcattggaaaacccaaacctactggacatggttgaagagtgcttatcaccaacattcgattga

SEQ ID NO: 68434 - protein, 156 aa, Zea mays subsp. mays
MGLINANPIIHEKKERRIRQAPETTDENAAESIDQLEIFDHIRDIKDPEHPYSLEQLNVVTEDSIELNDESNHVRVIFTPTVEHCSMATIIGLCIRVKLVRSLPPYYKVDIRVAPGSHATEAAVNKQLNDKERVAAALENPNLLDMVEECLSPTFD

SEQ ID NO: 68435 - DNA, 1227 bp, Arabidopsis thaliana
  CDS (601)..(1227)
atggctctccgagaagacgacgacgatgttaacatcggagaaaaagtagtcgacgtagaatcggagcttcagaagtaccggatcaattcgatcgaatcaacggttgtgattcgtcagttaccgacacaaggcattgccttcaagctctggatacctgcaacaactctcgtcacgcttttagataactaccgtcgtgacccaaacattagtcctctcaatcgcaccttctcgagttttcaatccgacggttcagattcttcttctccgattaacatcgtcgagctcggatctggaacgggaatcgtcggtatcgcagcggctgcgacactaggtgctaatgtcacggtgacggatctcccaaacgtaatcgagaatctcaaattcaacgccgacgcaaacgctcaagtcgtggctaagttcggtgggaaagtccacgtggcgtctcttcgttggggcgaaatcgatgacgtggaaagtttgggtcaaaacgttgacttgattctagcgtctgacgtggtttatcacgttcatctttatgaacctctcctcaaaacgctgcgttttctgctcttagaaggatcatccgagagagtgtttcttatggctcacctcaagagatggaagaaagaatcgatttttttcaagaaagctcggagattcttcgatgttgatgttatacattgtgatgatcctcaagaaggtgctagaatcggagttgtacttcgaacccgtgaccttgtaagcagagcacttctgattaaaatacagagaacgaagactgaggaaagagagaagaaaatgactctgggactgataaacgcgaatccagtggtgcaagctaagaaggaagggcttgttcgtagagaagatcaatatagagatgatgatataagagatccagaacacccttatactttggagcagctaagggttgtctctgaagaatctgttactgtcgatgacaagctcgatcgcatcctgataacgtttacaccgacgattcagcattgtagtatggcaaatataattggtctgtgtctgagagctaagcttaaagaatgtttgcaacttcattacaaggttgatatcagagtgtctccgggttctcacgctgatgaagtttcagttaacaaacaactgaatgataaagaaagagtggtggctgcattggagaatcctaatctccgtcagctcgtggatgagtgtatctactccgatgagatatga

SEQ ID NO: 68436 - protein, 208 aa, Arabidopsis thaliana
MAHLKRWKKESIFFKKARRFFDVDVIHCDDPQEGARIGVVLRTRDLVSRALLIKIQRTKTEEREKKMTLGLINANPVVQAKKEGLVRREDQYRDDDIRDPEHPYTLEQLRVVSEESVTVDDKLDRILITFTPTIQHCSMANIIGLCLRAKLKECLQLHYKVDIRVSPGSHADEVSVNKQLNDKERVVAALENPNLRQLVDECIYSDEI

SEQ ID NO: 68437 - DNA, 477 bp, Zea mays subsp. mays
  CDS (1)..(477)
atggctatggggttgattaatgctaatcctataatccatgagaaaaaagagaggcgtgccagacaggcaccagagaccacagatgaaaatgcagcagagcccatagatcagctggaaatatttgatcacattagagatataaaggatccagagcacccgtactcactggaacagctgaatgtggtgactgaagattcaattgaactcaatgatgaaagtaattatgtcagggttacattcaccccaacagtggagcactgcagtatggcaactattattggcctttgcatacgcgtgaaacttgtacggagtctccctcctcgttacaaggtggacataagggttgcccctggatcacatgcaactgaagctgctgtgaataagcaactgaacgacaaagaacgtgttgcggctgcattggagaacccaaacctactggacatggtcgaagagtgcttatcaccaacatttgattga

SEQ ID NO: 68438 - protein, 158 aa, Zea mays subsp. mays
MAMGLINANPIIHEKKERRARQAPETTDENAAEPIDQLEIFDHIRDIKDPEHPYSLEQLNVVTEDSIELNDESNYVRVTFTPTVEHCSMATIIGLCIRVKLVRSLPPRYKVDIRVAPGSHATEAAVNKQLNDKERVAAALENPNLLDMVEECLSPTFD

SEQ ID NO: 68439 - DNA, 471 bp, Zea mays subsp. mays
  CDS (1)..(471)
atggggttgattaatgctaatcctataatccatgagaaaaaagagaggcgtgccagacaggcaccagagaccacagatgaaaatgcagcagagcccatagatcagctggaaatatttgatcacattagagatataaaggatccagagcacccgtactcactggaacagctgaatgtggtgactgaagattcaattgaactcaatgatgaaagtaattatgtcagggttacattcaccccaacagtggagcactgcagtatggcaactattattggcctttgcatacgcgtgaaacttgtacggagtctccctcctcgttacaaggtggacataagggttgcccctggatcacatgcaactgaagctgctgtgaataagcaactgaacgacaaagaacgtgttgcggctgcattggagaacccaaacctactggacatggtcgaagagtgcttatcaccaacatttgattga

SEQ ID NO: 68440 - protein, 156 aa, Zea mays subsp. mays
MGLINANPIIHEKKERRARQAPETTDENAAEPIDQLEIFDHIRDIKDPEHPYSLEQLNVVTEDSIELNDESNYVRVTFTPTVEHCSMATIIGLCIRVKLVRSLPPRYKVDIRVAPGSHATEAAVNKQLNDKERVAAALENPNLLDMVEECLSPTFD

SEQ ID NO: 68441 - DNA, 471 bp, Aedes aegypti
  CDS (1)..(471)
atggccgagttggagaacatcaaccctcatgtttaccgcaagtgcgaagaacgtcgattgacgaaagatgacgaaaacgacgatgtcgcggatcccttcgatgagcgggagattttcgatctcattcgcaacatcaacgacccggagcacccactaacgctggaagaactgcacgtcctggagcagagtctgatcacggtggacaacgagaagaacacggtcaaggtgctgttcactccaacgattccgcactgcagcatggcgacgctgattgggctctcgattcgggtcaagttgctgcgggctttgccacctcgcttcaaagtgtcggtggaaatcaacccgggaacgcacgcttcggagaatgccgttaataagcagctggcggacaaggaaagagttgctgccgccctggagaactcccatctcatcgaggtcatcaatcagtgcattgctgttccgataaagtga

SEQ ID NO: 68442 - protein, 156 aa, Aedes aegypti
MAELENINPHVYRKCEERRLTKDDENDDVADPFDEREIFDLIRNINDPEHPLTLEELHVLEQSLITVDNEKNTVKVLFTPTIPHCSMATLIGLSIRVKLLRALPPRFKVSVEINPGTHASENAVNKQLADKERVAAALENSHLIEVINQCIAVPIK

SEQ ID NO: 68443 - DNA, 519 bp, Aedes aegypti
  CDS (1)..(519)
atgttgtccttcttccgtaggaaaacctccgaagatctcagtgcatcgacgcccagtagttccagtgcttcaacgcccaaaaaagaagtctccccatcgccaaccttatcacagctcggctaccgaagtgcagatgatctgagagaaacgatctacgatttcctgcgcaccatccgggacccggagaagccaaatacgctggaagacttgaaggtggtctacgaggagggcatcttcgtccaggaaccaaccgagggcaacgtctatgtagtgcggatcgagttcaacccgacggttccgcactgctcactggccacgctgattggtctctgcatccggatcaaggtccaacggaacatcaaccacaacttaaaactggacatctacatcaagaagggcgcccactcgacggaggatgaaattaacaagcagatcaacgataaagaacggatagcggccgccatggagaatccaaacctgcgacagctggtggaaagctgcatcaaagaagaagactga

SEQ ID NO: 68444 - protein, 172 aa, Aedes aegypti
MLSFFRRKTSEDLSASTPSSSSASTPKKEVSPSPTLSQLGYRSADDLRETIYDFLRTIRDPEKPNTLEDLKVVYEEGIFVQEPTEGNVYVVRIEFNPTVPHCSLATLIGLCIRIKVQRNINHNLKLDIYIKKGAHSTEDEINKQINDKERIAAAMENPNLRQLVESCIKEED

SEQ ID NO: 68445 - DNA, 477 bp, Oryza sativa (japonica cultivar-group)
  CDS (1)..(477)
atggttgtggggttaataaatgctaaccctgtagtttatgagaaaaaagagaggcgttctcggcaggcaccagaaaccacagatgaaaatgcggcagaggctattgaccagctagaaatatttgatcatattagagacataaaggatccagagcacccatactcactcgaagagcttaatgttgtaactgaggattcagttgaaatcaatgatgaacttagtcatgtcagggttacttttaccccaacagtggagcgttgcagtatggcgaccgtcattggactttgcctgcgtgtgaaacttatgcggagtcttccccctcgatacaaggtggacataagggtggcgcctggatcacatgcaactgaaactgcagtgaacaagcaactgaacgacaaagaacgtgttgcagctgctctggaaaatccaaaccttctggacattgttgaggagtgcttgtcaccaacgtttgcttga

SEQ ID NO: 68446 - protein, 158 aa, Oryza sativa (japonica cultivar-group)
MVVGLINANPVVYEKKERRSRQAPETTDENAAEAIDQLEIFDHIRDIKDPEHPYSLEELNVVTEDSVEINDELSHVRVTFTPTVERCSMATVIGLCLRVKLMRSLPPRYKVDIRVAPGSHATETAVNKQLNDKERVAAALENPNLLDIVEECLSPTFA

SEQ ID NO: 68447 - DNA, 465 bp, Arabidopsis thaliana
  CDS (1)..(465)
atgactctgggactgataaacgcgaatccagtggtgcaagctaagaaggaagggcttgttcgtagagaagatcaatatagagatgatggtgttgatcctcttgaaatatatgattatgtaagagatataagagatccagaacacccttatactttggagcagctaagggttgtctctgaagaatctgttactgtcgatgacaagctcgatcgcatcctgataacgtttacaccgacgattcagcattgtagtatggcaaatataattggtctgtgtctgagagctaagcttaaagaatgtttgcaacttcattacaaggttgatatcagagtgtctccgggttctcacgctgatgaagtttcagttaacaaacaactgaatgataaagaaagagtggtggctgcattggagaatcctaatctccgtcagctcgtggatgagtgtatctactccgatgagatatga

SEQ ID NO: 68448 - protein, 154 aa, Arabidopsis thaliana
MTLGLINANPVVQAKKEGLVRREDQYRDDGVDPLEIYDYVRDIRDPEHPYTLEQLRVVSEESVTVDDKLDRILITFTPTIQHCSMANIIGLCLRAKLKECLQLHYKVDIRVSPGSHADEVSVNKQLNDKERVVAALENPNLRQLVDECIYSDEI

SEQ ID NO: 68449 - DNA, 471 bp, Arabidopsis thaliana
  CDS (1)..(471)
atgcgttcaggagagaaaaacatggattctgtattaaccaataagaacccaattatttatccgaagagaacacggcgttatcgtactgatcagagcagtaccgatgagttttcatctacaaatcgtataagagatatcaaagatccagagcatcctgaactttctttggaagatctcaatgttcttactgaagaatcagttgaagttgatgatcacaagagttacgttagaattacattcactccaactcttcctcattgtcacttgccaacccatattggtctttgcatcttagtcaaacttgtgcaaagcttacctgctagattcaaggttgatgtgagagtagcaccagggagtcatgataaagagacgacagtcaataaacaacttggggataaagaacgtgtgactgcagcattagagaatcccgagttggtggctctgcttaataaaatgatgcaagtgtgttag

SEQ ID NO: 68450 - protein, 156 aa, Arabidopsis thaliana
MRSGEKNMDSVLTNKNPIIYPKRTRRYRTDQSSTDEFSSTNRIRDIKDPEHPELSLEDLNVLTEESVEVDDHKSYVRITFTPTLPHCHLPTHIGLCILVKLVQSLPARFKVDVRVAPGSHDKETTVNKQLGDKERVTAALENPELVALLNKMMQVC

SEQ ID NO: 68451 - DNA, 480 bp, Encephalitozoon cuniculi GB-M1
  CDS (1)..(480)
atgaacgagtttccatttgttgccagctcgctggaggagagacatcctattagtatgtccaacggagtgctccagaatgttacccagaggagcgtctttgagcttatcagggatattagagaccctgagcatccatatactttggagcagctcggcgttgtatccagggagggtgtaagtataggatgtattggcccggacggcattgcccccaatgtggggctaccgatcagatgtgtgaaggtggtgttcaagcccacaataccccattgctccatggcagccgtaataggcctatgcataaagacacatgtaagcaggcatgttcggaaccatttcgtccaggtccatatagtagacggcgggcacatcaactttagggcactgaataagcagctggatgacaaggacagggttcttgcggcaacagagaacgaggtactgcttgaccttatggagaagtgccttcctgccatctga

SEQ ID NO: 68452 - protein, 159 aa, Encephalitozoon cuniculi GB-M1
MNEFPFVASSLEERHPISMSNGVLQNVTQRSVFELIRDIRDPEHPYTLEQLGVVSREGVSIGCIGPDGIAPNVGLPIRCVKVVFKPTIPHCSMAAVIGLCIKTHVSRHVRNHFVQVHIVDGGHINFRALNKQLDDKDRVLAATENEVLLDLMEKCLPAI

SEQ ID NO: 68453 - DNA, 507 bp, Strongylocentrotus purpuratus
  CDS (1)..(507)
atgttcctccaggggcatcccggtgagacaattaaagagaagaggatggatcaaggaggagagtctgcttccaaacctccatcatgtccaagctggaccacgcaagaggagctcaatggaatggcaggtgatatttatgacattatccgagacatccaggatcctgagaaacccaatactctggaggacctggaggttgtctatgaggaaggggtcacggtagcggccctggagacagaggaacagggtcatctcatcaatattgaattcactcccactgttcctcactgctccttagcaacactaattggtctttgtctgagagtcaggctagagagaagtcttccaaataaacacaagcttgacatcattgttaaaaaaggaacacatgcaacagaagatgacattaacaaacaaatcaacgacaaagagagaatagcagcagccatggaaaatcccaatctgaggaaacttgtggaacattgtgtcagcatagaggattactga

SEQ ID NO: 68454 - protein, 168 aa, Strongylocentrotus purpuratus
MFLQGHPGETIKEKRMDQGGESASKPPSCPSWTTQEELNGMAGDIYDIIRDIQDPEKPNTLEDLEVVYEEGVTVAALETEEQGHLINIEFTPTVPHCSLATLIGLCLRVRLERSLPNKHKLDIIVKKGTHATEDDINKQINDKERIAAAMENPNLRKLVEHCVSIEDY

SEQ ID NO: 68455 - DNA, 483 bp, Nasonia vitripennis
  CDS (1)..(483)
atgagtaaggttttggaaaatcctactccaaaaatctacccgacgttggaagaaaaaatcgccgacggagaatgtgaagaaaaagtgacccgtaatcccgacgaattcgatgctcgtggaatctttgaactattacgaaatataaacgatcccgagcatccattgacgctcgagcagttaaatgttgtccagcagaatttaatagaagtcgacaatgaaagcaatgaaatcaatgtccaattcactccaacaataccacactgtagcatggccacattgataggtttgtcgataagaacacaactattgcggactattcctcctaggtttaaagttagtgttaccattaccccaggaacacatacagcagaaactgctgtaaataagcaattggctgacaaagaaagagtagctgctgcgttagagaaccaatttctgttgactgttattgaccagtgtctagaaaatgctgtacagacgtaa

SEQ ID NO: 68456 - protein, 160 aa, Nasonia vitripennis
MSKVLENPTPKIYPTLEEKIADGECEEKVTRNPDEFDARGIFELLRNINDPEHPLTLEQLNVVQQNLIEVDNESNEINVQFTPTIPHCSMATLIGLSIRTQLLRTIPPRFKVSVTITPGTHTAETAVNKQLADKERVAAALENQFLLTVIDQCLENAVQT

SEQ ID NO: 68457 - DNA, 543 bp, Anopheles gambiae str. PEST
  CDS (1)..(543)
atgctttcgtttttccgcaagaaaacctccgacgagttgcccaccggtggctccgcaccgtcggccgcgaaaggcaatccatcaatcggtggaacaacagcaaatggtgaagtgcctccacgaccgagcctgcaagagctgggctaccgaaatgcgaacgatttgcgtgaaaccatctacgactttctgcgcacaatacgcgacccggaaaagcccagcacgctggaagatctgcacgtcgtgtacgaggagggaatattcgtgaacgagccaacgccgggcaacgtgaacgtggtgcgggttgagtttaatccgaccgtaccgcactgttcgctggcaacgctgatagggctgtgcatacgggtgaaaattgagcgaaacattacgcacagcctgaagctggacatctacatcaagaaaggtgcccacgcgacggaagacgaaattaacaagcagatcaatgataaggaacgaatagcagcggctatggagaatccaaacctcagacagttggtggagaactgcatcaaagatgaagattga

SEQ ID NO: 68458 - protein, 180 aa, Anopheles gambiae str. PEST
MLSFFRKKTSDELPTGGSAPSAAKGNPSIGGTTANGEVPPRPSLQELGYRNANDLRETIYDFLRTIRDPEKPSTLEDLHVVYEEGIFVNEPTPGNVNVVRVEFNPTVPHCSLATLIGLCIRVKIERNITHSLKLDIYIKKGAHATEDEINKQINDKERIAAAMENPNLRQLVENCIKDED

SEQ ID NO: 68459 - DNA, 471 bp, Anopheles gambiae str. PEST
  CDS (1)..(471)
atgaccgagctggagaatgtaaatccaaatgtgtacaaaaagagtgaagatcgaaagctcacgaaagaggacgaggacgaggatgtggtggatccgttcgatgagcgggaaatcttcgacataatccgcaacatcaacgatccggaacatcctctcacactggaagaactgcacgtcctggagcagagtctcatcacggtggataatgagaagaacatcgtcaacatcctgttcacaccgaccatcccacactgcagcatggcaacgctgatcggtctctcgatacgggtgaagcttctccgggcgctgcctccgcgcttcaaggtgtcggtagagatcaaccccggcacgcacgcatccgagcacgcggtgaacaagcagctgaccgacaaggaacgtgtggcggccgcactggaaaacacgcacctgatggaggttatcaatcagtgtatcggaacgccgttgaaataa

SEQ ID NO: 68460 - protein, 156 aa, Anopheles gambiae str. PEST
MTELENVNPNVYKKSEDRKLTKEDEDEDVVDPFDEREIFDIIRNINDPEHPLTLEELHVLEQSLITVDNEKNIVNILFTPTIPHCSMATLIGLSIRVKLLRALPPRFKVSVEINPGTHASEHAVNKQLTDKERVAAALENTHLMEVINQCIGTPLK

SEQ ID NO: 68461 - DNA, 642 bp, Magnaporthe grisea 70-15
  CDS (1)..(642)
atgcaatcgacaagtccagacaacgccaaccccaccatccggagtatcgccagtcttccatcccgcggcaggcgttcagatttcagcctggacaattctccagaatcaaagtacgacaacttgctgctttcccgaaatacagcatcggactacggtctcccggacgtcttggcctggtcatccgacagcgacagcgattatgactccaccgaccgcgcctcccctttcccctcatcatcgtcaccatcgtcatcactctatgccgctgaacccatcgatgcccttgaaatttacactctgaccgcgtccatctcggacccggaacatccccacaccctgggccagctctccgtcatcaatctaccggacatccacgtgacctccaatcacgtcctggtcgaggtgacccctaccatcacgcactgctccctggccaccgtcatcgggttggcagtccgagtgcgcctggagcaagccttgccgccagcctaccgcgtcgatgtgcgcatgaagcagggctcccacgcccaggacgaccaggtcaaccgtcaactggctgacaaggagcgcgttgccgctgcgctcgagaatgacagcctcaggggaatgctcgacaagatgatggagacttgcaccacttga

SEQ ID NO: 68462 - protein, 213 aa, Magnaporthe grisea 70-15
MQSTSPDNANPTIRSIASLPSRGRRSDFSLDNSPESKYDNLLLSRNTASDYGLPDVLAWSSDSDSDYDSTDRASPFPSSSSPSSSLYAAEPIDALEIYTLTASISDPEHPHTLGQLSVINLPDIHVTSNHVLVEVTPTITHCSLATVIGLAVRVRLEQALPPAYRVDVRMKQGSHAQDDQVNRQLADKERVAAALENDSLRGMLDKMMETCTT

SEQ ID NO: 68463 - DNA, 615 bp, Gibberella zeae PH-1
  CDS (1)..(615)
atggctaccttggataatgcgaatcctacaatcctgagtgcttcgcagttgccgacccggcaaaagaaggctgagcctcgtcgtggtcctgaatcgaaatacgacgatattatctttgcaaagccatcctatctgtcaggcccttttgccggcccgacttctgcagcatggcctcaattgaacgaccaacacgatgaattttcatctgaagctattgatgagcaagagatttatgatctaatctcaacaatctcggatcctgagcacccggtttcactgggccagctgtcagtgatcaacctctctgatatccacatcactccttctcccgcctttggtgttcctgacccaaacacaatcgtgcaggtggttgtggagatcacaccaaccatcacccattgctcattggccactgtcatcggacttggagttcgagttagactcgagcaagcactgccgcccaactaccgcgtggatgtgacctgcaaggagaacagccataaccaagatgatcaagtgaacaagcagttgggtgacaaggagcgagttgctgctgctttggaaaacgataccctgaagggagttctggacaagatgctggaaacatgcgcctag

SEQ ID NO: 68464 - protein, 204 aa, Gibberella zeae PH-1
MATLDNANPTILSASQLPTRQKKAEPRRGPESKYDDIIFAKPSYLSGPFAGPTSAAWPQLNDQHDEFSSEAIDEQEIYDLISTISDPEHPVSLGQLSVINLSDIHITPSPAFGVPDPNTIVQVVVEITPTITHCSLATVIGLGVRVRLEQALPPNYRVDVTCKENSHNQDDQVNKQLGDKERVAAALENDTLKGVLDKMLETCA

SEQ ID NO: 68465 - DNA, 519 bp, Apis mellifera
  CDS (1)..(519)
atgttgtcatttttacgaaaaatttcaattggggggaagataagagatggtgtaccagcgaacgatgaaatggaggctattgaaggctgtttggaggcgaaaaacaacagaagtttagtttcacgatccgatactgaactcaaggaatctatttatgatttattgagaacgattaaggatccagaaaagccacaaacattagaacaattggatgttgtctatgaagactgcgttgagattttaaaacaaactcctcaaggagtatctgtgattcgcatcgagtttaatccaacagtacctcattgctctctggcaacattaattggtctttgcattagagtaaaattagaacgtaatttagtagctctttttaaattagatatatatattaagaaaggtgcacattctacagaacaagaaataaataaacaaataaatgataaggaaagaattgcagctgctatggagaatcctaatttgagagaattagtagagaaatgtattcaagaagaagagtga

SEQ ID NO: 68466 - protein, 172 aa, Apis mellifera
MLSFLRKISIGGKIRDGVPANDEMEAIEGCLEAKNNRSLVSRSDTELKESIYDLLRTIKDPEKPQTLEQLDVVYEDCVEILKQTPQGVSVIRIEFNPTVPHCSLATLIGLCIRVKLERNLVALFKLDIYIKKGAHSTEQEINKQINDKERIAAAMENPNLRELVEKCIQEEE

SEQ ID NO: 68467 - DNA, 672 bp, Candida glabrata CBS 138
  CDS (1)..(672)
atgtctgagtatattaatgagaatcctgatgtgttagatgagagtgatcttccaaagagagctgaggatgcttcaaatcagttgcttttgaacggtattagcaacaagactactttggaaaggaagaagatgttgttacagattgagaactccacagattcatcgttgcagaagaatatcgagctatttgacaaactgctttcattaaaccaagtaccagatcttgtctcggatagcggtgatgattgtgtaagtaatgaagaagacggtgaagattatgatccggtcgatgagcaagaaatctacgatttgattgcctacattcaggacccagaacaccctctaacgctggcacagctttcgattgtaaaccttcaggatatcaaggtggtggatagtgggaatccagcagatatcgccgaagtgctaattaagataaccccaactattactcactgttccttagctacattgattggtctgggaattagagttaggctggagagatctctgcccccgcggttcagaatcacaattatggtaaaagaaggcacacataattcggaaaaccaggtgaacaagcagttgaacgacaaggaaagagttgcagcagcatgtgaaaatgaacagcttctttcagtggtctcaaagatgctgttgacatgcaaatag

SEQ ID NO: 68468 - protein, 223 aa, Candida glabrata CBS 138
MSEYINENPDVLDESDLPKRAEDASNQLLLNGISNKTTLERKKMLLQIENSTDSSLQKNIELFDKLLSLNQVPDLVSDSGDDCVSNEEDGEDYDPVDEQEIYDLIAYIQDPEHPLTLAQLSIVNLQDIKVVDSGNPADIAEVLIKITPTITHCSLATLIGLGIRVRLERSLPPRFRITIMVKEGTHNSENQVNKQLNDKERVAAACENEQLLSVVSKMLLTCK

SEQ ID NO: 68469 - DNA, 684 bp, Kluyveromyces lactis NRRL Y-1140
  CDS (1)..(684)
atgtcggaatttattaatgagaaccctgatattttagatgagaccctcctaccgtccagaaaagaagatattacaaatgaactatttggtgatgccttagggaaaatcacacatgaaagaaaaaggcagttgctgcagataggatctgtagactcgccagttttgaaaaacataggtcttctagataaactattaaaccagcagctatctttggatgagaccgtacctgatttgacagatatagaaacagcaactgaatccgatgaaaacactgaggaagaagaagaggaagatcctatcgatgctcaagaaatctacgatcttatagctcatatcagtgacccagaacatccactaacgctaggacaattagcggtggtgaacttggctgatatcgaagtacatgatacgaacggcaaggataaaatggccgaagttatcgttagaatcactccaacaattacacattgctctctcgcaacccttattgggcttggtattagagtgcggttagaacgtagtctctcgcccagatttagaatcactatcctacttaaaaagggtacacatcaaagtgaaaaccaggttaacaaacaacttaatgacaaagaacgtgtagctgctgcctgcgagaatgaccagttgttaggagtcgtttccaaaatgttaagtacatgtaaataa

SEQ ID NO: 68470 - protein, 227 aa, Kluyveromyces lactis NRRL Y-1140
MSEFINENPDILDETLLPSRKEDITNELFGDALGKITHERKRQLLQIGSVDSPVLKNIGLLDKLLNQQLSLDETVPDLTDIETATESDENTEEEEEEDPIDAQEIYDLIAHISDPEHPLTLGQLAVVNLADIEVHDTNGKDKMAEVIVRITPTITHCSLATLIGLGIRVRLERSLSPRFRITILLKKGTHQSENQVNKQLNDKERVAAACENDQLLGVVSKMLSTCK

SEQ ID NO: 68471 - DNA, 660 bp, Debaryomyces hansenii CBS767
  CDS (1)..(660)
atgtcagaccctataaatgctaacccaacggttatagatgtttcaaacttgcctacgaggttcgatgattcggaaatccaggagaaagaggtggctagaaataccgaattagtggatagaatattatcactttctttattgaatcaaggtagtttaacccatactgatactgaattaatgccggatctagtttctgatgtagaagctgatacatcatccatggaagaagaattattagatgaaaccgatgaccaagaagaagaagacgtaattgatgcgcaagaaatatttgatttaatttctactatttcagatccagaacatccattaacattagcgcagttggcggtggttaacttggtagatatcaaagtaacacatggagcaaacaaacatactgatatctccgagattttgattaaaataacaccaaccattacacattgttcattagcgactcttattgggttgggaatcagagtgagattagaaagatgcctcccaccgcgcttccggataatcatccttattaaagaaggcactcatcaatctgagaaccaggtgaacaagcagttaaacgataaagaaagagttgcagctgcttgcgaaaacgatcaattattaagtgttatcctgcaaatgttaagtacatgcaagtga

SEQ ID NO: 68472 - protein, 219 aa, Debaryomyces hansenii CBS767
MSDPINANPTVIDVSNLPTRFDDSEIQEKEVARNTELVDRILSLSLLNQGSLTHTDTELMPDLVSDVEADTSSMEEELLDETDDQEEEDVIDAQEIFDLISTISDPEHPLTLAQLAVVNLVDIKVTHGANKHTDISEILIKITPTITHCSLATLIGLGIRVRLERCLPPRFRIIILIKEGTHQSENQVNKQLNDKERVAAACENDQLLSVILQMLSTCK

SEQ ID NO: 68473 - DNA, 579 bp, Yarrowia lipolytica CLIB122
  CDS (1)..(579)
atgtccgatcccattaacgccaaccccgaggttatcgacgtgtcagccctgcccacacggaacaaaggccagtcgcagctcgatctgcctcttggagcctttctagacacacatcccacacccctgtctctgattcagaacgagtccgccagcggatccgacgacgatgatgacgatgacgagcctgaacctatcgattctcaggagatttacgacctcatcgccaccatctccgatcccgagcatcccctgactctcggtcagttggctgttgtcaaactggaagatatctgggttcacgacactggagacaagaacaagatggccgagattgtggtcaaaatcacccccaccattacccactgttctctggccaccctgattggacttggaatccgggtgcgactcgagcgagctcttcctcctcggttccggttcactatcactgtcaaggaaggtacccaccagagtgagaatcaggtcaacaagcagcttaacgacaaggagcgggtggctgcagcatgcgaaaacgaacagctgcttggtgtgatttcaggtatgctagccacttgccaataa

SEQ ID NO: 68474 - protein, 192 aa, Yarrowia lipolytica CLIB122
MSDPINANPEVIDVSALPTRNKGQSQLDLPLGAFLDTHPTPLSLIQNESASGSDDDDDDDEPEPIDSQEIYDLIATISDPEHPLTLGQLAVVKLEDIWVHDTGDKNKMAEIVVKITPTITHCSLATLIGLGIRVRLERALPPRFRFTITVKEGTHQSENQVNKQLNDKERVAAACENEQLLGVISGMLATCQ

SEQ ID NO: 68475 - DNA, 471 bp, Apis mellifera
  CDS (1)..(471)
atgggtgataaattggaaaatattaatcccaaattatataaaaaaatagatgaaagacaaattacggcagaagatgaagatgaagatattgtagatgaatttgatgcacgagaaatttttgatatgattagaaatattaatgatcctgaacatcctttaactttagaagaattaaatgtggtagaacaaagtcttattgagattgataataaagcaaacatagttcatgtaaaatttacaccaacaataccacattgtagtatggcaacattaattggcttatcaattagagtacaattattgcgagttttaccttcaagatttaaagttagtgttgaaattactccgggtactcatatatcagagacagcagtaaataaacaattggctgataaagaaagagtagcagctgctcttgaaaacaatcatttacttgaagtaattaatcaatgtgtggatataaaattttaa

SEQ ID NO: 68476 - protein, 156 aa, Apis mellifera
MGDKLENINPKLYKKIDERQITAEDEDEDIVDEFDAREIFDMIRNINDPEHPLTLEELNVVEQSLIEIDNKANIVHVKFTPTIPHCSMATLIGLSIRVQLLRVLPSRFKVSVEITPGTHISETAVNKQLADKERVAAALENNHLLEVINQCVDIKF

SEQ ID NO: 68477 - DNA, 606 bp, Aspergillus nidulans FGSC A4
  CDS (1)..(606)
atggcttctgaaatgcagaactcgaatccaactattattaacaccgccgatcttcctacacgccttcggcccagtgcttcccccaaaagcagcacgtatggaagcgaattctttgcctccgcgcttccctcgctcacggtcgacgctctctctgactactcaccatcgacctccgagtccgaaaacgacgatgacttgatggaagagcctatagacgaacaagaaatatacgaccttgtctcaactatatctgatcccgaacaccccatttccctgggagctttagcagtggtttcgttaccagatatttctattaagccggctcttccggatgtacccgattcgcctcttcgcaccgttacagttctcatcaccccgacgattactcactgcagtttagccacagtcataggtcttggtgtacgtgtccggcttgaacaatctctcccaccacggttccgagtaaatgtgcagatcaaggaagggacacatagcacggcggacgaggtgaacaaacagctcgctgataaggaaagggtcgccgcagctctcgaaaacggtacgctcatgggggtgattgcaaagatgcttgagacgtgcctatga

SEQ ID NO: 68478 - protein, 201 aa, Aspergillus nidulans FGSC A4
MASEMQNSNPTIINTADLPTRLRPSASPKSSTYGSEFFASALPSLTVDALSDYSPSTSESENDDDLMEEPIDEQEIYDLVSTISDPEHPISLGALAVVSLPDISIKPALPDVPDSPLRTVTVLITPTITHCSLATVIGLGVRVRLEQSLPPRFRVNVQIKEGTHSTADEVNKQLADKERVAAALENGTLMGVIAKMLETCL

SEQ ID NO: 68479 - DNA, 669 bp, Candida albicans SC5314
  CDS (1)..(669): transl_table=12
atgagtgatcctattaatgctaatccaacaattatcgatgtggcggatttacccacaagattaaataatgacaataacaacaacaatgataataattatcaaacaactaataaattgaatctaaaaaaaaacaaacaaatgatatcacaacttgtttctttatcattattaaaccctgatgaatcacctgaagcagcagatgatgaaacatccttgtcatccgatgaagaaaatgaagatgacgattttgatcctatagatgaacaagaaattttcgatcttatagcaacaatatctgatcctgaacatccattaacattagctcaattagccgttgtgaatttatccgacatcaaaataactaacccaccaaattgtggtggtgatggtggtgatggtggtggtggtggtatatcggaagtattaattaaaatcacccctacaattacacattgttcattagcaacattaattggattaggtatacgagttagattagatcgtagtttaccatcaaggtatagaattaaaatattgattaaagaaggtactcatcaactggaaaatcaagttaataaacaattgaatgataaagaaagagttgctgctgcttgtgaaaatgatcaattattaaatgtaatcctgcaaatgttaagtacatgtaagtag

SEQ ID NO: 68480 - protein, 222 aa, Candida albicans SC5314
MSDPINANPTIIDVADLPTRLNNDNNNNNDNNYQTTNKLNLKKNKQMISQLVSLSLLNPDESPEAADDETSLSSDEENEDDDFDPIDEQEIFDLIATISDPEHPLTLAQLAVVNLSDIKITNPPNCGGDGGDGGGGGISEVLIKITPTITHCSLATLIGLGIRVRLDRSLPSRYRIKILIKEGTHQSENQVNKQLNDKERVAAACENDQLLNVISQMLSTCK

SEQ ID NO: 68481 - DNA, 846 bp, Ustilago maydis 521
  CDS (1)..(846)
atggaacagaaggacaacgccaaccccattgtataccagtccagctcgcgcttgacgcagcgacgcagttcgtctagcgccaacgcagagtggtggcgtgatcagtcgattcattcgtcggcacagtcagctggtcgaccatctgcatcgtcctctagcatcgctggcatcggtgccgtcggtagcagcgccatctctagcaacaatttcgctgcctcgttcgcgcgtgcgactcgatctaccatcgatcaagacgacgacgaggagcttgaagacgaagcggacgactctgatgacgatgtcgaaatgtcgcgtcgctccggtactccagccacatcacccgagattgagtgcgccgccccccacaccaaagccgtcgcgacctcgatggacgaagagattgatagccaagagatctatgacctcatccgatccatcaccgacccggaacacccgctcacccttgaacagctcgccgtggtcaacgcatcacatatcaccgtctcgcacggcgacgctgctgctaacaaactgccgcacgtactgcttgaattcacccccaccattccgcactgtagcatggccacgctgataggtctctcactccgtgttcgtctgctacgtgcactacccgatcgcttcaaagtggacatccgcgtgcgtcccggaacgcatcagagcgagaatgcagtcaacaagcagctcaacgacaaagagagggtcgcagcagcgctcgaaaactcgcatctgttcaatggagaagaggaaaaagtgccgatgaggtcgcagcatacttcagtgggcctccgagcggcgatggcaaagaggaccaggatcatcagttga

SEQ ID NO: 68482 - protein, 281 aa, Ustilago maydis 521
MEQKDNANPIVYQSSSRLTQRRSSSSANAEWWRDQSIHSSAQSAGRPSASSSSIAGIGAVGSSAISSNNFAASFARATRSTIDQDDDEELEDEADDSDDDVEMSRRSGTPATSPEIECAAPHTKAVATSMDEEIDSQEIYDLIRSITDPEHPLTLEQLAVVNASHITVSHGDAAANKLPHVLLEFTPTIPHCSMATLIGLSLRVRLLRALPDRFKVDIRVRPGTHQSENAVNKQLNDKERVAAALENSHLFNGEEEKVPMRSQHTSVGLRAAMAKRTRIIS

SEQ ID NO: 68483 - DNA, 576 bp, Cryptococcus neoformans var. neoformans B-3501A
  CDS (1)..(576)
atgtcccgccagctcgacaacgtcaaccccaccatttttgcgccatcagctcccagtttcgtccgaagatcgacaggaaaatcggccaaatcgagcttatgggctcccgaagctttgtcagatgatggggaggactactactccccaggagcgagaagtagcggtagtgtcagtgacgaggaggaaggaagggaagatattgatgcgcaagaggtttatgaccttctgcggtcaataaccgaccctgaacatccagtatctttggagcagcttcgagtggtaaaccctgaggatattcatgttgctggaaatcgtgtgttggtgtatcttacacctacaatcccacattgctccatgtccaccctcattgggctatcattgagagtgcgattattgagggctttgcctccacgatatagggtggatattcgaatcaaatcgggaactcaccaatccgagcacgcagtcaacaaacagttaaacgacaaggaacgagtacaagcggctttggagaacaagcatctgttgagtgtggtggaaggctgtttggcgactgctggaaagcgtggcgaatag

SEQ ID NO: 68484 - protein, 191 aa, Cryptococcus neoformans var. neoformans B-3501A
MSRQLDNVNPTIFAPSAPSFVRRSTGKSAKSSLWAPEALSDDGEDYYSPGARSSGSVSDEEEGREDIDAQEVYDLLRSITDPEHPVSLEQLRVVNPEDIHVAGNRVLVYLTPTIPHCSMSTLIGLSLRVRLLRALPPRYRVDIRIKSGTHQSEHAVNKQLNDKERVQAALENKHLLSVVEGCLATAGKRGE

SEQ ID NO: 68485 - DNA, 480 bp, Tribolium castaneum
  CDS (1)..(480)
atgcgcctcgaacagctcgaaaaccaaaaccccaacgtttataacaaaaccactgatcgtttaatcacagctgaagaagaaaacgacgatgttgttgacgaatttgactccagagaaatttttgatctgattagaaatatcactgatccagaacatcccctaactctagagcaattgcacgtcgtccaggaaagtctgattcaagttgacaatgcaaataattcgatttttgtaaattttacaccaactataccacattgtagtatggccacactaataggactttcaattcgtgtgaaattacttaggtgtttaccggcaaggtttaaagtgagggttgaggtcactaaagggactcataatgcggaaaattcggtaaataaacaactagctgataaggaaagggttgcggcggctttggaaaacccacacttgatccaggtcatcaaccagtgcatttccaacagaaaacgcggttaa

SEQ ID NO: 68486 - protein, 159 aa, Tribolium castaneum
MRLEQLENQNPNVYNKTTDRLITAEEENDDVVDEFDSREIFDLIRNITDPEHPLTLEQLHVVQESLIQVDNANNSIFVNFTPTIPHCSMATLIGLSIRVKLLRCLPARFKVRVEVTKGTHNAENSVNKQLADKERVAAALENPHLIQVINQCISNRKRG

SEQ ID NO: 68487 - DNA, 462 bp, Tribolium castaneum
  CDS (1)..(462)
atgcctgaccttctggagctggtggaatttgaagatagtccacgcaaggaagtcaaggaggtgagtgaagatgatagtgaattgaaatatacagtttatgatttaattcgcactataaaggacccagagaaacccaacactttggaagaattaaacgtagtttatgaggagggagttgaggttaaggaacgtacttctggcaatgttagcgttgtgagggttgaatttaatcccactgtgccccactgttctttagcaacgctaattggattgtgtattaggataaaattagaaagatgtattccttataggattaaattagatatttatatcaaggcaggagcccacacaactgaacacgaaatcaataagcaaattaacgataaagagagaatagcagccgcaatggaaaatccaaacttgcgggaaatggtagaaaactgtattgttgaagaagactga

SEQ ID NO: 68488 - protein, 153 aa, Tribolium castaneum
MPDLLELVEFEDSPRKEVKEVSEDDSELKYTVYDLIRTIKDPEKPNTLEELNVVYEEGVEVKERTSGNVSVVRVEFNPTVPHCSLATLIGLCIRIKLERCIPYRIKLDIYIKAGAHTTEHEINKQINDKERIAAAMENPNLREMVENCIVEED

SEQ ID NO: 68489 - DNA, 489 bp, Vitis vinifera
  CDS (1)..(489)
  misc_feature (18)..(18): w is a or t
  misc_feature (70)..(70): s is g or c
atggtttcaggattaatwaatgccaatcctgtcatctaccaaaagaaagagcgccaggttaggattgcascttgtgattccgatgaagatataaaggatcctgagcatccatattctttagaagagctgaaagtgataacagaagatgcaattgaagtagatgacaagcgtagctatgttagggttactttcactcccacagttgaacattgcagtatggcaacagtgattggcctttgcttgcgtgtgaaacttctgcgcagtttgccatctcgttacaaggtagttgttggtttagtgttgattcaaaaactttcaagatttcagttgagaagatcaaaggtggatatcaaggttgcacctggaactcatgctaccgaagctgctgttaataaacagttgaatgataaagaacgggtggcagcagcactggaaaaccctaaccttctggacatggttgatgaatgtctggctccatcatatggttga

SEQ ID NO: 68490 - protein, 162 aa, Vitis vinifera
  misc_feature (24)..(24): The Xaa at location 24 stands for Ala, or Pro.
MVSGLINANPVIYQKKERQVRIAXCDSDEDIKDPEHPYSLEELKVITEDAIEVDDKRSYVRVTFTPTVEHCSMATVIGLCLRVKLLRSLPSRYKVVVGLVLIQKLSRFQLRRSKVDIKVAPGTHATEAAVNKQLNDKERVAAALENPNLLDMVDECLAPSYG

SEQ ID NO: 68491 - DNA, 786 bp, Pichia guilliermondii
  CDS (1)..(786)
atggaccacgagcaatggcgaagcttggcggaaaaaaaccagatcgtaattatccataatcggcacgcggatagaaactggattcaccttcaactgcgtaagtgtgggtgcaccggtgtacaaagatatcatgagttcgcgagatttgagcgaaaaagttcagatatgtcagatccgatcaatgccaaccccacggttattgatacctcccagttgcccacgcggctcggaaagggctctcgggagctcaagccgtgtgacaaactagtactgaagattttaaacttatcgttgttgaaaccagcagatgagtcagcagaaagcgatgaccaaatacctgatttgatgtctgatgttgattcagaatctactgacgatgagctagaaggtgccgacaacgagggtatagactcccaagagatttttgacttgatatcgacgatttccgaccctgaacatcctttgacactagcacaactcgccgtagtcaaccttgaagacatacaagtttcagataatgctggagcgatttctgaggttttggtgaagatcactcccactatcacacattgctcgcttgccacattgattggtttgggaataagagttcgtttggaacgcagtttaccagctcggtttcgcattagaatcttgattaaagaaggcactcaccagtctgaaaaccaagtgaacaagcaacttaacgacaaggagcgtgtagccgcggcgtgtgagaatgagcagttgttgggagttattctgcagatgctcagcacttgcaagtga

SEQ ID NO: 68492 - protein, 261 aa, Pichia guilliermondii
MDHEQWRSLAEKNQIVIIHNRHADRNWIHLQLRKCGCTGVQRYHEFARFERKSSDMSDPINANPTVIDTSQLPTRLGKGSRELKPCDKLVLKILNLSLLKPADESAESDDQIPDLMSDVDSESTDDELEGADNEGIDSQEIFDLISTISDPEHPLTLAQLAVVNLEDIQVSDNAGAISEVLVKITPTITHCSLATLIGLGIRVRLERSLPARFRIRILIKEGTHQSENQVNKQLNDKERVAAACENEQLLGVILQMLSTCK

SEQ ID NO: 68493 - DNA, 612 bp, Aspergillus oryzae
  CDS (1)..(612)
atggcatccgaaatgcagaactcgaatcccacaatattgaatgctgctgatcttccaaaacgcttgcgacctgcaccgtctcgcaagcccggtatctttgggaatggtctctttgcgtccgcgcttccctttgtgtatgcgagtaaattacccccagagggctttacgtcgtcatcagagtcagaaagtgatgatgatgatctgttggaagaaccgatagatgaacaagaaatctacgatctcgtatcgactatatctgacccggagcatccgatatcgttgggagctctagcggttgtgtctcttcctgatatttctattaccccaacactcccatatgtaccggcttcgcctctacgaacagttactgtcctcatcacccctactatcacgcactgtagcctcgccacggtcataggtctcggtgtacgtgttcggcttgagcaatctcttcctccccggtttcgtgtggatgtacgaatcaaagaagggacacacagcactgctgatgaagtgaacaagcagctggcggacaaagaacgagtggccgctgctttggaaaacggaacactaatgggcgttatcgcgaagatgttagagacatgccagtga

SEQ ID NO: 68494 - protein, 203 aa, Aspergillus oryzae
MASEMQNSNPTILNAADLPKRLRPAPSRKPGIFGNGLFASALPFVYASKLPPEGFTSSSESESDDDDLLEEPIDEQEIYDLVSTISDPEHPISLGALAVVSLPDISITPTLPYVPASPLRTVTVLITPTITHCSLATVIGLGVRVRLEQSLPPRFRVDVRIKEGTHSTADEVNKQLADKERVAAALENGTLMGVIAKMLETCQ

SEQ ID NO: 68495 - DNA, 474 bp, Arabidopsis thaliana
  CDS (1)..(474)
atggtatctgggttgattaatgagaaccctatcatttacccaaagaaagagaggcgtcttcgtactgatacaagcattactgatgagcttacaccagaaccaattgatcaacttgagatttttgatcatataagagatatcaaagatccagagcatcctaatactctggaagatctcagagtagttacagaagactcagttgaagtggatgatgagaacagttatgttagggttacgttcactccaactgtcgaacattgtagcatggcaaccgttatcggtctttgtgtccgtgtgaaacttctacgaagccttccttctcgatacaagattgatataagggtagcacctggttctcatgcaacagaagatgcattgaataaacaactaaacgataaagaacgtgtggcggctgcactagagaatccaaacctcgtggagatggttgatgaatgcctgccatcagaagagtga

SEQ ID NO: 68496 - protein, 157 aa, Arabidopsis thaliana
MVSGLINENPIIYPKKERRLRTDTSITDELTPEPIDQLEIFDHIRDIKDPEHPNTLEDLRVVTEDSVEVDDENSYVRVTFTPTVEHCSMATVIGLCVRVKLLRSLPSRYKIDIRVAPGSHATEDALNKQLNDKERVAAALENPNLVEMVDECLPSEE

SEQ ID NO: 68497 - DNA, 480 bp, Arabidopsis thaliana
  CDS (1)..(480)
atggtatctgggttgattaatgagaaccctatcatttacccaaagaaagagaggcgtcttcgtactgatacaagcattactgatgagcttacaccagaaccaattgatcaacttgagatttttgatatcctttcttcatcaaatatcaaagatccagagcatcctaatactctggaagatctcagagtagttacagaagactcagttgaagtggatgatgagaacagttatgttagggttacgttcactccaactgtcgaacattgtagcatggcaaccgttatcggtctttgtgtccgtgtgaaacttctacgaagccttccttctcgatacaagattgatataagggtagcacctggttctcatgcaacagaagatgcattgaataaacaactaaacgataaagaacgtgtggcggctgcactagagaatccaaacctcgtggagatggttgatgaatgcctgccatcagaagagtga

SEQ ID NO: 68498 - protein, 159 aa, Arabidopsis thaliana
MVSGLINENPIIYPKKERRLRTDTSITDELTPEPIDQLEIFDILSSSNIKDPEHPNTLEDLRVVTEDSVEVDDENSYVRVTFTPTVEHCSMATVIGLCVRVKLLRSLPSRYKIDIRVAPGSHATEDALNKQLNDKERVAAALENPNLVEMVDECLPSEE

SEQ ID NO: 68499 - DNA, 471 bp, Drosophila melanogaster
  CDS (1)..(471)
atgcccacggaaatcgagaacatcaaccccaatgtctacgacagaatcaaggaaagggtattaaccgccaacgaagaagacgaaaacgtgcccgatccatttgacaaacgagagattttcgatctcatcagaaatattaatgacccggaacatcctttgaccctggaggagctgcatgtggtgcaggaagatctaatccggataaacgatagccagaattccgtgcacatcagcttcaccccgacgattccccattgctcgatggccactttgattggcctctccatccgggtgaagttgctccgctcgctgccacctcgctttaaggtcaccgtggaaataacgcccggcacccacgcctccgagctggcggtgaacaagcagctggcagacaaggaacgagtggccgccgccctggagaacaatcacctcgccgaggtgatcaaccagtgcatcgccgccaagggttaa

SEQ ID NO: 68500 - protein, 156 aa, Drosophila melanogaster
MPTEIENINPNVYDRIKERVLTANEEDENVPDPFDKREIFDLIRNINDPEHPLTLEELHVVQEDLIRINDSQNSVHISFTPTIPHCSMATLIGLSIRVKLLRSLPPRFKVTVEITPGTHASELAVNKQLADKERVAAALENNHLAEVINQCIAAKG

SEQ ID NO: 68501 - DNA, 657 bp, Drosophila melanogaster
  CDS (1)..(657)
atgctgtcctacataaagcgcaagctctccgaatccgacagcggcgtcagttcggtcgcaactgtgacgtcgtcgtgcggcggcgatagtgggagagcgggcggaacgggcagcagtgaaagcggtacgggcagcagcagcgccagtatcagcggacgcagccagaacgccgacgagttagtgcgcaaaacgagccagatgtcgatggatgatgaggccattgccttcggggaggacgcactgctccatgaactgggctacaagaatcagacggaactgcaggaaaccatctacgatctgttgcgcggcattcgcgatcccgagaagccgtgcactttggaggacctcaacgttgtctacgaggatggaatctttgtgatgccgcccacgcgctccaatgtctcagttgttcgcatcgagtttaaccccacagtgccacattgctcgttggccacgcttattggactctgtatacgcgtgaaagtagaacgcggacttccgcacaacataaagctagacatatacatcaagaagggagcgcatcaaaccgaggaagagattaacaagcaaatcaatgacaaggagcgcatcgctgcggccatggagaaccccaatctgagggatttggtcgagaactgcatcaaggatgaggagtag

SEQ ID NO: 68502 - protein, 218 aa, Drosophila melanogaster
MLSYIKRKLSESDSGVSSVATVTSSCGGDSGRAGGTGSSESGTGSSSASISGRSQNADELVRKTSQMSMDDEAIAFGEDALLHELGYKNQTELQETIYDLLRGIRDPEKPCTLEDLNVVYEDGIFVMPPTRSNVSVVRIEFNPTVPHCSLATLIGLCIRVKVERGLPHNIKLDIYIKKGAHQTEEEINKQINDKERIAAAMENPNLRDLVENCIKDEE

SEQ ID NO: 68503 - DNA, 696 bp, Saccharomyces cerevisiae
  CDS (1)..(696)
atgtctgagtttttgaatgaaaatcccgacattttagaggagaaccaacttcccactagaaaagaagatagtaccaaggaccttttgttaggcgggttcagcaacgaagctacgctggaaaggagaagccttttgctgaaaatagaccattctttaaagtctcaggtattgcaagatatagaggtcttagacaagcttctttccattcgaattccaccagaactgacttccgatgaggatagtttgccagcagaaagcgaggatgaatccgtagcgggtggaggaaaggaggaggaagagcctgatctcattgatgctcaagaaatatatgatttgatagctcatatttccgaccctgagcacccgttaagtctgggacaactctctgttgtaaatttggaagatattgatgttcatgattcaggaaaccagaacgaaatggctgaagtcgtgatcaaaataacaccaacaattacccattgttctctggcaacgttgattggtctggggatacgggtcaggttagaaaggtctcttcccccaagatttagaattactattttgttgaagaaaggtactcatgatagtgagaaccaggtaaataaacaactaaatgataaggaacgtgtagcagctgcatgtgagaatgaacaactgttgggtgtagtctctaagatgttagtgacttgtaagtaa

SEQ ID NO: 68504 - protein, 231 aa, Saccharomyces cerevisiae
MSEFLNENPDILEENQLPTRKEDSTKDLLLGGFSNEATLERRSLLLKIDHSLKSQVLQDIEVLDKLLSIRIPPELTSDEDSLPAESEDESVAGGGKEEEEPDLIDAQEIYDLIAHISDPEHPLSLGQLSVVNLEDIDVHDSGNQNEMAEVVIKITPTITHCSLATLIGLGIRVRLERSLPPRFRITILLKKGTHDSENQVNKQLNDKERVAAACENEQLLGVVSKMLVTCK

SEQ ID NO: 68505 - DNA, 540 bp, Schizosaccharomyces pombe
  CDS (1)..(540)
atgagtgcaaatttacagaacgaaaacccggaagtaaaggagttaaatcaattgccatctagggttgaagaagaagaggatctattgttgagttctacgaaacaatggctaaccgagattgaaagtgagcagactaacataaaggaagaaagagatccaatagatccacaagaaatatacgaccttctagctaaaataaatgatccagaacatccattaactcttgctcagttatcggtcgtcaaattagaagacattgaggttgttgataatgttgaaggcgattcttatatcacagttcacattactccaactatccctcattgctctatgtgcacattgatcggtttatgcattcgagttcgcctcgaacgctgtcttcctccccgttttcatgtcgatgtgaaagttaaaaaaggtacccacgcgagtgagtctcaagtaaacaaacaactgaacgataaggaacgagtggcggctgcctgtgaaaatgagcaacttctatctgttttgaatggaatgatggcgacctgtgtttaa

SEQ ID NO: 68506 - protein, 179 aa, Schizosaccharomyces pombe
MSANLQNENPEVKELNQLPSRVEEEEDLLLSSTKQWLTEIESEQTNIKEERDPIDPQEIYDLLAKINDPEHPLTLAQLSVVKLEDIEVVDNVEGDSYITVHITPTIPHCSMCTLIGLCIRVRLERCLPPRFHVDVKVKKGTHASESQVNKQLNDKERVAAACENEQLLSVLNGMMATCV

SEQ ID NO: 68507 - DNA, 642 bp, Oryza sativa
  CDS (1)..(642)
atgacggtggggatgatcaacgcgaacccggtggtgcacgagaggccggagcgcgccgcccacccgcaccccgccgacgccatcgacgccctcgacgtcttcgatacggtgcgggacatcaaggacccggagcacccctactcgctggagcagctcagcgtgctctccgaggagtccgtctccgtcgacgagaagctcggccgcatccagtatgctcgcactcccgttcctttttggcgtcgcgtgtggagtgagctcgtgataaatctttgtgatctggaaatgatcgtttgtcttgatccaagaactacatccggcttcctttttttagaggacatccagcttccttttttgggacactgttcacacctcacaattacctgcaggataaccttcactccaactgtgcagcactgtagcatggctacagtgattggtctgtgccttcggcttaaattgatgcagaactttcctccacatttcaagattgacattaaagttgctccaggatctcttgctaatgaagaatcagtaaacaagcaactgaatgacaaggagagggtagcagccgccttggagaaccccaacctacgccagttggttgatgagtgtctttgttccaacgattcacactcacactaa

SEQ ID NO: 68508 - protein, 213 aa, Oryza sativa
MTVGMINANPVVHERPERAAHPHPADAIDALDVFDTVRDIKDPEHPYSLEQLSVLSEESVSVDEKLGRIQYARTPVPFWRRVWSELVINLCDLEMIVCLDPRTTSGFLFLEDIQLPFLGHCSHLTITCRITFTPTVQHCSMATVIGLCLRLKLMQNFPPHFKIDIKVAPGSLANEESVNKQLNDKERVAAALENPNLRQLVDECLCSNDSHSH

SEQ ID NO: 68509 - DNA, 465 bp, Oryza sativa
  CDS (1)..(465)
atgacggtggggatgatcaacgcgaacccggtggtgcacgagaggccggagcgcgccgcccacccgcaccccgccgacgccatcgacgccctcgacgtcttcgatacggtgcgggacatcaaggacccggagcacccctactcgctggagcagctcagcgtgctctccgaggagtccgtctccgtcgacgagaagctcggccgcatccagataaccttcactccaactgtgcagcactgtagcatggctacagtgattggtctgtgccttcggcttaaattgatgcagaactttcctccacatttcaagattgacattaaagttgctccaggatctcttgctaatgaagaatcagtaaacaagcaactgaatgacaaggagagggtagcagccgccttggagaaccccaacctacgccagttggttgatgagtgtctttgttccaacgattcacactcacactaa

SEQ ID NO: 68510 - protein, 154 aa, Oryza sativa
MTVGMINANPVVHERPERAAHPHPADAIDALDVFDTVRDIKDPEHPYSLEQLSVLSEESVSVDEKLGRIQITFTPTVQHCSMATVIGLCLRLKLMQNFPPHFKIDIKVAPGSLANEESVNKQLNDKERVAAALENPNLRQLVDECLCSNDSHSH

SEQ ID NO: 68511 - DNA, 477 bp, Brassica napus
  CDS (1)..(477)
atggtgtctgggttaataaacgagaacccaactgtgtacgagaggaaggagcgtcgtgttcgcaccgattccaccaacaccgatgagttttccgtagaacctatcgatcagctcgagatttttgatcatataagagacataagagatccagagcatccttattctcttgaacaactcaaagttcttactgaagactctgttgaagttgatgatctcaagagttatgtcagggttacattcactccaacggtggaacattgtagcatggcaaccattattggtctctctgtccgcgttaaacttatgcgcagccttcctcctcgttacaagattgatataagggtagcacccggttctcatgcaacagaggctgcactcaataagcaactaaacgacaaggagcgtgtggcggctgcactagagaatccaaacctcgtggagatggttgatgaatgtctatctccatcgtttgagtga

SEQ ID NO: 68512 - protein, 158 aa, Brassica napus
MVSGLINENPTVYERKERRVRTDSTNTDEFSVEPIDQLEIFDHIRDIRDPEHPYSLEQLKVLTEDSVEVDDLKSYVRVTFTPTVEHCSMATIIGLSVRVKLMRSLPPRYKIDIRVAPGSHATEAALNKQLNDKERVAAALENPNLVEMVDECLSPSFE

SEQ ID NO: 68513 - DNA, 468 bp, Brassica napus
  CDS (1)..(468)
atgacgctgggactgataaacgcgaatccagtagtgcaagctaagaaggaacggctagctcgtacacaagatcaacacagagatgatgatggccttgatactcttgacatctatgagtatgtaagagacataagagatccggaacacccttactccttggaacaactaagtgttctgtctgaagattccatcactctcgatgacaagctcaatcgcatcataataacgtttacaccgacgatccagcattgtagtatggcaactataattggtctgtgtttgagagctaagcttaaagaatgcttgccactccattataaggttgatatcagagtgtctcccggttctcacgccgatgaagattcagtgaataaacagctgaatgataaagaaagagtggtagctgcattggagaatcctaatctccgtcagcttgtggatgagtgtctctgctccaacgagatatga

SEQ ID NO: 68514 - protein, 155 aa, Brassica napus
MTLGLINANPVVQAKKERLARTQDQHRDDDGLDTLDIYEYVRDIRDPEHPYSLEQLSVLSEDSITLDDKLNRIIITFTPTIQHCSMATIIGLCLRAKLKECLPLHYKVDIRVSPGSHADEDSVNKQLNDKERVVAALENPNLRQLVDECLCSNEI

SEQ ID NO: 68515 - DNA, 477 bp, Brassica napus
  CDS (1)..(477)
atggtatctgggttaataaacgagaacccaactgtgtacgagagaaaagagcgtcgtgttcgtaccgattccaccaactccgatgagttctccgtagaacctatcgatcagctcgagatttttgatcatataagagacataagagatccagagcatccttattctcttgaacaactcaaagttcttactgaagactctgttgaagttgatgatctcaagagttatgtcagggttacattcactccaacggtggaacattgtagcatggcaaccattattggtctctctgtccgcgttaaacttatgcgcagccttcctcctcgttacaagattgatataagggtagcacccggttctcatgcaacagaggctgcactcaataagcaactaaacgacaaggagcgtgtggcggctgcactagagaatccaaacctcgtggagatggttgaagaatgtctatctccatcatttgaatga

SEQ ID NO: 68516 - protein, 158 aa, Brassica napus
MVSGLINENPTVYERKERRVRTDSTNSDEFSVEPIDQLEIFDHIRDIRDPEHPYSLEQLKVLTEDSVEVDDLKSYVRVTFTPTVEHCSMATIIGLSVRVKLMRSLPPRYKIDIRVAPGSHATEAALNKQLNDKERVAAALENPNLVEMVEECLSPSFE

SEQ ID NO: 68517 - DNA, 480 bp, Brassica napus
  CDS (1)..(480)
atggtttctggattaatcaacgagaacccgatcgtttacgagattaaagagcgtcgtgatgttcgtgcttattccagcaataccgatgagctttcagtagatgcaatcgaccagctcgaagttttcgatcatataagagatataaaagatccagagcatccttattctctggaacagctcaaagtcctcacagaagattctgttgaagttgatgataccaagagtcatgttagggttacattcactccaacggtggaacattgtagcatggcaaccattatcggtctctgtgtccgcgtgaagcttatgcgtagccttccttctcgttacaagatagatataagggtagcacccggtactcatgcaactgaggctgcagtcaataaacaactaaacgacaaagagcgtgtggcggctgcactagagaatccaaaccttgtggagatggtcgatgaatgtctatctccatcatttgaatga

SEQ ID NO: 68518 - protein, 159 aa, Brassica napus
MVSGLINENPIVYEIKERRDVRAYSSNTDELSVDAIDQLEVFDHIRDIKDPEHPYSLEQLKVLTEDSVEVDDTKSHVRVTFTPTVEHCSMATIIGLCVRVKLMRSLPSRYKIDIRVAPGTHATEAAVNKQLNDKERVAAALENPNLVEMVDECLSPSFE

SEQ ID NO: 68519 - DNA, 480 bp, Glycine max
  CDS (1)..(480)
atggtatccgagttaatcaatgcaaaccctatcatatatgaaaagaaagagcgtcgacctcgaactgctccatctgctccccatgatgagtatgctgtcgaactaatcgaccaacaagaggtttttgatcatataagagatataaaggaccctgagcacccatattccttggaagagcttaaggtgatcacggaggaagcagttgaagttgatgatcaacgtaattatgtgagggttatgtttactcctacagtggaacattgcagtatggcgacagttataggtctatgcttacgtgtcaagctcatgagaagcttgccttcacgatacaaggtggatatcagagtggcacctggatctcatgcaaccgaagctgcagttaacaaacaattaaacgataaagaacgtgtggcagctgcactggaaaactcaaaccttctgaatatggttgatgattgccttgctccatcttatgattga

SEQ ID NO: 68520 - protein, 159 aa, Glycine max
MVSELINANPIIYEKKERRPRTAPSAPHDEYAVELIDQQEVFDHIRDIKDPEHPYSLEELKVITEEAVEVDDQRNYVRVMFTPTVEHCSMATVIGLCLRVKLMRSLPSRYKVDIRVAPGSHATEAAVNKQLNDKERVAAALENSNLLNMVDDCLAPSYD

SEQ ID NO: 68521 - DNA, 465 bp, Glycine max
  CDS (1)..(465)
atgacgctgggtctgatcaatgcgaaccctgtggttcacgccaagaaagagcgaatcgctcgttccgatgatcctcacgccgacgacgccgttgatcctctcgatatctatgatttcgtgagggatattcgggatcccgaacatccttattccttggaacagctcagtgttctctccgaggaatcaatcaccgttgatgacaaattaggccgaattctgataacttttacgccgaccgtacagcactgtagcatggccacggttattggtctttgtctcagagttaaactgaagcactacttccctcctcatttcaaagtggacatcaaggtttctcctggatctcatgccgacgaagaatcagtcaataagcagttaaatgataaagaaagagtcgctgctgccttggagaatcccaacctccgccagcttgtggatgagtgcctctactccaatgaactgtga

SEQ ID NO: 68522 - protein, 154 aa, Glycine max
MTLGLINANPVVHAKKERIARSDDPHADDAVDPLDIYDFVRDIRDPEHPYSLEQLSVLSEESITVDDKLGRILITFTPTVQHCSMATVIGLCLRVKLKHYFPPHFKVDIKVSPGSHADEESVNKQLNDKERVAAALENPNLRQLVDECLYSNEL

SEQ ID NO: 68523 - DNA, 480 bp, Glycine max
  CDS (1)..(480)
atggtatccgagttaatcaatgcaaaccctatcatatatgaaaagaaagagcgtcgacctcgaactgctccatctgctccccatgatgagtatgctgtcgaactaatcgaccaacaagaggtttttgatcatataagagatataaaggaccctgagcacccatattccttggaagagcttaaggtgatcacggaggaagcagttgaagttgatgatcaacgtaattatgtgagggttacgtttactcctacagtggaacattgcagtatggcgacagttataggtctatgcttacgtgtcaagctcatgagaagcttgccttcacgatacaaggtggatatcagagtggcacctggatctcatgcaaccgaagctgcagttaacaaacaattaaatgataaagagcgggtggcagctgcactggaaaacccaaaccttctgaatatggttgatgattgccttgcttcatcttatgattga

SEQ ID NO: 68524 - protein, 159 aa, Glycine max
MVSELINANPIIYEKKERRPRTAPSAPHDEYAVELIDQQEVFDHIRDIKDPEHPYSLEELKVITEEAVEVDDQRNYVRVTFTPTVEHCSMATVIGLCLRVKLMRSLPSRYKVDIRVAPGSHATEAAVNKQLNDKERVAAALENPNLLNMVDDCLASSYD

SEQ ID NO: 68525 - DNA, 465 bp, Glycine max
  CDS (1)..(465)
atgacgctgggtctgatcaatgcgaatcctgtggttcacgccaagaaagagcgaatcgctcgttctgatgatcctcacgccgatgacgccgttgatcctctcgacatctatgatttcgtgagggatattcgggatcccgaacatccttattccctggaacagctcagtgttctctccgaggaatctatctccgttgacgacaaattaggccgaattctgataacttttacgccgaccgtacagcactgtagcatggccacggttattggactttgtctcagagttaaactgaagcactacttccctcctcattacaaagtggacatcaaggtttctcctggatctcatgccaacgaagaatcagtcaataagcagttgaatgataaagaaagagtcgctgctgccttggagaatcctaacctccgccagcttgtggacgagtgcctctactccaatgaactgtga

SEQ ID NO: 68526 - protein, 154 aa, Glycine max
MTLGLINANPVVHAKKERIARSDDPHADDAVDPLDIYDFVRDIRDPEHPYSLEQLSVLSEESISVDDKLGRILITFTPTVQHCSMATVIGLCLRVKLKHYFPPHYKVDIKVSPGSHANEESVNKQLNDKERVAAALENPNLRQLVDECLYSNEL

SEQ ID NO: 68527 - DNA, 477 bp, Zea mays
  CDS (1)..(477)
atggctatggggttgattaatgctaatcctataatccatgagaaaaaagaaagacgcatccgacaggcaccagagaccacagatgaaaatgcggtagagtccatagaccagctggaaatatttgatcacattagagatataaaggatccagagcacccatactcactggaacagcttaatgtggtgactgaagactcaattgaactcaatgatgaaagcaatcatgtcagggttattttcaccccaacagtggagcactgcagtatggcaactattattggcctttgcatacgtgtgaaacttgtacggagtctccctccttattacaaggtggacataagggttgcccctggatcacacgcaactgaagctgctgtgaataagcaactgaatgacaaagaacgtgttgcggctgcattggaaaacccaaacctactggacatggttgaagagtgcttatcaccaacattcgattga

SEQ ID NO: 68528 - protein, 158 aa, Zea mays
MAMGLINANPIIHEKKERRIRQAPETTDENAVESIDQLEIFDHIRDIKDPEHPYSLEQLNVVTEDSIELNDESNHVRVIFTPTVEHCSMATIIGLCIRVKLVRSLPPYYKVDIRVAPGSHATEAAVNKQLNDKERVAAALENPNLLDMVEECLSPTFD

SEQ ID NO: 68529 - DNA, 465 bp, Zea mays
  CDS (1)..(465)
atgactgtgggcatgatcaacgcaaacccggtggtgcacgagcggccggagcgcgcctcgcacccccacgccgccgatgtgctcgaccctctcgatgtctttgatacggtgcgggacatcaaggacccggagcacccgtactccctggagcagctcagcgtgctgtcggaggagtccgtctccgttgacgagacgctcggacgcatccagataaccttcactccaactgtgcagcactgcagtatggccacagtcattggcctgtgcctccgacttaagttgatgcagaacttccctccacatttcaaggttgacatcaaagttgctccaggatctcttgctaatgaagaatcagtaaacaagcaactgaacgacaaggagagggttgcagcagccttggagaaccccaacctacgccagctggtcgatgaatgcttatgcttcaatgatccatactcacgttaa

SEQ ID NO: 68530 - protein, 154 aa, Zea mays
MTVGMINANPVVHERPERASHPHAADVLDPLDVFDTVRDIKDPEHPYSLEQLSVLSEESVSVDETLGRIQITFTPTVQHCSMATVIGLCLRLKLMQNFPPHFKVDIKVAPGSLANEESVNKQLNDKERVAAALENPNLRQLVDECLCFNDPYSR

SEQ ID NO: 68531 - DNA, 22 bp, Artificial sequence
  primer
atggctatggggttgattaatg

SEQ ID NO: 68532 - DNA, 22 bp, Artificial sequence
  primer
tcaatcaaatgttggtgataag

SEQ ID NO: 68533 - protein, 352 aa, Artificial sequence
  consensus sequence
  Variant (2)..(5): Xaa in position 2 to 5 is any amino acid
  Variant (6)..(6): Xaa in position 6 is any or no amino acid
  Variant (8)..(8): Xaa in position 8 is any amino acid
  Variant (11)..(27): Xaa in position 11 to 27 is any amino acid
  Variant (28)..(135): Xaa in position 28 to 135 is any or no amino acid
  Variant (137)..(137): Xaa in position 137 is any amino acid
  Variant (138)..(173): Xaa in position 138 to 173 is any or no amino acid
  Variant (175)..(175): Xaa in position 175 is any amino acid
  Variant (181)..(182): Xaa in position 181 to 182 is any amino acid
  Variant (183)..(183): Xaa in position 183 is any or no amino acid
  Variant (185)..(186): Xaa in position 185 to 186 is any amino acid
  Variant (188)..(188): Xaa in position 188 is any amino acid
  Variant (190)..(197): Xaa in position 190 to 197 is any amino acid
  Variant (198)..(267): Xaa in position 198 to 267 is any or no amino acid
  Variant (271)..(272): Xaa in position 271 to 272 is any amino acid
  Variant (276)..(276): Xaa in position 276 is any amino acid
  Variant (279)..(279): Xaa in position 279 is any amino acid
  Variant (283)..(284): Xaa in position 283 to 284 is any amino acid
  Variant (286)..(287): Xaa in position 286 to 287 is any amino acid
  Variant (289)..(292): Xaa in position 289 to 292 is any amino acid
  Variant (294)..(303): Xaa in position 294 to 303 is any amino acid
  Variant (304)..(324): Xaa in position 304 to 324 is any or no amino acid
  Variant (326)..(326): Xaa in position 326 is any amino acid
  Variant (328)..(329): Xaa in position 328 to 329 is any amino acid
  Variant (331)..(333): Xaa in position 331 to 333 is any amino acid
  Variant (338)..(338): Xaa in position 338 is any amino acid
  Variant (347)..(347): Xaa in position 347 is any amino acid
  Variant (350)..(351): Xaa in position 350 to 351 is any amino acid
MXXXXXNXNPXXXXXXXXXXXXXXXXXXXXXXXXXXXXXXXXXXXXXXXXXXXXXXXXXXXXXXXXXXXXXXXXXXXXXXXXXXXXXXXXXXXXXXXXXXXXXXXXXXXXXXXXXXXXXXXXXXXXXXXXXXXXXDXXXXXXXXXXXXXXXXXXXXXXXXXXXXXXXXXXXXXIXDPEHPXXXLXXLXVXXXXXXXXXXXXXXXXXXXXXXXXXXXXXXXXXXXXXXXXXXXXXXXXXXXXXXXXXXXXXXXXXXXXXXXXXXXXXXTPTXXHCSXATXIGLXXRXXLXXXXPXXXXXXXXXXXXXXXXXXXXXXXXXXXXXXXGXHXXEXXXNKQLXDKERVAAAXENXXL

SEQ ID NO: 68534 - protein, 30 aa, Artificial sequence
  protein pattern
  Variant (4)..(4): Xaa in position 4 is Ile or Val
  Variant (5)..(5): Xaa in position 5 is Glu, Pro, Gln or Thr
  Variant (9)..(9): Xaa in position 9 is Leu or Met
  Variant (11)..(11): Xaa in position 11 is any amino acid
  Variant (12)..(12): Xaa in position 12 is any or no amino acid
  Variant (14)..(14): Xaa in position 14 is any or no amino acid
  Variant (17)..(17): Xaa in position 17 is Cys, Gly or Ser
  Variant (18)..(18): Xaa in position 18 is Ile, Leu or Val
  Variant (20)..(21): Xaa in position 20 to 21 is any amino acid
  Variant (23)..(25): Xaa in position 23 to 25 is any amino acid
  Variant (26)..(26): Xaa in position 26 is Phe, Ile or Leu
  Variant (27)..(27): Xaa in position 27 is Pro, Gln or Ser
  Variant (28)..(29): Xaa in position 28 to 29 is any amino acid
  Variant (30)..(30): Xaa in position 30 is Phe, His or Tyr
TPTXXHCSXAXXIXGLXXRXXLXXXXXXXX

SEQ ID NO: 68535 - protein, 33 aa, Artificial sequence
  protein pattern
  Variant (2)..(3): Xaa in position 2 to 3 is any amino acid
  Variant (4)..(5): Xaa in position 4 to 5 is any or no amino acid
  Variant (7)..(7): Xaa in position 7 is Ala, Gly, Ser or Thr
  Variant (9)..(9): Xaa in position 9 is any amino acid
  Variant (10)..(10): Xaa in position 10 is Ala, Asp, Asn, Ser or Thr
  Variant (11)..(12): Xaa in position 11 to 12 is any amino acid
  Variant (13)..(13): Xaa in position 13 is Ala, Asp, Glu, Gln or Ser
  Variant (14)..(14): Xaa in position 14 is Ile, Leu or Val
  Variant (18)..(18): Xaa in position 18 is Ile or Leu
  Variant (19)..(19): Xaa in position 19 is Ala, Asp, Asn or Thr
  Variant (22)..(22): Xaa in position 22 is Asp or Glu
  Variant (24)..(24): Xaa in position 24 is any amino acid
  Variant (25)..(25): Xaa in position 25 is any or no amino acid
  Variant (28)..(28): Xaa in position 28 is any amino acid
  Variant (31)..(32): Xaa in position 31 to 32 is any amino acid
IXXXXGXHXXXXXXNKQXXDKXRXXAAXENXXL

SEQ ID NO: 68536 - DNA, 1206 bp, Arabidopsis thaliana
  CDS (1)..(1206)
atggactatatgtatggaccagggagacaccatctgtttgtaccaggaccagtgaacataccggaaccggtaatccgggcgatgaaccggaacaacgaggattaccggtcaccagccattccggcgcttacgaaaacattgttggaggatgttaagaagatattcaagaccacatcagggacaccttttctgtttcccacgaccgggactggtgcttgggagagtgccttgaccaacacgttatctcctggagacaggattgtttcgtttctgattggacaatttagcttgctctggattgaccagcagaagaggcttaatttcaatgttgatgtggttgagagtgattggggacaaggtgctaatctccaagtcttggcctcaaagctctcacaagacgagaatcataccatcaaagccatttgcattgtccacaacgagaccgcgaccggagttaccaatgacatctctgctgtccgcacactcctcgatcactacaagcatccggctttgctgctagtggacggtgtttcgtccatctgcgcgcttgatttccgaatggatgagtggggagtggacgtggccttgactgggtctcagaaagccttatctcttccaacaggacttggtattgtctgcgccagtcctaaagctttggaagctaccaaaacttctaaatctctcaaagtattctttgactggaatgactaccttaagttttacaagctaggaacctattggccatacacaccttccattcaacttctctacggtcttagagctgctcttgatcttatctttgaggaaggacttgagaacatcatcgcccgccatgctcgtttgggaaaggccaccaggcttgcggtggaagcatgggggctgaaaaactgcacacagaaggaggaatggataagtaacacagtgacagcagttatggtgcctccgcatatagacggttcggagattgtgagaagggcatggcagaggtacaacttaagtcttggtcttggtctcaacaaagtggctggaaaggttttcagaattggacacctaggaaatgtgaatgagttgcaacttctcgggtgtcttgcgggagtggagatgatactgaaggatgttggatacccagttgtaatgggaagtggagttgcagctgcctctacttatcttcagcaccacattcctctcattccctctagaatctaa

SEQ ID NO: 68537 - protein, 401 aa, Arabidopsis thaliana [sequence omitted]

SEQ ID NO: 68538 - DNA, 1209 bp, Oryza sativa (japonica cultivar-group)
  CDS (1)..(1209)
atggcggactacgtgtatgggccggggcggaaccacctgttcgtgcctgggccggtgaacatcccggaccaggtgatccgcgccatgagccgtcagaacgaggactaccgctcgccggcggtgcccgccctcaccaagaccctcctcgaggacgtcaagcagatcttcaagaccaccaccggcacccccttcctcttccccaccaccgggacgggggcgtgggagagcgcgctgacgaacacgctgtcgccgggggacaagatcgtgtcgttcctgatcgggcagttcagcctgctgtggatcgaccagcagcaacgcctcaacttcaacgtggacgtggtggagagcgactggggctacggcgccgacctcgccgccctcgactacaagctccgccaggacccctcccactccatcaaggccatctgcatcgtccacaacgagaccgccactggagtcaccaacgacctttccgccgtccgcaaaatcctcgacaagcacaggcacccggcgctactactggtggacggggtgtcatcgatatgtgcgttggacttccgcatggatgagtggggagtggacgtggcgctgacgggttcgcagaaggcgctctcgctgccgacgggtctgggcatcgtgtgcgcgagccccaaggcgctggaggcgagcaagacggccaagtcggtgcgggtcttcttcgactggaaggactacctcaagttctacaagatgggcacctactggccctacaccccatccatccagctcctctacggcctccgcaccgccctcgacctcatcttcgaggaaggcctcgagaacgtcatcaagaggcacaaccgcctcggcaccgccaccaggctggccgtggaggcgtgggggctcaagaactgcacgcagaaggaggagtggttcagcgacaccgtcaccgccgtcgtcgtgccgccgtacatcgacagcgccgagatcgtgaagcacgcctggaagcggtacaacctcagcctcggcctcggcctcaacaaggtcgccggcaaggtgttcaggatcggccacctcggccacctcaacgagctgcaattgatgggtgccctgagtggagtggagatggtgctcaaggacatcggctacccggtgaagctcggctccggcgtggcggcggcggcggcgtacctgtcgaattcgacgccgctcatcccgtccaggatctga

SEQ ID NO: 68539 - protein, 402 aa, Oryza sativa (japonica cultivar-group)
MADYVYGPGRNHLFVPGPVNIPDQVIRAMSRQNEDYRSPAVPALTKTLLEDVKQIFKTTTGTPFLFPTTGTGAWESALTNTLSPGDKIVSFLIGQFSLLWIDQQQRLNFNVDVVESDWGYGADLAALDYKLRQDPSHSIKAICIVHNETATGVTNDLSAVRKILDKHRHPALLLVDGVSSICALDFRMDEWGVDVALTGSQKALSLPTGLGIVCASPKALEASKTAKSVRVFFDWKDYLKFYKMGTYWPYTPSIQLLYGLRTALDLIFEEGLENVIKRHNRLGTATRLAVEAWGLKNCTQKEEWFSDTVTAVVVPPYIDSAEIVKHAWKRYNLSLGLGLNKVAGKVFRIGHLGHLNELQLMGALSGVEMVLKDIGYPVKLGSGVAAAAAYLSNSTPLIPSRI

SEQ ID NO: 68540 - DNA, 1191 bp, Mesorhizobium loti MAFF303099
  CDS (1)..(1191): transl_table=11
atggccggtttcacccatcttttcattcccgggccgaccaacatccccgaacaggtccggcaggcgatgaacctgccgatggaggacatgcgcgccgcgtccttccccgatctcactttgccgctgttcgaggacatcaaacgcgtcttcaagaacgagaccggccgcgtcttcatctacccctcctccggcaccggcgcctgggaagcggcgatgaccaatgtgcttagccccggcgaccgcgtgctgatgtcgcgcttcggccagttctcgcatctgtgggtcgacatggccgagcgcctcggcctcgaggtcgatgtcatcgactgcgaatggggcaccggcgtgccgctcgagctctatgccgagcggctgaaggcggacaaggagcatcgcatcaaggccgtcttctgcacgcagaacgagacggcgaccggcgtgaccagcgatgtcgccggctgccgcgccgcgctcgacgatgccaaccaccctgccctgctcttcgtcgacggcgtgtcgtcgatcggctcgatcgacttccgccaggaggaatggggcgtggactgcgccgtcagcggctcgcagaaaggtttcatgctgcccgccggcctcggtttcctctccgtgagcaagaaggcgctcgtcgcttcgcggaccgccacccaccggcgctgcttcttctccttcgaggacatgatccgcgccaacgatgccggctatttcccctacacgccggcgacgcagctgctgcgcggcctgcgcgcctcgctcgacctgatcgccgaggaagggctggacaacatcttcgcccgccatcatcgcctcgccgaaggcgtgcgcaaggcggtcgacgcctggggcctgaaactctgcgccaaggcgccgaaatggcactccgatacggtcagcgccattcaggtgccggaaggcatcgacagcggcgacatcgtcaagcgcgcctaccgcacctaccagacgtcgctcggcggcggcctcaacaaggtgatgggcaaggtcttccgcatcggccatctcggctggctgaacgaggtgatggtgctcgcctcgctgtcggcggccgaaatggcgttgctcgactgcggcgtgcggctggcgccgggctccggcgtcggcgccgccatccagcatttccgcgcctcggccgccgtgccggtcgccgaagccgcctga

SEQ ID NO: 68541 - protein, 396 aa, Mesorhizobium loti MAFF303099
MAGFTHLFIPGPTNIPEQVRQAMNLPMEDMRAASFPDLTLPLFEDIKRVFKNETGRVFIYPSSGTGAWEAAMTNVLSPGDRVLMSRFGQFSHLWVDMAERLGLEVDVIDCEWGTGVPLELYAERLKADKEHRIKAVFCTQNETATGVTSDVAGCRAALDDANHPALLFVDGVSSIGSIDFRQEEWGVDCAVSGSQKGFMLPAGLGFLSVSKKALVASRTATHRRCFFSFEDMIRANDAGYFPYTPATQLLRGLRASLDLIAEEGLDNIFARHHRLAEGVRKAVDAWGLKLCAKAPKWHSDTVSAIQVPEGIDSGDIVKRAYRTYQTSLGGGLNKVMGKVFRIGHLGWLNEVMVLASLSAAEMALLDCGVRLAPGSGVGAAIQHFRASAAVPVAEAA

SEQ ID NO: 68542 - DNA, 1206 bp, Sinorhizobium meliloti 1021
  CDS (1)..(1206): transl_table=11
atgcgaaatggaacatcacatctcttcgtgcccggaccgacaaatatcccggacgcggtacgtcgcgccatgaacgtgcccatgcaggatatgcgggcgccggactttcccgatttggttctgccgctgttcgccgatctcaagggggttttccgaactgacaacgggtcgattttcctgttcccgggttctggaaccggagcatgggaggcggcgatatcgaacaccctcaaccgtggtgatcgggtgctgatgtctcgttttggccagttttcccatctttgggcagacatggctggccgtctcgggctcgatgttgaatgccttgacgtcgaatggggcgagggtgtgcccgtcgaagagtaccgtcggcgcctggacgccgacaagaaccgtcggatcaaggcggtatttgtcacgcacaacgagacggcgacgggcgtgacttcggacgtggccgccgtgcgggccgcactcgacgataccggccacaaagctttgctgtttgttgatggggtcagctcgatagcatccatcgaatttcgtatggacgactggggtgtcgatctcgccgttaccggctcgcagaagggcctaatgctgccggcaggcctcggtatcctcgccgtcagcccaaaggcgcttgaggcgcacgcgagttcgacgatcgaacgctgctatttcagcttcgaggatatgaaagcgccgtcagagaccggctacttcccctatacgccgccgacacagctattgcttggcctaagagcatcgctggatctgattttcgcggaaggattggacgcagtcatagcccggcaccaccgccttgcggaaggtgttcgccggggtgtccatgcctggggtttgaacctctgtgccacagagaagaaatggtggtccgacacggtctccgccatcgtggtccctgaggacgtagatgcccggcaggttatcgcgaacggctattccaagtaccgcacctctttcggtgctgggctcagcaaggtggcgggccgggttttcaggatcggccacctcggcgacctgaacgaggtcatgtgtctgtcagcgcttgcggcggccgagatgtctctgcgcgatgctggcgcaaagatcgaagccgggtccggcgtcgcggcggcgcaggagtggtatcgctcgcagatcggacttgccgctcccaaccttcaggaacgagcggcatga

SEQ ID NO: 68543 - protein, 401 aa, Sinorhizobium meliloti 1021
MRNGTSHLFVPGPTNIPDAVRRAMNVPMQDMRAPDFPDLVLPLFADLKGVFRTDNGSIFLFPGSGTGAWEAAISNTLNRGDRVLMSRFGQFSHLWADMAGRLGLDVECLDVEWGEGVPVEEYRRRLDADKNRRIKAVFVTHNETATGVTSDVAAVRAALDDTGHKALLFVDGVSSIASIEFRMDDWGVDLAVTGSQKGLMLPAGLGILAVSPKALEAHASSTIERCYFSFEDMKAPSETGYFPYTPPTQLLLGLRASLDLIFAEGLDAVIARHHRLAEGVRRGVHAWGLNLCATEKKWWSDTVSAIVVPEDVDARQVIANGYSKYRTSFGAGLSKVAGRVFRIGHLGDLNEVMCLSALAAAEMSLRDAGAKIEAGSGVAAAQEWYRSQIGLAAPNLQERAA

SEQ ID NO: 68544 - DNA, 1185 bp, Drosophila melanogaster
  CDS (1)..(1185)
atggaggtaccaccgccacttgtactcaagcgaccgctctatgtgcccagcaagacgttgatggggcccggaccctccaactgttcccatcgcgtcctggaggccatgagcaatccggtgttgggtcacatgcatcccgaatgcctgcagatcatggacgaggtgaaggagggcattaagtacatctttcagacactcaacgatgccaccatgtgcatcagcggcgccggccactcgggcatggaggccgctctgtgcaatctgatcgaggatggcgatgtggtgctcatgggcatcacgggcgtctggggtcatcgggccggggatatggcccgtcgctatggtgccgaagttcactacgtggaggcgagtttcggccgggcactgtcgcacgaagagatcacattcgccttcgaggcgcatcgacccaaggtcttcttcattgcccagggtgactcctcgactggcattatccagcagaatatccgtgagctgggcgaactgtgccgcaagtacgattgcttcctcatcgtcgatacggtggcttcgctcggcggcaccgaattcctcatggacgagtggaaggtggatgtggcgtacacgggttcgcagaaatcgctcggtggtcccgccggtctaacgcccatttcgttcagcaagcgtgctttgacccgcatccgaaagcgaaagaccaagccgaaggtttactacttcgatatcctgctgattggtcagtactggggttgctatggcacaccccgcatctaccaccacaccatatcctccaccctgctctacggattgcgtgaggcactggcccacttttgtgccgtcggcctcaaggcggtggtgcgtcgccatcaggagtgctccaagcgactgcagttgggcatcgaggagctgggtcttgagatgtttgtgtcgcgcgaggaggagcgtttgcccacggtgaacacgattaaggtgcccttcggcgtcgactggaaaaaggtggccgagtacgccatgcgcaagtacagcgttgagattagcggtggtctgggtcccacggtggagcacgtcttccgtatcggtttaatgggcgaaaacgctaccgtggagcgcgtggacatggtgctcagcatcctgaacgaggccattcagagcagcaagctggggatcaagacggatctatcgaaaatctaa

SEQ ID NO: 68545 - protein, 394 aa, Drosophila melanogaster
MEVPPPLVLKRPLYVPSKTLMGPGPSNCSHRVLEAMSNPVLGHMHPECLQIMDEVKEGIKYIFQTLNDATMCISGAGHSGMEAALCNLIEDGDVVLMGITGVWGHRAGDMARRYGAEVHYVEASFGRALSHEEITFAFEAHRPKVFFIAQGDSSTGIIQQNIRELGELCRKYDCFLIVDTVASLGGTEFLMDEWKVDVAYTGSQKSLGGPAGLTPISFSKRALTRIRKRKTKPKVYYFDILLIGQYWGCYGTPRIYHHTISSTLLYGLREALAHFCAVGLKAVVRRHQECSKRLQLGIEELGLEMFVSREEERLPTVNTIKVPFGVDWKKVAEYAMRKYSVEISGGLGPTVEHVFRIGLMGENATVERVDMVLSILNEAIQSSKLGIKTDLSKI

SEQ ID NO: 68546 - DNA, 1254 bp, Bradyrhizobium japonicum USDA 110
  CDS (1)..(1254): transl_table=11
atgcaaaatagtcgccagagccggccagaacccgccgacagggaggttttcatgcaccagggacgccatttccttcagattccgggcccgagcccggtccccgagcgagtcctgcgcgccatggacatgccggtcatcgaccaccggagcgccgaattcggcgagctcggccgcaccgtgctcgagggcagccagaagattttccagaccgcggggccggtggtgatcttcccctcgtcggggaccggcgcctgggaggccgcgatcgtcaacacgctgtcgccgggcgaccgggtgctgatggtcgagaccggccatttcgccaccctgtggcgccagatggcgggccgcttcggcatcgaggtcgacttcgttcccggcgactggcgccgtggcgccgatcccgccgtgatcgaggccaagctcaccgaggacaaggcgcgcgcgatcaaggccgtcatggtcgtgcacaacgagacctcgaccggcgcaaccagccgcatcgccgagatccgcgccgcgattgatcgcacggaccatcccgcgttgctgatggtggacaccatctcctcgctcggctcggtcgactaccgccacgacgagtggaaggtcgacgtcagcgtcagctgctcgcagaagggtttcatgctgccgcccggcctcggcttcaacgcgatctcggagaaggcacgcgtagccgcgaagaccaacaagatgccgcgctcctatttcgactgggaggagatgctgaagccgaacgcaaaaggcttcttcccctatacgccggcgaccaatctgctctacggcctgcgcgaggcgatcgcgatgctgctcgaagaggggctcgacaacgtcttcgccaggcatcagcggcttgcggcggccacgcgcgctgccgtcaatcattggggcctcgaagtgctctgccaggagccttcagagttctcgccggtgctcacggccgtgctgatgccgccgggacatgacgccgatcagttccgccagatcgtgctcgaaaactacaacatgtcgctcggctcgggcctgtcgaaggtcgccggaaaagtcttccgcatcggtcatctcggcgaatgcaacgcgctgacattgctcggcgcactcaccggcgtggagatgggcctgtcggttgcgggcgtgccgcatcgccccggcggcgtcgatgtcgcgatgaagcttctggagcagcgcccgcagggcaatgcgtcgccgcatctgaaggtggtcggcacttaa

SEQ ID NO: 68547 - protein, 417 aa, Bradyrhizobium japonicum USDA 110
MQNSRQSRPEPADREVFMHQGRHFLQIPGPSPVPERVLRAMDMPVIDHRSAEFGELGRTVLEGSQKIFQTAGPVVIFPSSGTGAWEAAIVNTLSPGDRVLMVETGHFATLWRQMAGRFGIEVDFVPGDWRRGADPAVIEAKLTEDKARAIKAVMVVHNETSTGATSRIAEIRAAIDRTDHPALLMVDTISSLGSVDYRHDEWKVDVSVSCSQKGFMLPPGLGFNAISEKARVAAKTNKMPRSYFDWEEMLKPNAKGFFPYTPATNLLYGLREAIAMLLEEGLDNVFARHQRLAAATRAAVNHWGLEVLCQEPSEFSPVLTAVLMPPGHDADQFRQIVLENYNMSLGSGLSKVAGKVFRIGHLGECNALTLLGALTGVEMGLSVAGVPHRPGGVDVAMKLLEQRPQGNASPHLKVVGT

SEQ ID NO: 68548 - DNA, 1197 bp, Bordetella bronchiseptica RB50
  CDS (1)..(1197): transl_table=11
atgttcgccctgaacccgcatccgtccggtcgccacttcctgcagattcccggccccaccaatgtgccggatcgcgtgctgcgcgccatcgaccagcccaccatcgaccatcgcggccccgcgttcggccagttggggctggcggtgctggccggactgaagcacgtgtttcgcaccgagtcgccggtgctcatcttccccgcgtccggcaccggcgcctgggaggccgcattggtcaatacgctgtcgccgggcgataccgtgctgatggccgagacgggccatttcgccagcctgtggcgccggctggccggccgcctgggcctggaggtcgattgcctggaaagcgactggcgccatccggccgacccgcaggccatcggcgccaggctggcgcaggacacgcaacaccgcatcaaggccgtgtgcgtggtgcacaacgaaacctccaccggcgtcaccagcgacattgcggcggtgcgcgcggccatcgaccaggccgggcaccccgccttgctgatggtcgatacgatttcctcgctcggctcgatcgattatcgccacgacgaatggggcgtggacgtaaccgtggcgggctcgcagaaaggcctgatgttgccgcccgggctgtcgttcaacgccatcggcccgcgcgcgctggccgctgccgggcaggcccgcctgccgcgttcgtactgggactggcgcgagatgctggtggccaacgagcgcggctacttcccgtacacgcccgccaccaacctgctttatggcctgcacgaagcgctggcgatgctgcgcgaggaaggcctgccgcaggtctatgcgcgccatcgccgccacgcgcacgccacgcggctggcggtggccgcctgggagctggagctgctgtgcctggatccggcgcaatgcagcccggcgctcacggcggtactgatgccgggcggccacagcgccgatgcattccgccagcgggcgctggagcgcttcgatatctcgctggggcagggcctgggcaagctggccgaccgcgtattccgcatcggccacctgggttatttcaacgacttgatgctgtgcggcacgctggccggcgtcgagatgggcctggcggccgcgggtgtgccgcaccgcgccggcggcgtgcaggccgccatggcgttcctggcccagaccccggccgggcagcctgcctga

SEQ ID NO: 68549 - protein, 398 aa, Bordetella bronchiseptica RB50
MFALNPHPSGRHFLQIPGPTNVPDRVLRAIDQPTIDHRGPAFGQLGLAVLAGLKHVFRTESPVLIFPASGTGAWEAALVNTLSPGDTVLMAETGHFASLWRRLAGRLGLEVDCLESDWRHPADPQAIGARLAQDTQHRIKAVCVVHNETSTGVTSDIAAVRAAIDQAGHPALLMVDTISSLGSIDYRHDEWGVDVTVAGSQKGLMLPPGLSFNAIGPRALAAAGQARLPRSYWDWREMLVANERGYFPYTPATNLLYGLHEALAMLREEGLPQVYARHRRHAHATRLAVAAWELELLCLDPAQCSPALTAVLMPGGHSADAFRQRALERFDISLGQGLGKLADRVFRIGHLGYFNDLMLCGTLAGVEMGLAAAGVPHRAGGVQAAMAFLAQTPAGQPA

SEQ ID NO: 68550 - DNA, 1227 bp, Synechococcus sp. WH 8102
  CDS (1)..(1227): transl_table=11
atgtgccgctcgaagcagaggatgcgatgggacatgagacgctgttttctagactcgccgattggctccctccacgccgtgcaggacaagctcaccctgatgattccgggtccgaccccggtgcccgagtcagtgctcaaggccatggggcgccacccgatcggccaccgcagtggtgagttccaggccgttgttcaacgcaccacggaacagctgaaatggctgcaccagacccagggtgatgtgctggtgataaccggcagcggcaccgccgccatggaggccggcatcatcaacaccctcagtcgcggcgacaaggtgctctgcggcgacaacggcaaattcggtgagcgctgggtgaaggttgcgcgcgcctacggactggaggtggaggtgatccaagccgagtggggccaacccctcgacacggaagccttccgcctggccctggaagccgacagcgccaaggcgatcaaagcggtgatcctcacccattccgagacgtccaccggcgttattaacgacctggagaccatcgcccgccatgtgaaggcccacggcaccgccctgaccatcgcggactgcgtcaccagcctcggggccaccgatgtacccatggacgcctggggcgtggatgtggtggcctccggatcccagaagggctacatgcttccccccggcctcagctttgtggccatgggcgaacgggcctggcaggcctatgaacgctcggatctgccgaagttctatctggacctgggcccttaccgaaaaaccgccaccaagaacagcaaccccttcactccggcggtcaatctctatttcggcctggaagctgctttggagatgatgcagaacgagggcctggaagcgatctttgcccgccatgcccgccaccgatcagccgcccaggcggggatgaaagcgatcggcctgccgttgtttgcggctgaaggacacggcagcccagccattaccgctgtggctcccgatggcatcgatgccgagcaattgcgtaaagccgtgaaggagcgctacgacatccttctggcgggcggtcaggatcacctgaagggcaaagtgttccgcatcggccaccttggttatgtctgcgatcgcgatgtcttgaccgccgtgtccgccattgaagccacacttcagtcgttgggtttgcacagcggcaacatgggtgctggcgtcgcggcagcagcaacagcactcagctga

SEQ ID NO: 68551 - protein, 408 aa, Synechococcus sp. WH 8102
MCRSKQRMRWDMRRCFLDSPIGSLHAVQDKLTLMIPGPTPVPESVLKAMGRHPIGHRSGEFQAVVQRTTEQLKWLHQTQGDVLVITGSGTAAMEAGIINTLSRGDKVLCGDNGKFGERWVKVARAYGLEVEVIQAEWGQPLDTEAFRLALEADSAKAIKAVILTHSETSTGVINDLETIARHVKAHGTALTIADCVTSLGATDVPMDAWGVDVVASGSQKGYMLPPGLSFVAMGERAWQAYERSDLPKFYLDLGPYRKTATKNSNPFTPAVNLYFGLEAALEMMQNEGLEAIFARHARHRSAAQAGMKAIGLPLFAAEGHGSPAITAVAPDGIDAEQLRKAVKERYDILLAGGQDHLKGKVFRIGHLGYVCDRDVLTAVSAIEATLQSLGLHSGNMGAGVAAAATALS

SEQ ID NO: 68552 - DNA, 1203 bp, Nasonia vitripennis
  CDS (1)..(1203)
atgcaggtcgaaccgcctaaggaactgttgaagccgctgcagctgccgcagcagagactactgacagggcccggaccaagcaattgttctcaacgggttctacggtcactccagaatcaggttttaggtcacgatcagcccgaaattcttcagtcgatggacgaaataaaagccggcttgcgctacgcattccaaaccgataataagcttacgctggcggttagcgcatccggtcacgggggtatgcaggccgcgatctgcaacatactcgagcgcggagagaatattctcatcgtcaaggccggcatatgggctgaacgggctgctgacatggctgaaaggcttggtatccacgtggatttcatggaaaccgagctgggtgtcgccttcggcctccgggagttcgaggaagccgttaacaagtactgtcccaaggcggtcttcgtcacgcattcggagtcgtcgaccggactgaagcagccgctcgagggacttggtgacatcgtgcacaagtatggaggcttgctgatagtcgacactgtcgcgtctcttggagccgagcctttctttgccgatgcctggggcatcgacgtggtctacaccgggagtcagaaggcactcggagctccagccggtatcacgcccatcagcttcagtcccgctgccgaaaaaaagattctgacgcgcaagagcccggtgccgattttctacttggacatgatctggctgggtcgctattggaactgcttcgagaccgatgagccggagacaccgaggccttatcaccacacgataagtgctacactggtttatggtctccgagaggcgctggcccaaattgtggaagagggtcttgctgcgtcctgggctagacacgccaacgttacgcaaaagtttcacgaaggcctcactgaaagaggatacgagtttttcgtcaagcaacccgaacacagactaaaaaccgtcagtgcttttatactgcccagtgatgttaaggctgaaaccgtcattcgctacgctatggataagtataatcttgagatcgttggaggtatgggtcctactgccggaaaaattatacgcatcgggctgatgggagtgaacgcgacctccgagactgtcgacctcgtcttacgtgcactggatgatgccgtcaaatatgcaaaatcttctcaactcaaatccaatatattgatagtttaa

SEQ ID NO: 68553 - protein, 400 aa, Nasonia vitripennis
MQVEPPKELLKPLQLPQQRLLTGPGPSNCSQRVLRSLQNQVLGHDQPEILQSMDEIKAGLRYAFQTDNKLTLAVSASGHGGMQAAICNILERGENILIVKAGIWAERAADMAERLGIHVDFMETELGVAFGLREFEEAVNKYCPKAVFVTHSESSTGLKQPLEGLGDIVHKYGGLLIVDTVASLGAEPFFADAWGIDVVYTGSQKALGAPAGITPISFSPAAEKKILTRKSPVPIFYLDMIWLGRYWNCFETDEPETPRPYHHTISATLVYGLREALAQIVEEGLAASWARHANVTQKFHEGLTERGYEFFVKQPEHRLKTVSAFILPSDVKAETVIRYAMDKYNLEIVGGMGPTAGKIIRIGLMGVNATSETVDLVLRALDDAVKYAKSSQLKSNILIV

SEQ ID NO: 68554 - DNA, 1182 bp, Nasonia vitripennis
  CDS (1)..(1182)
atggaggtcgagccgccaaaggaactgttgaagccgctgcagctgccgcagagaatactgacggggcccgggccgagcaattgttctcagcgggtgctcaaggcgctagagcagcaggttttaggtcacacgcaccccgagatgtttcagttgatggacgaaatcaaggccggtctgcgctacgcctttcaaacgaagaacaacttgacgctggcgatcagcgcatccggtcacggaggcctggaggccgcgatcggcaacgtgctcgagcgcggagagaatatgctcatcgtcaaggccggcatatgggccgagcgggctgctgacatggctggcagactcggcatccgcgtggatttcatggagaccgagttcggtgtcgccttcggcctccgggagttcgagctcgccgttagcgagtaccggcccaaggccgtcttcgtcgtgcattcggagtcgtcggccggactgaagcagccgctcgagggacttggtgacatcgtgcacaagtatggaggcttgctgatagtcgacactgtcgcgtctcttggagccgagcccttcttcgccgatgcctggggcatcgatgtcgtctacaccgggagtcagaaggcactcggtgctccggccggcatcacgcccatcagcttcagtcccgctgccgaaaaaaagattctgacgcgcaagagcccggtgccggtcttctactgggacatgacctggctaggtcgctattggaactgcttcgatcctcggactcctcggccttatcaccacacgataagcgcgacgctggtttacggtctccgagaggcgctggcccaactcgcggaggagggcctcgctgcgtcctgggctcgacacgccaacgtctctcaaaagttccacgagggcctcgccagaaggggctaccagttgttcgtcaagcaaccccagcaccggcttaaaaccgtcactgctattatgctgcccgatggtgttgaggcccagcccatcattcgctacgctatggacaggtataaccttgagttcagtggaggtctgggccctactgccggaaaagtcatacgcatcggactgatgggagttaacgcgacctccgggcacgccgacctcgttctgcgtgggctggacgatgccgtcaagtatgctaaatcttgtcaacttaaatccaacatataa

SEQ ID NO: 68555 - protein, 393 aa, Nasonia vitripennis
MEVEPPKELLKPLQLPQRILTGPGPSNCSQRVLKALEQQVLGHTHPEMFQLMDEIKAGLRYAFQTKNNLTLAISASGHGGLEAAIGNVLERGENMLIVKAGIWAERAADMAGRLGIRVDFMETEFGVAFGLREFELAVSEYRPKAVFVVHSESSAGLKQPLEGLGDIVHKYGGLLIVDTVASLGAEPFFADAWGIDVVYTGSQKALGAPAGITPISFSPAAEKKILTRKSPVPVFYWDMTWLGRYWNCFDPRTPRPYHHTISATLVYGLREALAQLAEEGLAASWARHANVSQKFHEGLARRGYQLFVKQPQHRLKTVTAIMLPDGVEAQPIIRYAMDRYNLEFSGGLGPTAGKVIRIGLMGVNATSGHADLVLRGLDDAVKYAKSCQLKSNI

SEQ ID NO: 68556 - DNA, 1191 bp, Anopheles gambiae str. PEST
  CDS (1)..(1191)
atggagtaccgcgtaagtgcgccggacgtgttgcgcgatccgttggtagtgccggaaaagttgctgatgggtccggggccctcgaatgcgccgccgcgcgtcctggaagcgatggcacggcccatactggggcatctgcatccggaaacgctcaaaatcatggacgacataaaggcgggcgtgcgctacctgttccagacgaacaatgcggccaccttctgcctgagcgcgtccgggcacggcggcatggaggcgacgctgtgcaacctgctcgaggacggtgacgtggtgctgattggccacacgggtcactggggtgaccgggcggccgatatggcctcgcggtacggtgcggacgttcggctggtgcgcgccagccagggcagttcgctcgcgctgcccgagatacggcgcgcgatcgaaacgcaccgtccgtcggtgctgttcctgacgcagggcgaatcgtccaccggcgtgcggcagggactggaaggggtcggtgcactgtgccgggcgcacgattgcttgctggtggtggacacggttgcatcactcggcggcacaccgttccatatggacgcatgggaggtggatgcggcctataccggttcgcagaaggtgctcggtgcaccgccgggcattacgcccatttccttcaaccaccgggcggttgaacggtacagacggcgccagacgaaggtgaaggtgtactactgggacatgttcctcgtcggcgactactggggttgcttcggtcggccacgcatctatcaccacacgatatcgtcgacgctgctgtacgggctgcgggaagcgattgccatggcgtgcgaggaatcgctcccgtcgctcattgcccgccaccaggactgtgccaagcggctgcacgatgggctgcgtgccatgggactcgagctgtacgcccaggagcgcgaccgactgcccaccgtcacgaccatccgcgtgccgaccggtctggactggctgcaggtgtcccagtacgcgatgaaaacgtatctggttgagattagcggtgggctaggtccgaccgctgggcaagtatttcgcatcggactcatgggccagaatgcaacgagcgagcgggtagatcgtgtgctgcaagtgttccgcgactccatcaaagcggtcaagcccgatttcgcgttcccgcgcagtgcatccaaaatgtga

SEQ ID NO: 68557 - protein, 396 aa, Anopheles gambiae str. PEST
MEYRVSAPDVLRDPLVVPEKLLMGPGPSNAPPRVLEAMARPILGHLHPETLKIMDDIKAGVRYLFQTNNAATFCLSASGHGGMEATLCNLLEDGDVVLIGHTGHWGDRAADMASRYGADVRLVRASQGSSLALPEIRRAIETHRPSVLFLTQGESSTGVRQGLEGVGALCRAHDCLLVVDTVASLGGTPFHMDAWEVDAAYTGSQKVLGAPPGITPISFNHRAVERYRRRQTKVKVYYWDMFLVGDYWGCFGRPRIYHHTISSTLLYGLREAIAMACEESLPSLIARHQDCAKRLHDGLRAMGLELYAQERDRLPTVTTIRVPTGLDWLQVSQYAMKTYLVEISGGLGPTAGQVFRIGLMGQNATSERVDRVLQVFRDSIKAVKPDFAFPRSASKM

SEQ ID NO: 68558 - DNA, 1194 bp, Apis mellifera
  CDS (1)..(1194)
atgaattataaatggaacaaattggcagttcataaggaaccgcctcaaatacttcgaaccaaattacaattgccgataaaaactttaatgagtcctggaccgactaattgttcgaaacgagttcttcaatctttacagaatcaaattcttggccatcttcatccagaattttgtatgttaatggatgaaattaaggaaggccttcaatatatctttcaaactaataatagactcactttggcactaagtgcatcaggtcatggaggtatggaggcttgtttaacaaatttacttgaacctggtgaaactgtactcattgttaagtctggaatttggagtgaacgagcagcttgcatggctaaccgacttggtgcaaatgtaaaattattagaaacagattatactaaaggaatcacattgaaagaattggaaattgctttagaacagcatagaccagttgtggtcttcatggtccatgctgaatcttccacaggtgttaaacaaccattagaagattttggtgtacttattcataaatataatgctttgcttatcgttgatgtggttgcatcattgtgtggcgagccattctttatggattcttgggatatcgatgcagcttacgcgggcagccaaaaagccattggtgcccctccaggactcgcacctatttcgtttagtccgcgagcagaaaagaaattgtttgaaagaaaaacaaaaccctcctcgttttattgggatcttacaattcttggaaattattggaaatgttttggaaatgaggatcgtgtgtatcatcacactatgagtgctacacttctttatggtcttcgtgaagcattggcggaaatcgcagaagagggtcttcaagcattatggaacagacatgctgccgcagctgtcagattaagaaagggtcttgaattacgaggtcttcaatcttacgtaaaaattccacaatatcaattatctacggttatatctgtgcagttgccacctggtgttgtggataaagttgttattcaacgagccatggaaaaatacaaggttgaaattagtagaggcttgggcccaactgttggaaaatttttacgaattggattgctaagagttaacgccacccctgaaaaggtcgatttagttctacgtggtctggacgagggtttgaaatacgcatcggaatcgaaattataa

SEQ ID NO: 68559 - protein, 397 aa, Apis mellifera
MNYKWNKLAVHKEPPQILRTKLQLPIKTLMSPGPTNCSKRVLQSLQNQILGHLHPEFCMLMDEIKEGLQYIFQTNNRLTLALSASGHGGMEACLTNLLEPGETVLIVKSGIWSERAACMANRLGANVKLLETDYTKGITLKELEIALEQHRPVVVFMVHAESSTGVKQPLEDFGVLIHKYNALLIVDVVASLCGEPFFMDSWDIDAAYAGSQKAIGAPPGLAPISFSPRAEKKLFERKTKPSSFYWDLTILGNYWKCFGNEDRVYHHTMSATLLYGLREALAEIAEEGLQALWNRHAAAAVRLRKGLELRGLQSYVKIPQYQLSTVISVQLPPGVVDKVVIQRAMEKYKVEISRGLGPTVGKFLRIGLLRVNATPEKVDLVLRGLDEGLKYASESKL

SEQ ID NO: 68560 - DNA, 1161 bp, Debaryomyces hansenii CBS767
  CDS (1)..(1161)
atgagctctccatgtccatataaacaaccagaacacaaattgaccatgatcccaggtccaattgagttttcagacccggtcctttatgccatgtcgaccccttcgcaagcacacacttctccggagtttatcaagaccttccaaaccactttacaaaacttgagaaaattattcaagtccaccgacagtaaagcgcaaccatacgtgttagctggttcgggtaccttaggttgggatgttgttggtgctaacttggtcaacccaggcgataaggtgttagttttgtccaccggatttttctctgattcttttgctgactgtttaaaggtctacgatgctaatgtggatgttatcactgcagatgttggtgacgtattgccattagacaagattgctgagaaattgaagtcggaaaagtacactgcgattaccattacccatgtcgatacatcgactgccgttgtcagtgacattaaggctatttcagatgttgtgaagaaagaatcaccagaaactttgattgttgtagatggtgtctgctctgttggtgttgagaacttggaattcgatgcatggggtattgatttcgccttgactgcttcgcaaaaggccattggtgttccagctggtttgtcaattttctacgcttctgaaagagctgtcactaaagctttggatagaaagaaagattcgtcattcttcgcctcaatgaagaaatggactccaatcatgaaggcttatgagagtggttcgggtgcttatttcgctactccagctgttcagaccatcacggctttgaaggtctctttagatgaaatattaggtgagtcattgaaaaccagatttgctaagcatgaagaaatttcttcccaattcaagaatcatttggctaaatccggattaaagatcttaccagttaatgacaaggttgctgctcatggtctaactgctgtatacttccctgaaggcattaatggtgcagacttccttggcaaggttgctggaaagggcttcactattgctggtggtatccacaaggcattagtcggtaagtactttagagttggccacatgggtttctctgtctacgaaggtcatgttgacaaacttactaaagccattgacgaggcattggctgaagtaggatacaagaagcaataa

SEQ ID NO: 68561 - protein, 386 aa, Debaryomyces hansenii CBS767
MSSPCPYKQPEHKLTMIPGPIEFSDPVLYAMSTPSQAHTSPEFIKTFQTTLQNLRKLFKSTDSKAQPYVLAGSGTLGWDVVGANLVNPGDKVLVLSTGFFSDSFADCLKVYDANVDVITADVGDVLPLDKIAEKLKSEKYTAITITHVDTSTAVVSDIKAISDVVKKESPETLIVVDGVCSVGVENLEFDAWGIDFALTASQKAIGVPAGLSIFYASERAVTKALDRKKDSSFFASMKKWTPIMKAYESGSGAYFATPAVQTITALKVSLDEILGESLKTRFAKHEEISSQFKNHLAKSGLKILPVNDKVAAHGLTAVYFPEGINGADFLGKVAGKGFTIAGGIHKALVGKYFRVGHMGFSVYEGHVDKLTKAIDEALAEVGYKKQ

SEQ ID NO: 68562 - DNA, 1185 bp, Strongylocentrotus purpuratus
  CDS (1)..(1185)
atggtcggaaataaatccatggcggtgagttctccaaaggagctccttttgccaatgatcgtcccccaaaagctgttgatgggaccagggccttccaacgtaccaccgaggatcctcgcagccggagctctgccgatacttggacacatgcatccggagactttaaagatcatggacgacataaagaagggattacagtatgtattccagacgaagaatgaactaacgttcgctgtgagtggttcaggacattgtgggatggaggcagccatgatgaacctgattgaacccggtgatgtgattctggttgcttccaatgggatctggggagagagaatagcagatctaggcaagagacttggagccaatgtgaaagtattgcagaacccaactggtgtagcattctccctcaaacagattgaacagagtattcacgtttacaaaccagccttatttgccatcacacatggagagtcatcgtctggtgtgttacagccactgcaaggaattggaaacgtgtgccgcaggaatgattgtctcttcttggtagactctgttgcatctctgggaggggtgcctatgtttgtggatgaatggggtattgatgccatctacagtggtagccagaaggtccttggtgcaccccctggtactgctcctatatcattcagtcaaagagcaatatccaagtttaagagcaagaagatcagagtgccttctttctatctggatctgaatcatctagccaactactggggttgtgatgcagggcctaggagataccaccatacatgtccagtgacaaacctttatcaactgagggaaggattggctatggtagcagaagaggggctagaggaatgctggaagcgccacaaggctgcagcccgggccctctacgctggactggagaaactgggacttaaattgtttgttgaagatgaggcgacccgtctccccacagtaagcgccatcttggtaccccctggtacggactggaagaaggtggtcgtgtatgtgatgcagaagtacagaatagagatatctggtggacttgggcctagttcaggaaaggtatggcgcatagggctgatggggtacaacgcaaaccaagacaatgtgaagagagtcttaagagtgctggaggatggactcaaccatagcaggaccacatctcgtctctag

SEQ ID NO: 68563 - protein, 394 aa, Strongylocentrotus purpuratus
MVGNKSMAVSSPKELLLPMIVPQKLLMGPGPSNVPPRILAAGALPILGHMHPETLKIMDDIKKGLQYVFQTKNELTFAVSGSGHCGMEAAMMNLIEPGDVILVASNGIWGERIADLGKRLGANVKVLQNPTGVAFSLKQIEQSIHVYKPALFAITHGESSSGVLQPLQGIGNVCRRNDCLFLVDSVASLGGVPMFVDEWGIDAIYSGSQKVLGAPPGTAPISFSQRAISKFKSKKIRVPSFYLDLNHLANYWGCDAGPRRYHHTCPVTNLYQLREGLAMVAEEGLEECWKRHKAAARALYAGLEKLGLKLFVEDEATRLPTVSAILVPPGTDWKKVVVYVMQKYRIEISGGLGPSSGKVWRIGLMGYNANQDNVKRVLRVLEDGLNHSRTTSRL

SEQ ID NO: 68564 - DNA, 1170 bp, Tribolium castaneum
  CDS (1)..(1170)
atggacgtaccaccgccccaagaactaacccagcctttgcaagtcccctccaagaccctcatgggtccgggaccctcaaactgctccccaagggtcatggaggccatttcgagacccatcttggggcacatgcatcccgaaatattcaagataatggacgatatcaaagccggcatccgctacgtgttccaaactagcaaccccctgaccctcgccgtcagcgcctccggtcacgggggcatggaggccgtgctctgcaacctcctggagcccggggacacggccctgatcgccgtcaacggcatttggggcgaacgcgccgcttccatggccggcagatacggggccaaagtcaccaccgtcgaggccgaagtcggtcacgatttcaccctcgcccagatcgaaaatgccgtcagcaagcaccgaccacacgtgcttttcgtcacccaaggcgagagttcctccggcgtttatcaaaacatcgaaggaattggcgatatctgccacagatatgggtgcctgctggcggtggacacggtggcctccttgggcggagtgccgttcctcgctgacaggtggggcgtggacgctgtctacaccggcacgcagaaggtcctaggcgctccggccgggctcgcccccatctccttcagccccagggcgcagcgtaaaattttcgagcgcaagagcccggtgaaggtgctctactgggacatgacggtgctgggcgattactgggattgctttggtcgttcccgggtgtaccatcacaccatcgcctcgcagcttttatacggcctgagggagggtttggcgcaaattgccgaggaagggttggagagcgtcaacagaaggcaccaagagtgcgctcagaggttttaccgggggttggagaggttgaggctgcaacccttcgtcaccgacacgtataagaggttgcctactgtgacgtccatcaaagtgcctgacggtgtggattggcgggaagtggtggcgtacgccatgaaaaattattcggtggaaattagtggtggtttgggcccgtccgcgaataaagtgttcagggttggtttgatgggctataatgcgacgcctgagaaggttgatctggttttggaggttttggaaaaggcgctgaaggcgtcaggttggaatcgcagtaaattgtaa

SEQ ID NO: 68565 - protein, 389 aa, Tribolium castaneum
MDVPPPQELTQPLQVPSKTLMGPGPSNCSPRVMEAISRPILGHMHPEIFKIMDDIKAGIRYVFQTSNPLTLAVSASGHGGMEAVLCNLLEPGDTALIAVNGIWGERAASMAGRYGAKVTTVEAEVGHDFTLAQIENAVSKHRPHVLFVTQGESSSGVYQNIEGIGDICHRYGCLLAVDTVASLGGVPFLADRWGVDAVYTGTQKVLGAPAGLAPISFSPRAQRKIFERKSPVKVLYWDMTVLGDYWDCFGRSRVYHHTIASQLLYGLREGLAQIAEEGLESVNRRHQECAQRFYRGLERLRLQPFVTDTYKRLPTVTSIKVPDGVDWREVVAYAMKNYSVEISGGLGPSANKVFRVGLMGYNATPEKVDLVLEVLEKALKASGWNRSKL

SEQ ID NO: 68566 - DNA, 1167 bp, Tribolium castaneum
  CDS (1)..(1167)
atgtcaaaacaattagatatcgaatgtgagtacaagaaaaccgcgaaacggttttcttcaccagaataccttctattgggtgctggaccgatgaatatttctgaaagagttgccaaagcgttatcacgccaacctttgaatcctttgggagcagacatttaccaaattcaagatgaaatcaaagtcatgctgaagtaccttttccaaacaaaaaataattacacttttgtgagccaaacgtcgggaaatggcgggaatgaggcaataatggtcaatcttctagaccccggagatcgggtggttatagcaattgggggcacttggggcgagaaaatggtagatatggcgcaaagatacaatttcgatattctctcgctcaggaaaaatcccggcgaaatttttactttacaagaacttgaaaatgcagtggttgaccacaaagccaaaatgttatttgtgactcatggagaatccaccggggggactctccaaccccttgaaggtctcggtgccatgtgccacaaatacgactgtctgcttgctgtcgacgctattgtctctatagcagtggacccactttttgtcgatcgatgggagattgacgctgtgagtgctggaagccaaaaaggcataggtgcacctcctggcacttgtatgctgagtttcagtcccagagctgagaaacgaatgagtgagataaaagtaccacccccgtactacttagatatgagaagaatagcaatttactggaagtgcacccctgaagctagacaataccagtacacattttcatcaaacttgctagcttcactacgagaagctttggcggaaatttgtgaagaaggtcttgtccagatttgggaaaggcatacgtccaatactaaacttttctggaaaaaacttgaaaaacttggtcttgaacctttcgtgaaggacgtcaaaaatcgcttcatgggggtcacccctgtgaagctacctccaggaatcgaccaaattgagtttctcaactttttacgacaaaaatttcagattgatatcaccgccggtcacggccctaccagcggtaaggctattcgggtgggctttttaggccataacagtagacccgaagtggtcgaatacttggcagaggctctaaaagccgctctcgagcactttaagaaatga

SEQ ID NO: 68567 - protein, 388 aa, Tribolium castaneum
MSKQLDIECEYKKTAKRFSSPEYLLLGAGPMNISERVAKALSRQPLNPLGADIYQIQDEIKVMLKYLFQTKNNYTFVSQTSGNGGNEAIMVNLLDPGDRVVIAIGGTWGEKMVDMAQRYNFDILSLRKNPGEIFTLQELENAVVDHKAKMLFVTHGESTGGTLQPLEGLGAMCHKYDCLLAVDAIVSIAVDPLFVDRWEIDAVSAGSQKGIGAPPGTCMLSFSPRAEKRMSEIKVPPPYYLDMRRIAIYWKCTPEARQYQYTFSSNLLASLREALAEICEEGLVQIWERHTSNTKLFWKKLEKLGLEPFVKDVKNRFMGVTPVKLPPGIDQIEFLNFLRQKFQIDITAGHGPTSGKAIRVGFLGHNSRPEVVEYLAEALKAALEHFKK

SEQ ID NO: 68568 - DNA, 1167 bp, Tribolium castaneum
  CDS (1)..(1167)
atgtcgaaacaactggacgtaaaaagtgagtataagaaaaccgcgaagcggttttccccaaaggagtatctcctgttgggcgccgggcccacgaatatctctgaacgggtcgctaaagccttgtcccatcaatgcttgaatccaatgggggctgacattttccagattcaagacgaaatcaaagtcatgctgaagtatgtcttccaaacgaaaaataatctcacgcttgtgagccaaacgtcgggaaatggcggcaatgaagccatcttggtcaatcttctagaccccggagatcgggtggtgatagcaattgggggcacttggggcgagaaaatggtcgatatggggcaaagatacaatttcgatattctcccactcaggaaaaatcccggcgaaatttttactttacaagagcttgaagatgcagtggtacgccacaaggccaaaatgttatttgtgactcatggagaatccaccggagggactctccaaccccttgaaggtcttggtgccatgtgtcacaaacaccagtgcttgtttgcagtcgatgctatcgtttccatatcagtggaaccactttttgtcgatcgctgggagattgacgctgtgagtgctggcagtcagaaagccataggtgcacctcctggcacttgtatgctaagtttcagtcccagagccgagaaacgaatgagcgagataaaagtaccaccaccgtactacatggacatgaaaagactggcagtttactggaagtgcactcctgaaccaagacagtaccactacactttttcctcaaatttactagcttcagtacgggaagctttggctgaaatttgtgaggagggtcttgtcgaggtttgggaacgacacgcgtccaacacgcgacttttctggaagaaactccaggaaatcggtctagaaccgttcgtccagaacgtcaagaaccgtttcatgggggttacccccgtgaagcttcccccaggaatcgaccaaatggagttcctcaactttatgcgacaaaagtaccaaatcgatattacaccgggctatgggcccactttgggcaaagctatccgcgtcggctttctaggccagaacagcaggcccgaaatggtcgaatacatggcagaagcgctaaagggcgctctcgaacattttaacaagtga

SEQ ID NO: 68569 - protein, 388 aa, Tribolium castaneum
MSKQLDVKSEYKKTAKRFSPKEYLLLGAGPTNISERVAKALSHQCLNPMGADIFQIQDEIKVMLKYVFQTKNNLTLVSQTSGNGGNEAILVNLLDPGDRVVIAIGGTWGEKMVDMGQRYNFDILPLRKNPGEIFTLQELEDAVVRHKAKMLFVTHGESTGGTLQPLEGLGAMCHKHQCLFAVDAIVSISVEPLFVDRWEIDAVSAGSQKAIGAPPGTCMLSFSPRAEKRMSEIKVPPPYYMDMKRLAVYWKCTPEPRQYHYTFSSNLLASVREALAEICEEGLVEVWERHASNTRLFWKKLQEIGLEPFVQNVKNRFMGVTPVKLPPGIDQMEFLNFMRQKYQIDITPGYGPTLGKAIRVGFLGQNSRPEMVEYMAEALKGALEHFNK
